United States Patent Application Publication US 2007/0054278 A1 - sequence listing, part 65

SEQ ID NO: 95584 - DNA, 176819 bp, Homo sapiens
  misc_feature (1)...(176819): n = A,T,C or G
acatgcagaggtgacactccacccagcaccctcggcacagatgctgctcacctcctcctgggcttcccacatctgggcaaggccacaggaccaccccatagtccgccccagggaagtagagccctcaccgctgggacagattcatctccttggccactcgctgggacatggccacggcggccactcggcggggctccgtgacaccgatgatgctgtcttcactgggggaggaagaacatggccatcaacagtgcgcggccccacctgttcatgccaaagcctcatgcagttccacagcaagatttgccatactgacctggcgctcacccaggggcggtgggaaacagtgccaggttgcactacttttaacagcaaacggaacagcccaaaggccaacacatagaaaacggttcgacattcaccatgcagcggacaccaggcagccgctagaaggaacggggcctgggggaaccaggctgggagctctgtttgccccagtcaagcacaagctcctccagacacaggaacccgccaagccgatgggtggctggtcccagctctgtgggaacattaacaccacagacctgcagctgctctccctcgaaaggctgctgacggggctggccctcgctgggtgcctgaacctgtacaacaggagagctccttccattccctgtaagtgcggggcccactgtgcccagcctgtttgtgcaaacagggtggtttatgccggacacctgctttccttttaggcgtctaggatttcgttcctgccaggcagggtgggcttaggcgaccccagtaacagccgtggaccctgaatctctaacaagcttccctggtggaggatagttcctgtgtggccacaggtggctactggagaatccagtgcgtcctgtgtgagtccaccgggaggggactctggaagctggagctgggtttccccagaacaccccaggtaccactgccctctgctgatcgcgtccttcgctgtaatataccatagccatgtgcaggataacatgctgagtccygggagtccccggtcaatcaccgaacctgagcatggtcttggggaccccaacacacatgggtcaaaagtgccaatagcaggctacacagtgaaaatggtaagcgcaggctgggcggggtggctcacgcctgtaatcccagcactttgggaggtcgaggtgggtggatcacatgaggtcaggagttcaagaccagcctgaccaacacggtgaaactctgtctcttggccgggtgcagtggctcatgcctgtaatcccagcactttgggaggccgaggcaggcggatcacgaggtcaggagatcgagaccatcccggctaacatggtgaaaccccgtctctactaaaaatacaaaaaaattagctgggcgtggtggtgggcgcctgtagtcccagctacttgggaggctgaggcaggagaatggcgtgaacccgggaggcgcagcttgcagtgagccgagatcgcgccactacactccagcctgggcaacagagtgaggctccgtctcaaaaataataataataaaaagaaaaaagaaaaaaaaaagaaaccctgtctctactaaaaatacaaaaattagctgggtgtggtggcgggcgcctgtaatcccagctgttgaggaggctgaggcaggagaatcacttgaacccgggaggcggagttgcagtgagccaatatcacaccactgtactccagccggggtgacacagcgagacgctgtctcaaaaaaaaaaaaaaaaaggaaaaaagaaaatagtaagcacatagctctacgtgccaggaattaagtgtgctacgcaagttcactcacttaatccacacgacaaccttgtgaagtaggcgctattattcccatctcacagctggggcccagagaggttaagtagcttgtctgaagtcacacagcatgcacagggcagatccaggattggatcctggggagcccaggctcttatcgacctttcagggcatctccagtgtcactgagggacccagagagaaccctgtgtccagcccctacctgctgaagcctgcttcatagagaaactgaggcacctgtgtggtcttcccgctgccggtctcaccacacacgatgacgatggggtgctyggccacagcctccatgattacttgttcttcggagagaattgggagcttcagccgttcctcctggaaggagaggaagtcagcacttagggagcagcaagactatagacagtgatgggacctccaggaaggtggcagctgacacatgggtgctgaacagatgtgcctgctggggaacagaggccctgacagctggggaggggaccaggagccatggtccaggagagacagagacagggatcacatccttcaggacaccaggactgacatccccaggcacagcttggttggggcagagcagtctctcagagatacgggaaccctcggctgttgctggcaggagtctcaattaacggcccagccacttcgataaataatctggtgcaaattttctcaaagttaagatgtgtggccctgcagttcctctcctaggtacatattccagagcaggggctttctacattttttcctgtgactcatggaaagaaacacattttatatcatgactcagtacacacacaggcacatatatgtatcgtatatggaaggaacagttctgtgaaacatggctcaccctaaggtgtatgcaatggcgcgatctcggctcactgcaacctctgcctcccgggttcaagcgattctcccgcctcagcctcctgagtagctgggattacaggcacatgccaccacgcccagctaatttttgtatttttagtggaaatgtggtttcaccaggttggccaggctggtcttgaactcctgacctcaggtgatctgcccacctcggcctcccaaagtgctgggattacaggcatgagccaccatgcctggccaacaagctcatattcttaatttttgttctatttctattctattctattccacttgttgtatttatttactttttgagacagagtttcactcttgttgtccaggctggagtgcaatagtgtgatcttggctcactgcaacctccacctcctgggttcaagtgattctcctgcctcagcctcctgagtagctgggattacaggcacccaccaccatgcctggctaatttttgtatttttagtagagacggggtttcactctgttggccgggctggtctcaaactcctgacctcaggtgatccacctgccttggcctcccaaagtgttgggattataggggtgagccaccctgcccagcctgctccagcaaatcttaaatatccatgcacactgaataaacatgcacctgaaacaggtgcacgtttcaggaagtgaatggaactctccannnnnnnnnnnnnnnnnnnntctgctccaccaggcgctgctccgtggtcagtcgatccgcgcccattttcaatactcatcaagcgagctatgtgaccatgctctactcttctcttcacctccatctccccttccgctctattgaagtctaccttcgcttggacttataggctcccgtatcctccttagcttctcgctactcccccgcgcgtccccgtccgctggggataccctcgataacagggcccaccggagatgcctctatacccctgccactcatgctgtgtgttcccgtcttggtggtacggcattccgttgttccttctcgatatccgtttggcttcccgctcttatgtcatgtgatgttgctcttgcattttttttattattcctcttttgctggcctaacttgtagtcggccccttctgtgtcccggtgtcgtacagtggttattttgcttccacgtcttcttttgtgtgagtcttttttgcgcctatttcggggccgtcagaatataatctgcctttgcctctcaagtcgctgggatttcaggcgtgagccatcgtgcctggcctccatttgttttttttaaaaatatgaggccaggcatgatggctcacgcctgtaatcccagcgacttgagaggccaaggcagaggactgcttgaggtcaggaattcaagaccagcctgggcaacatagccagactctgtctctacaaaaaaataaaaataaaaaagttagccaggcatggtggcacatatctgtagtgccagctactcaggaggctgaggtgggaggaccgcttgagcccaggaggtagaggctgcagtgaactgtgatcacaccactgcactccagcctgggtaacagaacaagacactgtctcaaaaaaaaaaaaaagattaaaagctactcaattcatgacccaaagatggctatcacgtcatttgcaaacactgcccaagagaaacttctgcacatgcgctcataggagagggacaagaacgtttaaaacagcagtgaaggctagtcatgtgctcatgcctgtaatcccagcactttaggaggccaaagtgggcagattgcctgagtttgggagttgcctgagcttgggagttcaagaccagcctgggcaacatggcaaaaccccgtctctacaaaaaaaatacaaagttagccaagcgtagtagcgtgtgcccacagtcccaggctctttgggagggtgaggcaggagggtcacttgagcctcggaggcggaggttgcagtcagctgagatcaaacctctgcactttagcctgggtgacagagtgagaccctgtttcaaacgaacaaacaacaaaaacagcagtgaagataacagcaaaaagctaaaacaaccaactatccagcaacagaatactcatcctgcgctatattcacaccgtgaatactcgatagcagtggggaaaaagtaaatgagcctcagctgcctgcatcaacatggatgtatcccaagatataatgctgagtaacaaaaaagcaaactggaataacgtaaaggacatgatgccacttttaaatacaggcaaacctacggtatgtattgcttaggaatatggacaggatacgaatagggaaaaattcacaaagaaaagcaggaactgaagtcccaagggatggcagggacacgggatggaggaggccaagcccctgagtgaccgcgcggagcagaaccccacaccctccttgccaccagatggcactgggtgatgacatcacctagaagcaaacgtttgtggtgtgaagccactggcactttggggtcatttgctagagcggtcagcttaccctgatgaagacttataaaagcagaaaaatgtacttagaagcaggatcccaattccattcaacggccaacattactcctctagggatccagagttcctacgtgggctgtgggctttccatgccccaaatcctttcattgtcatcacaacccagtgagacactcattgtaccaggaaggaaacaggaacagagagggggagccccttcagtagccggaatattcccattttacagatgcgcgggaagtgagctggagagcaggggaatcagcacttgatttcgggtcaactgattcacagcccaaactcttgtctggatcggggcagcccaggccaggcccgctggtcagagggcagtggcgatgaagctactgccgccgacctccagggccccgagcctgccaggcgtgccgccagacacccgccctgcactgtgatcctcctcgcgcaccaatccctgccacagcctcaagggaggcgcagtcactctcccctttcccagatggggacatggaggcacagagaagggatgcccttgccccacttcaccaggacgccctctgtgcgccccttgcccgctaacctagattcttaatcacaaacacggggtggcraacctgcatttccggggagcggttcacggggatgaagacggcgggcttagccagggccctgggcagtggtggggctgcagctggaggaggaggaacagtcatcccagccggcacgggctgactgctgggtgctggagctggcggcagaggtgccacggtggtccccacaccagcctcagccggctcagcagctgggtcctcgtccagctccgactcctcctccagctccgattccgactcctcctcctcctcctcctcctcctcagctgagggccagcggcgacgcttccggtgggcaccgctgaggctactgatcttctcctggcccggggctaccacctcgtcagccttcctgttgagatagcagagacttcaggcacagaggccccacctcaatcccagaggtcaggactccaaggccatacccctttctgcctcagggactttgcacctgctgttccactccctgaaatgcccttcctgcagatacctcctctcactccacttaagcctctgcttaagcactagctgtcagggagactccctgaccacacacagaccccacatctcacccttctccctccacctcgctcttccctgcttcattttctgctcagtgcttcccagcgtgggacacagatgcactcgcctgatgacttcccacgattacatctcccgccatgacactgggaagctccttaagagaaaggactttatttctgtgcactgctstatccccagggcctagcagagagcctgggacagtctctgcactcgataaacagtcactaactgacagtgctcacaggcaccagtcaggcctcatgtaaatgagcagcacaggctgaggagaccacagagtggggtgggactgggtgggargggcacacaggccatttaagggycagcagcytggtggggacactgctggtgtggccggatcgtccaactagtcgagactaggtgggaacatgaattcaccttgtcgcccaggacggagtgcagtggtgcaatcacggctcactgtagcttcaacctcccaggctcaggtgatcctcccacctcagccgccagagtagctgagaccacaggcatgagccaccatgcccagctaatttttgtatttttagtggagacagggtttcaccatgttggccatgctagtctcaaactcctgacctcaggtgatccacccgcctcggcctcccaaagtgctgggattacaggtatgagccacggcacccttctggcttggttgttctaagccaccgctgtttgcagtaatttgttatggcagcgccaggaagctaacatattggcaaacagcactcatgccttaaaaaacgacacaaaccagtcgggcgcggtggctcacgcctgtaatcccagcactttgggaggccgaggcgggcagatcacccaaggttgggagttcragaccagcctgaccaacatggagaaaccccgtctctactaaaaatacaaaattagccgggcttggtggtgcatgcctgtaatcccagctacttgggaggctgaggcaggagaatcgcttgaacctgggaggtggaggttgyggtaagctgagatcacgccattgcactccagcctgggtgacaaagcaagactctgtctcaaaaaaaaaaaacaaaaaaaaacacgacacaaaccaaaccaaacccgctgatgggccaaatccagcccttgaccacctaatggcaatttctggcctaatcagctgcacaaaagctggaagagctgtaacaagggactctacaccacaggaaaacaccgacatcactggagcgagaaactttgctgtcctgtgtgtcgcagaaggttcagcagcatctgtggcctttacccactagaggcatttaggatgacaatgaattttcagccactcaggccaccataaaggtattttctcaaatgttccacccccagaggacccyataacctgtgcgccctccctagggggccctggagggagggcagggttagcaaaggactggccaactcactctttggtgtgatacatgcggttcccagtgcctagcttggaagtggtataaaagagtctcatctcagcttcggaagcctggacttcactcagcttctgtagyatctctgctcgctgggaaaggaaacgagtgtattatgcatttgccatcacgaccctctcttaagaagggaagtgagactctaataaaatttcagcatcattaacacctggagtctttaaaatcggcggtcaaattgcaattctactggtgcatggtgttcttccatcaacagacacagcaagctggcttttttaaccccttttacagaatctggggttgtataaatgaggttctctgcagcagggtatcacagtagaagattatggcccaccagatgtccatcaacaggagatgaataaagcacagctcagtcatgtacagcagtgctccctagctgctctgaggaaggaggcggctttgtgtgtctgatgtgaattggtccccgagctaccctgagcaatgctgtgtgcagggggtgtacccagttggcttcttttagttgggtgagggtttcgtgagtttttactttattgttcttgtaactgtacatataggttttatacacacttcttttgagacagagtgtcgctctgtcacccaggctggagtgcagtggtgcgatctcggctcactgcaagctctgcctcctgggttcacgccattctcctgcctcagcctctccaagtagctgggactacaggcgcccgccaccatgcctggctaattttttgtatttttagtagagacggggtttcaccgtggtctcgatctcctgacctcatgatctgcccgcctcggcctcccaaagttctgggattacaagcgtgagccaccgcgcccagcctacacacttctatgtgtgtattacacacacacacacacacacacacagaacaaggtatagcacagcgggaaagcaccctaaataggatttaaaaaggacacactgaccaggcacagtggctcacgcctgcaatctcagcactttaggaggcagaggcgggtggatcacctgaggtcaggagttcaagaccaacctaaccaacatggtgaaaccatgtctctactaaaaatacaaaaattagccgggcatggtggcgcatgcttgtggtaccagctacccgggaggctgaggcaggacaatggcttgaacctgggaggcagaggttgcagtgagctgagatcataccactgcactccagcctgggcaacagagcaagaccttgtctccaaaaaaaaaaaaaaaaaagaacacgctcacaggtgagtaagtcttccccctactaaggctctggggactgcccatccacggctgctggagagagaccctcaagcctcctgatgtgaagacacagctcccacgtgcagtggcctcaccaaaagtcaaacttgattctcatgaaggctccaggtcagggttcctcaatctcagcactattgacatttagggccaaataagtttttgtttttctgtgcattataggctgttaacagcatcccatggctccacccgccagatgccagcagcactcccaagttgtcacagcccaaaatgtctcaagacactgccaaatgtccctggggcagcggggggcggcgcgcaaaactgttccggatgacagtcactgctacagatccaaatactaatgtacaaaaagctcagatggcagaggagcatgtttaaaataaaattttaaggctgggcgcagtggctcacgcctataatccctgcactcggggaggccgaggcaggtgggtcacttcaggttgggagttcaagaycagcctgaccaacatggagaaaccctgtctctattaaaaataacaaagttagccggacgtggtggtgcatgcctgtaatcccagctactcgggaggctgaggcaggagaatcacttgaacccgggaggtggaggttgcggtgcgccgagatcatgccattgcactccagcctgggcaacaagagcaaaactccatctcaaaaaataataaaataaaataaaaatttaaaaatccagaaggtaggaaactgtaagacaaacaacaaataaactacaatgggaaaaaaaaacaagaaaagggtgaggagtatccatgaaacaacaggaaatttaaccacttgctagatgtttgatattaaaataaaagattaggtgtgctaatggtattctggtcatttttaaaagtctctacttatagagatacaaattgaaatatttatggatataatgctatgtatagtgggttaaatggcagcctccctcaaagacgtgttcgtatcccagaacttgcgaacgtgaccctatttggaaaaaggttttgtagatgtaattacgtaattacgtgaaggatctcaagatgagatgatcctgagtatctgagcgcgacctaaatccaatgagaagcgcccttcgaagagacacacggaggaaaggccgagggaagagggaggcagagattggagtgacgcagccacaagccaagggaacgcctggagccgccaggagcaggaagaggccaggaatgaccctcccctgagcccagtgaggagcaccgccctgccaacaccttgatctcggacttctggcctcctaagctgggaaggaacaaatttctattgtcctaagcccctcagtttgtggtcatttgtatgacatccccaggaaactagtacagattcactgtatgtgggatttgcttcaaaatgacccagaggtgggaaagtgaccagcagtggagataatccaagattgaccaggggctgatcaatgttggagctggcgatgggcacatgggagttcatcatactgttctctttactcttgcaaatgtttgaatttcccttgcaaatgtttgaatttcccatgacaaacttttttcctctatgaaaaaattaaggttggctgggcatggtggttcacgcctataatcccagcactttgggaggccgaggcgggcggatcacgaggtcaggatatcaagatcatcctggctaacatgatgaaaccccgcctctactaaaaatacaaaaaaaaaaaaaaaaatagcctgacgtggtggcacgcgcctgtaatcccagctacacaggaggctgaggcaggagaatcacttgataccaggagaacccaagatcatttcactgcactccagcctgggcaacagagcaagactccatctcaaaaaaaaaaaatttttttaaggtttggtagagccagaaaagatgtcgggggtgggggaacaaaacaaaaaagaaaaaaaaattaaatttaaattaaaaaaaaaaaaagaagaaaaaacaaggaaaaaagtttgacattctccggaacagttcagttcagttcctctgccatagtagctgcatttcaagtgctcaacagcaatatgtggttagtggctaccgcactggaccatgcactggaattttcctcattccagaaagttctattagttgcaccacagagacaccctcaggaggagagagaccccccatctctctctatgctggagagccacttgcagaccctgcccgagtggggtgtacctggctctttttctccttctgttctaagattttctgcagcactttcttctccttcttggtcagaggcttcttctccttcttcgacaggggaggggctttggtcttctttttcttcttccccggtagaacgagcgcgttgcttgcatcaactcccttcaacgtgtccttgtctgagagagcacagttattaagtccccattctccttgaggtagctctggtcccgcctcccacaagccccctgacttgcatgggggcctcctgagtctgcacacaggaacagggggatctgtgagctcaaatctattttcataacaatactatgatgttctcaaggcttggcgcaggggctcatgcctgtaatcccagcactttgggaggctgaggcaggtggctcacttgaggtcaggagttcgagaccagcctggcctatgtggcgaaaccctgtctctactaaaaatacaaaaattagccaggtgtgatggcatgcacctataatcccagctacacaggaggctgaggcacgagaactgcttgaacccgggaggtggaggttgcagtgagcagagatcacgccactgcactccagcctaggcgacagagcaaggctccatctcaaataaataaataaataaaagaaggtaatctgagtcatgttcttatgagattcctctggcccctgagaaaggcagggatacatggaaatgtcctgttctgatgtgagaaacaactttccccaaatctctgggtctgagagacctcagcccctctgctcaggtggtccagttccaagtgtcagcccagtgtctacggctgtctttgaggtgccatcctgaattgtcactgccatcataacggttgtcacctgtcctgggacacaccccacctctgtaacctttctttacttttcaaagcaacatattttcccaaattaccatctccaaaactctgataggaggtaagacggctactacaggttaaatatccctttccagaaatgctaggaaccagacctgttttagctttaggaacatctgtattctattcactggttgagcatccctaatctaaaaatttgaaatctggaatgctccaatgagcatttccttaagtgtcatgttgacactcaaaaacttttgaattttggagtattttggattaaggctgctcaacgtgtgctactggtcccattctgcagatgtgaaaacgaaggcacagagatgttaggggatctgcctcaactcccagcctgtctgtggaactttttttttttttttttttttttgagatggagtctcgctctctcacccaggctagagtacagtggtgcgatcttggctcactgcaacctccgtatcctgggttcaagccattctcctgcctcagcctcccaagtagctgggactacaggtgcccaccaccacgcctcctctgctctaaatgctcccatggctgccctctcccgtagagaaaaagccccagtcctcgccaagactgcagtccaggcccgacctgccctggccccctgttttttctctcatctccaggcagccactcaggtctccttcagatcttgactctaacagagtgatgtcttctccagcaactctatgggatgctgcaacccacccaatggcctcttctgttttatctgctcactrtagccacataaatttctatatgtttattctttgcctgtctcctcctatacagcaggtaaactcagggattttctaaaaatctccctttctgctatgtctccagtgcctagaatagtgcctggcatgtaataagggctactcctaaaaaggggtctgagagaaatgtcagccagcctggagctgagcagacaagactgggctgaaaatacacatttgggggtcgctggagattataaagagattataatcgaagtcatgggaagggatggaactactcctgttttttttgccaaattctccatgttactatttgagggcgagagaaatcccgggtattccatatacactgttaaaactaggctgtcactaagcccctctcctttggatcatctggaatggnnnnnnnnnnnnnnnnnnnnnnnnnnnnnnnnnnnnnnnnnnnnnnnnnnnnnnnnnnnnnnnnnnnnnnnnnnnnnnnnnnnnnnnnnnnnnnnnnnnnnnnnnnnnnnnnnnnnnnnnnnnnnnnnnnnnnnnnnnnnnnnnnnnnnnnnnnnnnnnnnnnnnnnnnnnnnnnnnnnnnnnnnnnnnnnnnnnnnnnnnnnnnnnnnnnnnnnnnnnnnnnnnnnnnnnnnnnnnnnnnnnnnnnnnnnnnnnnnnnnnnnnnnnnnnnnnnnnnnnnnnnnnnnnnnntccgaaacccagcccacgtgggttcccagtaccaccaactccggccgtgagacttccgggttgtgttatcgcgagaactgtaactgactttgccgctgaggggcggggttgcaagagaaacccagcgaagaggagaggcggagccgggccgggcagggggcgggactatttagagaagtaggcggggcctgaggtcccagcggaggcccgagtttaagtcctgggctgttctcgcttggggtagtctgggtttaaatatgaattatatctactgatactaatttggcttcttgggagtggaagtgttttgccaccttttaaaatataccccgcccccagtactccaaacttcttccccccaaccctggtttgcgcatctgtattttctgatattcctacaagaaacgtattagtcgtgtacttttaaaaaggcaccaaatatttccatcacagggatagatggaagatctaaaaggaggcctctacgggcgcggtggctcacgcctgtaatcccagcacttttggaggccgaggcgggcggatcacgaggtcaggatttcaagaccagcctggccaagatggtgaaacccccgtctctaccaaaaatacaaaaaaaatttagctaggcctggtggcaggcgtctgtaatcccagctacttgggaggctgaggcagagaattgattgaacccgggaggtggacgttgcagtgagccgagactgcaccactgcacttcagcctgggcaacagagctagactctgtctcaaaaaaaaaaaaataaagttgtctattacataactttaaattcccattaccgcatcacattgtaacacactgggaaacaatgcattattattattattgagacaaggtctggctttgttgcccaggctggagtgtagtggagcaatctcggctcactgcaacctctgcctcccgggtttaaacgattctcctgcctcagccttccgagtagctgggactacaggtgcccgccaccacccccagctagtttttgtattttagtagagacggagtttcaccatgttggccaggctggtctcaaactcctgacctcgtgatctgcctgcctgggcctcccaaagtgctgggattacaggcatgagccaccgcgcccgacttttttttttttttttttaagagatgagatctcgccctgtgggccaggccagagtgcagtggtgcaatcaccactcgctgcagccttgacctgtcctcccacctcagcctcctgagtagttaggactacaggcacacaccaccacgacgggctaatttttctatttttttgtagagatggtgtctccctatgttgcttagactggtctcaaaattctgggctcaagggatccgtttgtctcggcctcccaaagtgccggaattacaggcataagccactgtgaaggccttaatgaaygacgtttaaaaaaatcataattagcgtatcaaatctatggggttttttgtttgtttgcttgtttttgtttttttgagacagaactctccctctgacgcccaggctggagtgtagtggagcagtctcggctcactgcaacctccacctctcgggttcaagcgattctcctgtctcagccttccaagtagctgggattacaggcacccaccaagatgcccatctaatttttgtatttttagtagagatggggtctcaccatgttggccaggatggtctcaaactcctgacatcaagtgatcggcccaccttggsctctcaaaatgatgagattacgggcctgagccactgcacccaggctcaaatctgtgtttttatggattttgttgctcaggatgatagtgatctaaagtttcttctttaaatatgtttatttaaataaattaaaagtttaagaaacgtttaaaaaatgttaagtaggtagtagtacacttgcctatatttccttctaaaatataatatatcagtgaattaccttccagaaggtatagaccattctagacagcaagaagaaggcagatacataacagcatggatggatctcacaaatataaagttgaacaaaagctgggcgtggtggctcacgcctgtaattccagcactttgggaggccaaggcaggcggatcacctgaggtcaggagtttgagaccagcctggccaacatggcgaaacctgtctccactaaaaatacaaacattagccgggtgtggtggcgcgtgcctatagtcccagctacacggaaggctgaggcaggagaatcgcttgaaccccggaggcggaggttgcagtgagccgagatcatgccactgcactccagcctgggcaacagagcaagactccgtctcaaaaaataaaaaataaataaaaaaaaaagttgaacaaaagaagccaacccccagagtactgtgtggttcatttacataaacttcaaacacaggcaaatgaatcccctaaattttaagaggaacatagtgaatgggaggggacaaagggaggcttcgtgggggaactggtaatgtttcgtttcttgatttgggtgctggttaccttgggtattcagtttgtgaaaattcataaaaatttatatgattgtgtatttttctgtatgttataccttaattaaaaagtttattattattattattattatcattttttatagagataggtttcactatgttggccaggctggcctcgaactcctgtgttcaagcaatcctcctgccttggcctcccaaaacaagcttgtgccactacacctggcgtaaaaaaaggtttttgttttgttttgttttgtttttgggacggagtttcactcttgttgcccaggctggagtgcagtggcttagtctcggctcactgcaacctccgcctcccaggtttaggcggttgtcctgcctcagcctcccgagtagctgggatcacaagcaggcaccaccataactggctcattttggatttttttttttttttttttttttttttgagacggagtctcgctctgtcgcccaggctggagtgcagtggcacgatctcggctcactgcaacttccgcctcccgggttcacgccattcttctgcctcaggctctgagtagctgggactacggcgcccgccgccacgcccggctattgtatttttagtagagacggggtttcactgtgttagccaggatggtctcgatctcctgacctcgtgatccgcccgcctcggcctcccaaattgctgaccttgtgatccgcccgcctcggcctcccaaagtgctgggattacaggcgtgagccacggcgcctggcctcattttgtatttttagtagagacggagggatttctccatgttggtcaagctggtctcgaactcccgacctcaggtcacccgcctcagcctcccaaagtgctggaatcacaggcgttaaccaccgcacccgacctacaaaaaagtttttaaaaagataaacaatacaggaaaaaatgtgcaaaggatatgaataggtaattcacagagaagtaattcaaatggccaataaatctatgaaaatcttactaggaatccagaaaatgtaaattcaaaaataagagcattttgtattctttggattggcaaaaattgagttttattttcttggttgtctaaaaaaaatgttggttagacttgatttgtttgatttaggatgcaaacagggtccttgcattgcatgggttattatggctcttaagtctttaaaaccaattatcctcctcttcgctcaccttttataccaattatttattgaacaaactgggtcgtttgtttggtagaatgccccacatgctggagttggttggttgcttctgctgcttctaagttttccttatctgccatatttcctgtaaactgtaggtttgatctagaggccccatcaggttcatgctcaacttgtcttggcaagaatccatcgcaggtggcgctggtacttcctggcactaagatcgattggcgggaccgggacttcgcggcttagcccctccatnnnnnnnnnnnnnnnnnnnnnnnnnnnnnnnnnnnnnnnnnnnnnnnnnnnnnnnnnnnnnnnnnnnnnnnnnnnnnnnnnnnnnnnnnnnnnnnnnnnnnnnnnnnnnnnnnnnnnnnnnnnnnnnnnnnnnnnnnnnnnnnnnnnnnnnnnnnnnnnnnnnnnnnnnnnnnnnnnnnnnnnnnnnnnnnnnnnnnnnnnnnnnnnnnnnnnnnnnnnnnnnnnnnnnnnnnnnnnnnnnnnnnnnnnnnnnnnnnnnnnnnnnnnnnnnnnnnnnnnnnnnnnnnnnnnnnnnnnnnnnnnnnnnnnnnnnnnnnnnnnnnnnnnnnnnnnnnnnnnnnnnnnnnnnnnnnnnnnnnnnnnnnnnnnnnnnnnnnnnnnnnnnnnnnnnnnnnnnnnnnnnnnnnnnnnnnnnnnnnnnnnnnnnnnnnnnnnnnnnnnnnnnnnnnnnnnnnnnnnnnnnnnnnnnnnnnnnnnnnnnnnnnnnnnnnnnnnnnnnnnnnnnnnnnnnnnnnnnnnnnnnnnnnnnnnnnnnnnnnnnnnnnnnnnnnnnnnnnnnnnnnnnnnnnnnnnnnnnnnnnnnnnnnnnnnnnnnnnnnnnnnnnnnnnnnnnnnnnnnnnnnnnnnnnnnnnnnnnnnnnnnnnnnnnnnnnnnnnnnnnnnnnnnnnnnnnnnnnnnnnnnnnnnnnnnnnnnnnnnnnnnnnnnnnnnnnnnnnnnnnnnnnnnnnnnnnnnnnnnnnnnnnnnnnnnnnnnnnnnnnnnnnnnnnnnnnnnnnnnnnnnnnnnnnnnnnnnnnnnnnnnnnnnnnnnnnnnnnnnnnnnnnnnnnnnnnnnnnnnnnnnnnnnnnnnnnnnnnnnnnnnnnnnnnnnnnnnnnnnnnnnnnnnnnnnnnnnnnnnnnnnnnnnnnnnnnnnnnnnnnnnnnnnnnnnnnnnnnnnnnnnnnnnnnnnnnnnnnnnnnnnnnnnnnnnnnnnnnnnnnnnnnnnnagagatcgagcgactgcagtagttctcaccgagctcaacagcctgttcggcgaggacaacattcccaccgctcggaaggtgggcgccgggcccgcgcccgcggtcaccttgccccggtcgccacgcacctggctaccggggccgacctgggaggagcgcggcctccggggctgcccgcccggcaagcgcgcgggaagagggggtccggcctgcgcctcggggcctgccgcctgcggcccccgccgggcctgaccagtgcgggtctgggcggccgggcctcggggcgccctctcctctgcgccgcgcttctccttggaccttgcctccgcggtcggcgcagccagagtctctcccggctgcgctgacgcctgccgcgcgtctcattcattcattcaccgcgtttgaatggctcctactgtgagccaggcagcacactggcgctctcggtccccacgcggctgcgccctccccagctaccccgggtttgtcctagcctcgcatcccgacccacttcccctgggaccttctgccccactcctcctcctgctttgaagatacttggagttgtttttactttacaggaaaagaagggagcaatgcgatttgctcggtggctttggraaaccgagcacctactgtgtgcggggcctttcgcgtggagccttttgtttagtttggggaggtcccggatcctgcagcctcctgggaagggtgttgagtcccaggaggatcgcagggggttttccccaattcctgctctctggagctaggtgcgataggggtgccattccgggccgaagtccgccgactagctcttgagaaggaggaagttactggggacagttgtgtgtggtattgcggttcctttgctgttccctggggaggagggggctcttgcttgctgccagccttcctggggttttggagtcagagaagtttgggttcaagttggagctctaccagttggatgactttggggaagtgacttcacttctttgagcttgtttctttatttgttaaatggggatagtaatcattccccttcattgcgaggttgtaattatgactagttggtaccttcctggcccagaatcatggctaaaaagttaaagttttctgctcattgagagggagtggggaatagaagggaatatgaaggccgaaatcagattgactgcatgttcttactggataacatgaaaggttaatttgttaggaaaacagtaagttttgacctccctctcctgtgggcaggggcacctcttgcacaggtgggtctgtgtcttcatacatgtaggggagagaacgctttgtaggtggccaaagaggggcaaggaagcagggctgaacgcctgaatgtgaaaaggttgccctggagtctggcgcgggaaaggatcaggggtgtgagtgcagggagtctcacttacttcctcttgatgccgtttcggagctatttgaaggcagaaatcatttgttttagagcaaaaataagcctgtctttttcacscagggtgaccacaggatccccatgtctcaactgacggtggttccatgtgacaatctaaggccaacaaacatgaaatacgagtggttatttaagacttttacttaaataagacaatctgtattctggcagagcatctccgaatctgggggtcagagctcttcctgggctaaaccggggtttgtgcctttaatagagatactaatgattactaagtgcttttgtagatagaataatcttatgtaatccttagaatgaccctgtgcagtaggtactgttactgttcccatttgacagatgaggaaactgagacacagagcagtgaagtggctggtttcaggtcagatgagtggcagagccaggatgtgaacctaggcagagtggacatggagcccacattagtatctctcgcctgttttcctgcttcatgaccccttccctgttccccgagtcagtacagcatccagaggctgacctgacttctttcctttttgtttttttgagacggaggtctggctctgttgctcaggctggagtgcagtggagtgatctcgtctcactacaacctccacctcccaggttcaagcgatcttccccactcaccctcccaagtagttgggattacaggtgtccaccagcatgcctggctaagttttgtatttttagtagaaaagaggtttcaccatgttgaccagtctggtctcaaactcctgacctcaagtgatcctcccgcctcggccttccaaagtgctgggattacaggtgtgagccattgcacctggcctgacttattttatttcctgctgagtgtagcccacactggccaggcttggggatattgttttgttaattttatggggttttttttaaatttaattaattaatttattttttgagacagactcttactctgtcacccaggctggagtgcgttggcacgatcttggctcacggcaacgtctgcctcctgggcaagcaattctcctgcctcagcctcctgagtagccgggattacaagtgagtagccgggattacaagtgagcaccaccacatccggctaattttttatgtttttggtagagatgaggtttcatcatgttggccaggctggtctcaaactcctgacctcaagtgatctgccgacctcagccttccaaaagtgctgggattacaggcgtaagccaccgtgcccagcctgttttgtgaattttaaataaaggaaaactgggtctgccagcaactgtagttttcagcatgcctgggtttacgaattagagccaaacctgctttgtgaagtttaatggtatttaaaaaaacaccccatagtcttttttttttttttttttccgagatggagtattgctttgtcgcccaggctggaatgcagtggttcagtcttggctcatggcaacctctgccgcccaggttcaaacaattctcctgcctcagccccctgagtagctgggattacaggcgtgtgtgccaccatgcctggctaatttttgtatttttagtagagatggggtttcaccatgttggccaggctggtttcgaactcctgacctcgtaatccgccctcctcagcctcccaaagtgctatgattagaggcttgagccaccgtgcccggcctcccatattctaatctaggacttgtctgaaatacacctatgaccatcctgtttggagcatgggaacagacatgagtttgaatcctagctgtttctcactcgctctgtgaccctgagccagttgctttacttctcttttttttttgctttacttctctttttttttttttttttttgagatgcagtctcgcttcttctcccaggctggagtgcaatggcgagctctcggcttactgcaacctccgcctcccggattcacgaaattctcctgcttcagcctccctagtagctggggttacaggcagatgccaccacgaccagctaatttttgtatttttagtagagacagggtttcactgtgttggccaggctggtctcgatctcatgacttcaggtgatctgcctgcctcggcctcccaaagtgccggatttacagacgtgaaccaccgtgcaccacccagttgctttacttatctgtgtcccatttgttcagaggagataaattggggaattaaaggagattggttgggctgcacaatgccagggactgaataagcatttagtaaatggtagaatatttctatatgaagggaatttgtctggtaggaggtaatagacttgttaattcctttaaaaattattaagtgatgccctggcatggtggctcacacctgtaatcccagcacttagggaggccaaggtgggcagctcatctgaagtcaggagctcgagaccagcctggtcaacatggcgaaaccctgtctctactaaaaatacaaaaattaggccaggtgtggtggctcacgcctgtaatcctagcactttgggaggccaaggtggatggatcacctgaggtcaggagttcaagaccagcctgaccaacatggtgaaacccygtctctaccaaatacaaaaaattagccaggcgtggtgatgcatgcctgtaatcccagctacttgggagcctgaggcaggagaatcgcttgaacccgggaggcggccgttgcagtgagccaagattgcaccgttgcgcgcgccagcctgggcaacgagtgaaactccgtctcaaaaaaaaaaaaaaaaattagctgggcgtggtggtgcacgactgtaatcccagctacttgggaggctgaggcaggagaatagattgagcccgggaggctgacgttgcggtgaggttgagtcgccccactgcactcaagccggggggacagagactccgtctcaaaaaaaattattaagcaacttatacacatgtgttcatagcaacactttttacaatagctaaaaagtggaaatatcccaaatgtcttatcagctgatgaagggataaaatgtgatgtgtctgtataatgaaatatgattcagccataaaaaggaatgaagtattgctatatgctacaacttggacgaaccttgaataaatgagagaagccagtcacgaaagggcacacattatatgattccatttacagcatatgaaatatctggaataggaagatccgtagagacagaaagcagatgggtggttgccaggggctgggggagggagcaatgggcgaattactgcttaattgatctagggtttccttttggggtgatgacagattgtggaactagataataatggttgcatgatattgtgaacgtactcatgccactgaattgtacacttyaaaatggttaaaatggccaactttatgtgtatatgactacagttttttaaaaaaattggcctggtgcagtggctcacatctgtaatcccaccactttgggaggcctaggtgggaggattgcttgagcccaggagtttgagaccagcctgggcaacatagtgagaccccatctctacgaaaaaccaaaacctttggctaggcatggtggcrcacacctgtggtccyagctacttgggaggttgcatagggaggatcgcttgatcctgggaggttgagactacagtgagctgtgatcacaccactgtactccagcctcagggacagcacaaaactctttgtctccaaaaaaaacaaacaaatgaaaaatttcaagcacctactgtatgtggagaaaatgattcctctcaggcagaatatagctggactgatgtggtggaaacatcctgaatgccaggtcgagaaactagtacttttttcccttgctccttggtcgtagttgcatggaatacaatttcatgtagttctgaaggttaagaaactaactccacttcccactaccgacccgtctaccacccccttccccgaagcagccagatattctgaacatgtataaatatatggatctatagatctgctccctrttgttggtttttgtttattttgcactatgcgcactgttttgtatttttattttatttttccctgaaacagagtctccctctgtcgcccaggctggagtgcagtagctcaatcttggctcactgcagtctctacctcccgggctcaaatgatcctcctgcatcagcctctcaagtagctgggattacaggtctgcaccgccatgccctgctaagttttttattttttatttttatttatttatttatttatttttcttgagacggagtctccctctgtcgcccaggctggagtgcagtggcgcaatttcggctcactgcaagctccacctcctgggttcatgccattcttctgcttcagcctcccaagtagctgggactacaggcgcctgccaccacgcccggctaatttttttttgtatttttagtagagacggggtttcactgtgttcgccaggatggtttcgatttcctgacctcgtgatccgcccgcctcggcctcccaaagtgctgggattacaggtgtgagccaccgcgcccggccttaagttttttattttttgtagaggtgcggtttcactctattgcccaggctggtctctaactcctggcctccagtgatctacctgcctcagcctcccaaagtgctggcattacgggcgtgagccactgcgccggcccctgtttttaaaaatgaataaattttgggctgggtgcggtgcctcatgcctgtaatcccagcactttgggagnnnnnnnnnnnnnnnnnnnnnnnnnnnnnnnnnnnnnnnnnnnnnnnnnnnnnnnnnnnnnnnnnnnnnnnnnnnnnnnnnnnnnnnnnnnnnnnnnnnnnnnnnnnnnnnnnnnnnnnntggcattccagcctgggcaacagagcaagactctgtctcaaaaaaaaagaataaattttggagggctgggtatagtggctcacgcctataatcccagcactttgggaggctgaggcaggtagatcacctgaggtcaagagttcgagaccagcctggccaacrtggtgaaaccctgtctctactaaaaatacaaaaattagccaggcctggtggcmtgtgcctgtagtcccacctactcggaaggctgacacaggagaatcgcttgaaccccggaggtggaggttatagtgagtagagatcacgccactgcactccagcctgggcaacagagtgagactgtctcaaaaaaaggaagatcagaacttatcagtacataaactttgcttcctccttgtgaagggctgcaaagagctcattgctgtaaggatgtgccagcgttaaacctgcccctggtagctaacatttgatcctgtctcgggccactctaaacatggctgcagtgtaggtctttctgtatgtattgttttgtgtgcacctagacaagttcatctgtaaattgttagaaatggaattgctgagtcaaagggtctgtgcatttaaaaagaagtttttttttttttgagatggartctcgctgtgtcaccaaggctggagtgcagtggcgcgatctyggctcactgcaagctctgcctcccgggttcacgccattctcctgcctcagcctcccaagtagctgggactacaggcacccgccaccacgccctgctaattttttgtatttttagtagagacggggtttcaccgygttagccaggatggtctcgatctcctgatcgcgtgatccgcccgccttggcctcccaaagtgctgggattacagacgtgagccaccgcgcccggccttttttttttttttttttttaagagataggttcgtgctctgtcacccaggctgaaatgcagtggtgaaatcatagctcactgaagccttggactcctcgcttcaagtagtcctaacctcagcctcccaaagtgctgggattacaggggtgagccagcactccctgctcttttacttttttttttttttttttttttgggagacggagtttcattcttcttgcccaggctggagtgcaatggcatgatcttggctcactgcaacctctgactcctgggttcaagtgattctccttcctcagcctcctgagtagctgggattacaggcgcatgcctccacacccagctacttttgtatttttagtagagacagggtttctccatgttggtcaggctggtctcaaactcccggcctcaggtgatccacctgccttggcctcccaaagtgccgggattacaggcgtgagacactgcgcttggcctcttttacatttttcatcgaaatgtcattggtatacgttttttgcttacatcaatctatagcatcatgaattgtcacacacagaacacactccttgaccagcagatctaaaaatggattgttccagcctccagaagtccctttctgctcccacatggttactaaccccctaaggtcgctactgtgtgtgctacccatgtgaattaactctgtttgcttgagcccttgcatagtaagggctctayatgcattgttcatattgcaaagatactactaaatggtccttcaaagggtgatagcagtttctactctcaccagacacgtgtgaaggctagttcccaagccctttccaacgaagtggctcsttaattttttttttttttttttttttgagaccgagtcttgctctgtcgcccaggctggagtgcagtggcgcgatctcggctcactgcaacctccgcctcccgtgttgaagtgattctcctgcctcatcctcccaagtagctgggattacagacatgtgccaccacgcccggctaatttttgtatttttaggagagtttttcaccatgttggccaggctggtctggaacttgcgacytcgtgattckcccaactcagcctcccaaagtgctgggattacaggtgtgagacacccgacccggcctcattaaactttttggctttattatgtatgagacagatggtcttttcatttattcagaatccatcgatatgttctgggaactgccttttggtttttctttttttttttttttttgccgttctattgagctgttgggttcttttgtttttgctttttttttttttttgtaaagaggtttgcattttttgctgtttgcaagaaagtattttgagcaaaataactttgacactttccagtcctttttcccctaccaacattttaacagcttttttgaggtgtaattgcactacacctcaatagactgtgcgtatttaaagtgtacaggttgacaccttttgacatacacacttgtgaaaaattaccacagttaagataaagtttcatrtgattttttttttttttttttttttgagagggagtctcgctctgccacccaggctggagtgcagtggcgcaatctcggctcactgcaagctctgcctcccgggttcacacctttcccctgcctcagcctcccgagtagctgggactacagacgcccaccaccacgcccggctaattttttgtatttttagtagagacggggtttcaccatgttagccaggatggtctcgatctcctgacctcatgatygcctgcctcggcctcccaaagtgctgggattacaggcgtgagccamyacgcccagcctgtttcctataattttttatgttgataatttttcaaagtactaaaatgctgaaagaacagaacaaggaatagctgcaaacatctcccctaaagtcaccagttcttacatttcccctcaaacttttttctctgcaaacacatccgatagacacatacacacatgcacacacatttatttttattttttggcaggatcatttgaaagttagttgcagacgtcttaatactttttcctacagaaccacaataccattgtctcagccaagaaacttaaatatagtacagtattttgtaacagatagtccatattcaaattgtctttatagctcataaaaaatccaacacccagtcaaggactgctcatgcatttrgtgttcatgtctctagtctgtcagagtttcctcacttttggtggaggaagggacttaattatgaatttwtttttatttttatttttttttgagayggagtcttgctctgtcacccaggctggagtgcagtggcgcgatctcggcccactgcaagctccacctcctgtgttcacgccattctcctgcctcagcctcccaaatagctgggaccaagggtgcccgccatcacgcccggctaattttttttgtatttttagtagagatggggtttcaccgtgttagccaggatrgtctggatctcctgacctcgtgatcygcccggctcggcctcccaaagtgctgggattacaggcatgagccaccgcacccrgccccaattatgcatttttttcttttagacaagctctcactctgtagcccagaatggagtgcagtggcgcagtctcggctcrgtgcaacctctgcctcctgggttcaagcgatcctcccaccttaacctcctgagtagctgggmttacaagcatgtgccaccatgcctatttatttatttattgtatttttcgtagagacaggatttctcctcgaaatccctgtgttgcccaggctggtctcttgactcctgggctcatgcgatcctcccgccttggcctcccaaagtgctgggattataggcgtgagccactkcgcctggcccagtaagggacttttacagcattgacatttctgaagakyacagactaaatgtcttttttttttttgagctataattcatataccatacagtttattcattgaaagctcagcggtttgtagtatattcacagtgctgtacagctgtcactacagtcagttttagaacatttgcattaccccaaaaagaaactctgtacccattagcagtcactacttttttcctttgccccaactcccagccttaagcaactgccaatctgctttctgtctctatttctgagcctactgtgggcttttcataggagtggagtcctgtacagtctggccttttgtgtctggcttctttcacttagcctcatgttttcaaggttcatccatactgcaggatcaatactttattcctctttatggctttttatttacctgatcatcaactgatgcacatttcggtttatgtcactttttgtctattgtgaatggatgctgctgtgaatatccatgtgcaaatatttgtgtgggcattgtttccagtattttgcggtgcatacctaggagtccagttgctgggtcatacaggaactttttgtttaacactttggggaaccgtcacccttttccaaggcagatgtaccgttttacctgcctaccagcatgtggggcctggtttccccacatccttgtcagcacttgctatggtctacctttttaattctagccatcttggcagacgtgaagtagtattgctgtggttttgacagtccagaactggtttttttttttgttttgttttttttttttttgagacagagtctcgctctgttgccaggctggagtgcagtggcacaatctctgctcactgcaacctccgcctccggggttcacgccattctcctgcctcagcctcccgagtagctgggactacaggcacccgccaccacgcccagctaattttttgtatttttagtacagacagagtttcactgtgttagccaggatggtctcgatctcctgacctcgtgatccgctcaccttggcctcccaaagtgctgggattacaggcgtgagccaccacacctggcccagaactgtcttttgaaatgtcccacagtgtgtattgtattattctgattatctcctccgggttaggctcagacttagctttcatggcaagaattctgcagaaggcatcatgtgtccttgctgaggcagtaccatatcggggctcgtggtgtctgtttgtgccatcgcattctcgttggttgacgctgaatttgatctctgggttgaggctgggcaggcccactgcgctgggggtgccctttcccctctgtggttcatacgtggtctgtatgttatgttccagcattttccgttcatctggcttttgcatttctgtgtgttcttcagatgcttgggaaacctctgaatggcagaatctcccgtcccctctccctggcttgcttatcaagatgcctttgccctcatggcctgattttccataggacccgtttgcatgtgcctgagggtgatggaggtaaagcgagattaggatgcaggaaggccattgtcacccaacccsggtgttggatgtccccrggtgttggatgtcccccgcctgactgctgcaagaagagcgctgatgaaatcccaggcttgaagcaatcttgttccctcccayggaggcgatggctgggccttgtttgtctgagtcctcaggcatccacagtttgctcacctggtccccttatttcaactttccattctgaaaattgtccaacataaccaaaggtagggagagtagagtgaacccttgttcacccaggtcttcccatgtagcaactttctgccattctggttacttctttccttcctaaatttttttgagggtgcctggaataatattttaaagctaatccaatacattagttcacctttgcatatttcagttagcatctttaacaataaaaattttgtgaaaatcaaaaccacaataccggccgggcatggtggctcatgcctgtaatcccagcactttgggaggccgaggcgggtgggtcactagaggtcaggagtttgagactagcctggccaacatagtgaaaccccatctctactaaaaatataaaaattagctgggcatggtggcgctcacctataatcccagctactcaggaggctgaggcaggagaattgcttgagcccaggaggcggaggttgcagtgaaccaagattgcaccactgcactccagcttgggcgacagagcgagactccatctcaaacacacacacaacacacacacacacacacacacacacacacaaaacacacaataccatcattacagcttataacaattccttaacatctaatgcaggtccattttctgatttccctggcccaaaatgtctttacaaaactttttgtttgaatttgtatctaaacaaagtctacacatgaagtgtcttttaagtctcttttttaaatttttaaatttttttaaaatttttttgagacaaggtcttgctttgtcacccagactggagtgcagtggcacgaacacagctcacttgcagcctcaacctcccaggttcgatgatcccccagccttctccygagtagctggaaccacaggtacatgccaccatgcccagctaattttttaattttttgtagagacagtgtctsgccatgttgcccaggctagtctctaactcccagactcaaacgatcctctggccttggcctcccaaagtgttgggattacaggcrttagccaccatgcctggccctaagccttttttaaaaaaaaattaactttattctttttataagtagagtttaaaaaatagtcttttcttttagagttatagaaaaattgtgaagataatacagggagtcgccatatacccctcaccctgtttcccccattattaacgttgtatattcatgttctattaatgaaccaatattggtacatcaattattcgctgaagtctgtactttattcagacttctgtagtttttcctgccacccttttctgtcccaggatcccawctgggatcccacccgatatttggtcctcaggtctcccgaggtcctctcggctgggagtttctcaggctctacttgtttttgatgaccttgacagttttcaggagcattgatcaggcctttttcttttcttttcaaatctccctgtgtcacscaggctggagtgaagtggtgtgatctctgctcactgcaacctctgcctcccagattcaagcaattctcctgcctcagcctcctgagtaactgggaccacagttgcatgccatcacacccggctaagttttgtgtttttagtagagtcaagaggtttcaccatgttggccaggctggtcttgaactcctgaactcaagtgatctgcctgccatggcctcccaaaatgctgggattacaggtgtgagccacagcgcccagccggtcagggattttgtaggatgctcccaattggaatttgtctgatgtttttctcataatgagactgggtgatgggttttggggaggaagacacagagttaaggaccattttcatcccatcacatccagggtacagcaaatcatcatgatttaagtcacttttaattttaatgcccccacctcatgctttttcttggatgccatcttattctgtggagaaactgggtctcaccccatagcatctccaccatctgcatctggctgggtgcatcctcatggtggtgtttccctgtgtcccatttcccagatccccaagaaccagtggttagatctagaggcctggccagggatggtggctcatgcctgtaatcccagcactttgggaggccgaggckggcagatcacttgaggtcaggaattcaagaccagtttggccaacatggttgaaaccccatctctactaaaaatacaaaaaattagccagacatggtgccttacgcctgtaatcccagctactcgggaggctgaggcatgagaattgcttgaacccgtggggtggggagcggaggttgcagtgagccgagatcgcgccactgcacttcagcctgggtgacagagcaagactgtttaaaaaaaaaaaaaagatctagaggcccgataagattcaggcttgcattttcaccggatttctgctggaactgcctccaggctttgggcttcgctgtaagctcctgtgtttgtgtgcactgcagcccagtcgcctaaacagcagacatacattttctcccattctggaggctggaaatctgagctcgaggtgccagggttgctttctcctgaggcccctcgtcttggcttgcagatggccgccctctccctgtgtcttcgagtggtctttcctctgtttatctgggtcctgctctcctacttgcataaggacaccagtcgcatcggattagggcccaccgtaaatatctcatttcagcttaatcacctctgtaaagaccctgtctccaaatacagtcccattctgaggtcctagggtttagggcttccacataagccttttgggggacagagttcagcccatattattccccttagggctcctgtgtctccatccacacaaagtgggtcagggtgtcacacaccagagcaggcaggcccagccccacagggaacagcaaattctccagccaaatggttcaacggcaagagatgggatcctccccgaattcaccctctcctgcccggggccagttttcaggaggggacaggtgccgttctttccaccgtgagaaagaacctctgacctacacctttcttagcactgctaggagctcctcaggcacgccagcttctcaggcatggcagttttcagagcacctgcctgtcagcttgtgttacatgggaggtgactgctcagcttgcagggagttccaggttgccaccctgcaacccatgaatctgacaagaaccacctcagctgctcygacacgctgggcacctgccgtgtgctgggcgccacgccgaggtctttacaggttctgctcttgaatcctctcttagtcccatttctcccacagcagagaaaactgaggcacagagaggttcaacagtgtgagcaggaaagtctcttcctcccagaataattgcttccacgcaccctttcctgggcacttggtggcattttaaaggcctgctactcttttctcacaaaaacctttctttttccctccatttgaacaaattatagaaattgctatatattatctgggcgcggtgggtcacgcctgtaatcccagcactttgggaggtcaaggtgggtggatcatctgaggtcaggagtttgagatcagcttggccaacatgacaaaaccctgtctctactaaaaatataaaaattagccaggtatggtggcacatgcctgtaatcccagctacttaggaggctgaggcaggagaattgcttgaatccacaaggcagaggttgcagtgagccgaggtcgcaccactgtactctagcctgggtgacagagtgagactctgtctccgccccccccaaataaattgccatgtattgacaaacatgtacaagtcacacatactttaaataattgtaggttgagcrcggtggatcacacctgtaatcccagtgctttgggaggctgaggcaggcagatcacctgaggttagaagttcgaaaccagcctggccaacataggaaaaccctgtctctactattttacaaaaactagccaggcttggtggcatgtgtctgtaattccagttactcaggaggctaaggcaagagaattgcttggacctgggatggggaggttgcagtgagctgagatggcgctaatgcactgtagcccaggtgacaaagcaagactctgtctcaggaaaaaaaaatgtaacaggaagagctgggcatgtagcagctgcctgtggtcccagctacgtgggaggctgaggtgggaggattgcttgaacccaggagtttgagactgcagtgagccgtaattacccccactgtactccaggctgggcaacagagcaagaccctgtctccaaaaaaaaaaaaagagcgtacattctgtaatctatttatttactcattattattattttctgctatttctcgatgttgctggatatgtccatcgttgtttttgttgctgtggaattggactccattctgtgagcagatcatgtcttactacgcgtctcttccattgtgcacgtatgtctggcctgcctgcagctttttagtgcagtggcgctctgaaggcacatgtgcaactgcctctctcagtcaaggtcctcaacctggagtgtgcctcagcatcaccaggagggctgtggaaacagattgctgggctccatccctggagagtctgaggcagtggatctggatggggccctgagagtctgcatttctggcaagctcctgggtgabgctgctgctgctagtccgggcaccaccacactctgagaaccactgagctgggatgtgtaccgtgacatggaatctctggaagacctcttcatgggtgtggttctgattcatgctggtcttctgcaggccctcctcccagatcccgccgcctacccccacccaagggaggggcagtcaccctcctcttctttcttttttttttttttttttttgatttttttgagacagagtctcgctctgtcgcccaggctggagtgcagtggcgcgatctcggctcactgcaagctccgcctcccgggttcacaccattctccttcttcagcctcctgtgtagctgggactacaggcgcccaccaccacgcatggctaattttttgtatttttagtagagacggggtttcaccgtgttagccaggatggtctagatctcctgaccttgtgatccgcccgcctcggcctcccaagtgctgggattacaggcatgagccaccacgcctggccaccctcctcttctttctaatgcagcggtcctcaacctttttggcagcgggaccagttttgtggaagacagtttttccatggactgggtcgggggatggtttcgggatgattcaggcgcattacgtttattgtgtactttatttctattatcattacattgtaatatagaatgaaataattatacaactcaccataatgtagaatcagtgggagcactgagcttgttttcctgcaactagacagttgcatctgttccttctgggggtgacgcggacagtggcagatcatcaggcattaggrtctcacaaggaacatgtaacctagatccctcgcatgcagttcacaatagggttcacactcctatgaaaawtttttttttttttgagacagagtctcgctctgttgcccaggttggagtgcaatggcgtgatcttgactcagtgtaacctccacctcccaggttcaagcgattctcctgcctcagtctctcccaagtagctggaattacaggcgcacaacactacactcagctaattttttttgtatttttagtagagatggggtttcagcatgttagtcaggctggtctcaaactcctgacctcaggtgatccacctgccttggcctcccaaagtgctgggattacaggtgtgggccaccgcacccagccatcttttttttttttttttttttttttgagatgctgtctccctctatcacccaggctggagtgcagtggcatgatctcggctcattgcaacctctgcctcccaggttcaagcaattctcctgcctcagcctcccaagtagctgggattacaggcgtgcaccaccacgcccagctaatttttgtgttttcagtagagacaaggtttcgccatgttggccaggctggtcttgaactcctggcctcaggtgatctactcgcctcggcttcccaaagtgctgagattacaggcgtgagccaccaggcacagcctataatgttttcttaaggtaaattagagatgggggggggtctcattttgttgcccaggctggtctcgaactcctgggctaaagcagtcctcccacctcagcctcccaaagtgctgggattataggtgtgagccaccgtgcccagcctctatactgttttttagggctaaaatgttggtgtcctcacaggacatcgtggagtcaatacttctgttagaatattggacatcggccgggcatggtggctcatgcttatagtcccagcactttgggacgcctaggcaggcgggtcacttgaggtcagcagttcgagaccagcctggccagcatggtgaaaccccatctctactaaaaatacaaaaattagctgggtatgatggcaggcgcctggaattccagctactcaggaggctgaagcaggagaatctcttgaacccaggaggcgaaggttgccttgagtcgagattgcaccagtgcactccagcctgggtgacagagtgagaccctgtctcaaaaaaaaaaaagaagaagaatattggatgtggatgtcaacaggagtcttgaacacttaccatgtgctcaaagcatttcacgtgaatatcccatgtaaagctcgcaataaccagatgaagtaggtactgttatctccattgttagtggaaaccctgcagccccagagagcttatgaatatatataatatgctcatggacacccagctagtaagaggcagagctgggatttgaacccakgcagtcgacagcctggcttgtgctttctcagccacagtgccacctctgaggttaytggcattttctactctcctggtccctgwttcagccctgctcttatctcctctgtcctgtaggaaccatccagtcaggatatccagtttaaaatgctgtagcyggccaggcatggtggctcatgcstgtaatcccagcactttgggaagctgagatgggtggatcacaaggtgaagagatcgagaccatcctggccaacatggagaaaccccatctctactgaaaatacaaaattagctgggcatggtggcgcatgcctgtagtcgcagctactcgagaggctgaggcaggagaatcacttgaacctgggaggaggaggttgcagtgagccgagatcgtgccacttgcactccagcctggcgacaaagcgagactccaaataaaataaaattaaattaaaacataaaatactgtagctgcccgggtgtggtggctcacgcctrtaatcccagcactttgggaggccggggtgggcagatcacctgaggtcaggagttcaagaccagcctggccaacatggtgaaaccccgtctctactaaaaatatgaaaattacctgagtgtgatggtgcgtgcctgtagtaccagctactcgggaggctgaggtgggaggattgcttgaacttgggaggtggaggctgcagtgagccgagatcataccactgcactccagccggagtgacagagcgagaccctgtcttaaaaaaaaaaaaaaaaaaaaaaagctgtagccaattcacggaggcatttacccttcacacgtgagccgagtggcccatgtaggtgggttctattatggcagcactctgcgtgatgcagccctgcagagtcccagcccccatagataccttggtcagcccttacaagggaaggggcgtgttttactcagttttgctcagttgttgggctgtcatcaattagtatcaagttcaagttaatcccctgggccagtagaccacttggtggcattcatcatgggctcgctgttttttcccctgtaatagccaaggctggaaaccatgtaggtatccatgagtatgggcctggctccaggtgtaccatgtttaaaaaggatgaggcagctctgtgtggtctgagtgtgagtatctccaagacagagtgttgcatgagcaaagcagctcagctgtacacctgtgctgccattgcagaaagaatatgtctgtgccattattcacctggcacgtctaaggaagggttcctccggagggggattccagttgccaggaaatgagagggaaggcttagtctccactgaatacctgttggtaggcttgagttttatgctacatgtatacaatatcactaattttttaaaaaaaaaagttaaaatgaggctgtaccttgtattcatgtttctttagccctgtgtcacctggagggcaaataaagacctcagaggctcagggtccttagagttggatagagcatggggctgtatcattaccagcttccttggagcagaaacttccactctttaaaaatgagaaacccgcagggtgcggtgcagtgtttcacgcctataatcccaggactttgggagggccaggcaggaggactgcttgaggcttagagtttgagaccagcctggacaacatagcaagagyccatctctacaaaataataataaagcctggtgtggtggctgcacctgtagccctagctacttgggaagctaaggcaggattgcttgagcccgggagtttgagggtgcagtgagctatcattgcaccactgcactccagcctggtcaacagtgagaccctgtctctttagagaaatcaggcagaggaaggcagagaycctgacccaagaggaagcatgaaagacagcaggagcaatggcaagcggcgtaacgcggccctgcagagagtcccagcctccataggtgccttgttcagcccttgcaaggaaggggtcgttttcaccagtttttctcagttaggctgtgatcagtacccagttcaagtcaatcccctgggccagtagtcyacatgtgtrgtattcatcatgggctcactatttttcccttcccaggtataaactcccaagctccccagttcactgcttgactgatggaggaaaacagtgattgggtratgaccrttttcttgtttctgcagttcttggccaggctgactgagagatttgtgctgggagtggatatgttcgtggagacactgtggaaagtctggaccgagctcttggatgttcttggacttgacggtaggtgtaggggtggcattcacgtaaggtgtcattctattttggtggttctcatagtgtggaactggtactcacagtgagtaatacatgagaaggttgcggagggctggtcagtgaggatatgagtgaacattttttattttaatagtctcatatataggccaggcatggtggctcatgcctgtaatcccagcactttgggagaccaaggtgggagggttgcttgaacccaagaattcaagaccagcctgggcaacatggtgagatcccatctctataaaaaaaaagtacaaaaaaattgctgggtgcagtgatgtgcacctgtagtccccatccacttgggaggctgaggcaggaggattgcctgagatgaggaattcgaggctgcagtgagctatgatcatgccactgtactccagactggacgacagagcaagactcctctcaaataatcataaaaataaaaaacaaatggcccatcaaagctgagatttcccagatgccacttaggataaggtgcgactgggtagtgggagtgccaatttgtgtgcaaaacacatggaccagaggtatagtgctctggcttactggcatccgtgcaagaaatgactagttatttaggcagaaggggatttcatgagacagagacactcacagaaccatcagaaaggctgaggaagagatgcatggcctcagacactgccgaacwggctgtccagggttgcagctgttgaaaccgttgagttcgaagtcacacaactgtagtataatttgaggaccaggaggccactgctgccgccacaacaactagactttgcatgtgggtgcagggacccttgccatttctggaaccatgcatatcagctgcaacacttcacttaatttccaaagtcgtgtgtgtatgggggaactgccaggtggaacttactttctgtccagtccctagctgcgagggaggcaggctaatgcggttcttagctctccagcttctgccatccaggaaggcagcctgggagcaggtgtcacctgatgctgcaccagcccatccaccatacccaccgcacagggcaagaattgccaggggagctggcccctggttttgtgggctaggggaggagggtagtccagtttgatagtgcagtgctagtcacacgtttataatcaggaagagaacattggtgaggcayggcccctccctttctacatgtgggagggggcactgatactggtcttggcggatggcaaggcagcaacggtcatggtaactgagctgggcactcctagtccagtcctgcagcctgtgctacccccagccttacactccccttcccaggtggctctgccccacctccacctgcattccatcggtgggtgacaggagctaacccgggcagagtgcccagggtgtacagcttttatacccagaggagaccttgtcccttaccgccttaagagcttcagaggcatcccatgctctcaggatgaagtaaccttcccgttttctctaccgtgccccatggtgtgccaggtaaacagggatctcctagctgcccccgctccactgctctccttctgtccacaaggtggaggccgctcttcccctgggcctttccagaggaaattccccagctgggctctttccagccccaccgccctggtccctggtcccagctgccacctgtctcacgggaaggtctgcagttgctgcatgtggcagggttcctaagaccatctacaggctcrccggttccctaggagcactggcaggactcagcatatagttgtcctcacagccgtgatttattgtgacggaaggaygcaaacaycatcagcaaagggaaaaggtgcgcgaattcccgggcaggccaggcycaagcttcagagtyctctccctgtggagtcatacgggacacacttaattcccccagcagagggtgcccaccaaggactccctgcccaggctttttactgggggctggtcatgtagtcaccctctgcttgacacgtgtcaaaattctagactcccagagggaacgcaggtgttgtcataaaccacatcatttgtgtcaacagcctaggcctggcrtctccaggctgcactctggccccagctctgcacctggcacaaagagrccctttttgtttrtttttgtttaggatctcactctgttgcccaggctggagtgcagtggctcaatcacagctcactacagcctcaacttcctgggctcgtgatcctcccacctcagcctcccgagtagctgggaccacaggcccatgcyaccacacctggctaatttttgaattttctgtagagacagggtcttaccatgttgcccaggctggtctcaaactcttgggctcaaaccattctactgtttcagcctcccaaagtgctgagattrtaggcgtgagccaccacacccagcccacccttggttaataagagcaggagggctgtgggtcccactgcttagccagtcatgtgggctgaaatgtgctcytcaagaatatgtgttccagtcctaatcctggacctgtgagtgagcccttgtttgggagtggggtctgcagatgtgataaagttaaatgagatcgtcttggattagggtggaccctcagtgtaatgattgctgtccttataagaagtggggaatttggacacagaaacaccaagaaacatagggagaagacggccatgcgaaatgagaaacagggactggagggacggagccacaagccaaggaacactgggaccaccagaagctggaagaggcgaggaaggatcctcccttgaactttcagagggagtgtggccccaccaagaccttgatttcagacttccagcctccagaaccgcaagtggatgaatttctgttgtaaaccacccagttkgtagtggtttgttgcggcagtcacgggaaaccattataccatagccctgttacatgcggaatctctcagcascgcccatyggtgcttgacacccagagatgggggagtggggtccactggccatgatgggcacactggttcatacctgttgacaccccaggccattcagaaaygtctccagccttaattcattgagttcaacctttaagaggccttaggccaactcagtcacctcactgctcagacaaagaatcagaggcgtcagcatagccagaggacactgtgcacctggcagccccctggggccactcatggcccctccagggacttggcagagttaacgcaccctcccccagatgcagccaccgcgtgcaatcctcttagcttccgtatccaccacctgcccggattgtcaaactctgtgttttcgtcgccacccattgaaccctggagaaacaaacctgattgcagaaaatcgcacgcagcttggaatgaaaaactacagagtaggaacagcctcctaatcatatggaagaagcccagaatagaggcatcggcagcggatccacgagccctgaatgcctgcattcatcaggggagcagctggcgcgttctggaggcgaaacgagcttgcttccgtgtcraagcttttctagttctgtttgatgcgtaagcttcaaggcatccgaaggcctttggaattcgtgtcttatgcgtagaagtttgagtgcaaaatgctttacaggaagccatacaccaacgttggatattctggtaaaaaaggtttctgtgagcacaattctataatttctttcttcagtgtttttttttttttttgagtctggttaaaatgggaactctgtagccccgaatggtctaatagcaaaaaaatgtgagccccctaggtgatgtgaagttttctagtaaccatgtcaaaagagtaaaaagaaatggtgaaattagtttttcttccttttttgggggggagggggtggggagtggggggtaggagggacgaagtctcactctattgcccaagctgaagtgcaatggcgctatctcggctcactgcaacctctgcctcctgggttcaagtgattctcctgccccagcctgccaagtagctgggattacaggcatgcaccaccacacccggctaatttttctgtatttttagtagagacagggtttcactatgttggccaggctggtcttgagctcctgacctcgtgatccgcccgcctcagcctcccaaagtgctgggattacgggcatgagccactgcgcccagccttttttttttttttttttttttttgagacagagtcttgctctgttgcccaggctggagtgcagtggtgcaatcccagctcactgcaacctccaccaacccaggctcaggtgatcctcccacctcagcttcccaactagctgggaccacaagtgtgcaccaccacatctggctaaygtttgtattattattattttttttttttttctgagaccgagtattgctctgtcgcccaggctagaatgcagtggccgatctcatctcaccactgcaacctccacctcccgggttcaagcaattctcgtgcctcagtctcccgagtagctgggattacaggcacctgccaccatgcctggctaatttttgtatttttttttagtagagatggggtttcaccatcttggccagggtattctcgaactcctgacctcatgatccacctgcctcggcctcccaaagtgctaggattacaggcgtgagccaccgtgcccccctaatgtttktwttttttatagagatggggttttgccatgttgcccagggtggtctcgaactcctgagctccagtgatctgcctgccttggcctcccagagtgctgggattacaggcatgtgccaccatgcccaggtgaaattaattttaataagatattttagttaacccaatatattaaaaacaacttataattaatagaaaattatcaggtgtctcacagttttttgggtaactaaggcctttgagacagtctctatttgacacttagagcgcacatcagttctgacttgtcacatttcaagggctcagcacacgatagatggcacagcctttgtccccattctagatctgctggcacagagcacatgtccaggagttggaaggatggcttagaaggatggatttaaggctcatgtcttcatcgtgttgcttacccctctgaagctgctgaggccacttccaacaaagtttccagtaaactggggaaaataggaatcgtgcttcagtgatgcgtcggcacagggcaggggttgtgtggctccggaaactggatcccctggttccaaatcccagctctgccctgtcctagctgtgggaccctgggcaaggagtccttgtgtggaaaatgctgtttaccctatcagcgagtcatgaggactggatgactgtgtgtgtagggtggtgggatggcgcccagcccatggtcggtattcagtaaacactcgggggcttacaaaggggccctccttcaaaatgtacatcactgtgcagttctgggacctgccaatctcacttctccacactgaggggcggctggccagctgcacccagagccagcttcccctgctgcagccatcaggacttgacaagtgtgcaggtgtaaacccgacccacgctgaggaacaagttggccaccaaaacattcactttgcttgaacagtgcctgttaggagttgaattgtgtgtccccgtattcatctgttttatctgttgaagtcctaacccccagagcctcagaatgggatgctatttggagatggggtcattgtgggtgtcatttgttaagatgaggtcatactggagtagggtgagtcccaaatccaatgtgaccggtgtccttatacgaaggggaaatttagacacagacacacgtagggagaaggccacgtgaaggcagagtaagagagaggagtgtgtctggcagtcacggagcgccaaggatcaccagcaatccgcagacactaggagaggcccgggcagattcaccctcgagcctctggagccagccctgctgacacgctgttcacagacttccagcctccaaacaaactgagagaataaacttctgttcttttttttttttttttttcttttcttgagatggagtcttgccctgttgcccaggctgaagtgcagtggcgctatctcggctcactgcagcctccgcctcctgagttcaagcgattctagtacctcagcctcccgagtggctgagattacaggcacatgccaccaaatctggctaattctgtttttgtttttgtttttgtttttttgagacagaatgttgctctgttgcccaggttggagagcaatgccacaatcttggctcactgcaacctccgcctcccgggttcaagcgattctcctgcctcagcctcctgagtagctggaattacaggcacccaccaccacgcctggctaatttttatatttcagtagagacggtatttcaccatgttggccaggctggtctcgaactcctgatctcaggtgatccacctgcgttggcctcccaaagtgttgggattacagacatgagccactgcgcccggccttctactcctttttagctacttggccatggcagcgctagggaagtcagacggtgcccctttgctgtcagaacgtgcagggccactcgtgttttctttaggattttcagggcctcggagtgacgttgctttggaccacccttccttggtttaaaggacagctttcactgaagtcaccgagaggggaaagcaggggtggcattctcgtctctgggcgatatttccgtgagaatactgcatgaactgatcnnnnnnnnnnnnnnnnnnnnnnnnnnnnnnnnnnnnnnnnnnnnnnnnnnnnnnnnnnnnnnnnnnnnnnnnnnnnnnnnnnnnnnnnnnnnnnnnnnnnnnnnnnnnnnnnnnnnnnnnnnnnnnnnnnnnnnnnnnnnnnnnnnnnnnnnnnnnnnnnnnnnnnnnnnnnnnnnnnnnnnnnnnnnnnnnnnnnnnnnnnnnnnnnnnnnnnnnnnnnnnnnnnnnnnnnnnnnnnnnnnnnnnnnnnnnnnnnnnnnnnnnnnnnnnnnnnnnnnnnnnnnnnnnnnnnnnnnnnnnnnnnnntttgtgttaacctattgtcttggtcagttcaggctgctataacaaaattccatagactgtgtggcttatcaacaacagacttttttttttttttttttttttttgagatggagtctctctctgttgcccaggctggagtgcagtggcgcaacctcagcctcccgggttccagtgattctcctgcctcagcctcctgagtagctgggattacaggcatgcaccactatgcccggctaattttgtattttttttaatagagacaaggtttcgccatattggtcaggctggtctcgaactcctgacttcagatgatctgcccaccttggcctcccaaagagctgggattacaggcatgagccaccgtgcccggcctaacagacattttcatttcttacagtttggaggcaggaagtccaaaatgaaggcactggcagatgcaggctgtggggagagccctttcttgtagacgatgcctcactgtgtctcacatgaaggaacaaggcggttctctgggacctctttataagggcactaaacccattcatgggggctccacccctacgacctgatcacctccccaggaccccacctcctaagaccatcacttttggggttaggatttcaacataggaattttgtgggggacacaaatactcaaagcctagcatctgtaatgggttgttatttgaaaatgagttaatgatagcaatgtttttaaattattaacaatggctggacacagtggctcatctggtaatcccagcactttgggaggttgaggcagatggattgcttaagcccaggagtttgagaccatccttggcaacacagtgagaccctgtatctacaaaaaatcaaaacattagcttggtggtgcatgcttgtagtctcagctacttgggaggctgaggtgagaggatcgcttgagcccaggaggtagaggttgcaatgagctaagatcatgctactgaagtctagcctgggctacagagcaagactctgtctcaaawaaataaataaataaataataaaatttaaaagataattaacaactaattaaaaactacctaattttctgctatggaaaatatatcagttaggtagaacccacataaacgaaagctctggggacgcttcaataatactgaagagtgcaaacggtcttgagactgagaggtctgggaaacactggtttagcctccagtctgcaggggacaggtgtgaaagtcagctcccaagtcaaccacatttagtcaaaatgctcacgatgcctcaggaaggcacagtgtagcaaacacactctggcttctggggagtcctggtgaccccaagcctttagtcccagagatggctgctgtttacagtgttggactctagacactggccagctgtgcggagtctgatcattttggggaactatgagatgttcacgccgtaggtgtcgttrttgaccggaggagctccagggttgaggcttcccatctcaggcctgctctggatttgcgcttgcccactccagatcgttgtgtcacactttggtcctctttggctgggcgtggtgcctcacacctataatcccagcacttagggaagccaaggcaggcaggttgcttgagctcaggagttcgagaccagcctgggcaacatagcgagatcctatctgtatttgctggtttccacactgctataaggaactacctgaggctgtgtaatttataaataaaagagatttaattgactcacagttccacatggctggggaggcctcaggaaacttgtaatcatggcggaaggcaaaggggaagcaaggcacgtcttacgtggtggcaggagagaggaagcaagagcgaggggtaaactgccaaacacttttaaaccatcagatctcgtgagactcactcactttcatgagaatagcatggaggaaaccacctccacgatccaatcacctcctaccaggtccctccctggacacgtggggattacaatttgaaattagatttgggtgagaacacagaaccaaaccacttcactgtctctacaaaaaaatacaaaaattagccagctgtggtggtgcatgcctatagtcctagctactcgggagtctgaggtgggaggatcgcttgagcccaaaaggtcaaggctgcagtgagccgagatcacaccatcacactccagcctgggtgacagaaaaagaccctgtcttaaaaaaaaaaaaaaaaaaaaaagaccacagattcttgggcccacccaggacctactgaatcagatgtcctgggggtggggcccagcaacctgttttcctaagccctccaggggattcctggaggaatcacacaagtttgagaactgcttgtgtgagaaggcttaggatataactctccttgaactcattaaacaacactgtcaggaaacaaacaattgcagcatgtgggacctcctgcaagaaaaccatcctggaaaaattagacttcagaatttcagtgtttctaaaatgtcatgggtctcttctcaattaatggagactaaagtgatggcaaatgctgaacgtgaactgtcgctgggtcctggtgagggttgggaggaaacagctattcctggataactgagaaattcaagtgatgttatatggaattgttaatttattatttatttatttatttatttattttttgagacagagcctcactgtgtctcaggttggagtgcagtggcgccattggctcactgcaacctctgcctccctgggttcaagcgattctcgtgcctcagcctcccaggtagcttggattacaggtgtgcgccaccacgcccagctaatttttatatttttagtagagatggggtttcaccatgttggccaggctggtctcaaactcctgatctcaggtgatccaccyaccttggcctcccaaatgctggcatgagccaccgtgcccagcctggaattgttaatattcttagaatgatgatagtatcatggttttgaggtgaatgatgtctttattcttagatgtatgatgaagtatgatgtgtacatctttcaaatgggttaatctaaaaagtatgtaaatagagaatgcaacattcagaatttttaataattgttcagtctagttggtttcaaaaggaatattctactgttcttttaacttttttgtttgaatttcttcaagtcaggcacacagaagatgctactcttacatttcactgcattcttgagatggaacttcgtgtgtgggtaccagttaggatcaggtttggctgaaacagaaatccaacataacattggcttaaccaagatggacacctatttccctcttatatgaaagttctcagggaggtggtgaggcgggtttgatggctctgatgcatgtggtgctctggaccaaagcaccttccattttattgttcctccatgagtgccttccaaaatggctgctccagttccagccattgtatccatgttccagcaggcagaagaggtaaaggacacattcctgctacttttagggaacacatggccaaagcttagttatgtagctgcaagagaggctaggaaatgctttaatcctaggtagttgtgtgcccagcctgaaggtgggcatttgttactatggaaattgaaggacaatttgcaggctatgccccacttccagaggtgttttagtaaaaggtgaaagttgtcttttgagacaaagtcttactctgtcacacaggctggagtrcagtggcacattatggctcactgcagcctctacctcccagcctcaagtgatcctcccacctcagcctcctgagtagctgggactacaggtgtgtgctaccacacctgtctaatttttttaaaatttgtgttctctagagattgggtctgtattagtctattttcacactgctatcaaaacatacccgaggccaggcgcagtggctcacacttgtaatcccagcactttgggaggctgaggaggtggatcacttgaggacactagttcaagaccagcctggccaacatggtgaaacctcatctctactaaaaatacaaaaatcagctgggtgtggtggcatgtgcctataatcccagctacttgggagactgaggcaggagaattgcttgaacctgggatgcagaggttgcaacgagccaagattgtgccactgcactccaacctcaaaaacacaaacaaaaaaaccaaaaaacctgagactaggtaatgcataaataaaagaggtttaattgactcacagttctgcgtggctcaggaaacttataatcatggcagaaggcaaaggagaagcaagcaccttcttcacaaggcagcaggagagaaagagagagcaaagggggcagctgccaaacacttaaaccatcagatctcatgaaacccccccccctccactgtcacaagaacagcatggggaaaccacccccatgatccaatcaccccccacgaggttccttcctccacacgtgaggattataattcaagatgagatttgtgtgggagcacagagccagtccatatcagggtctcactatgttgcccaggctaaaggtgaaagatgtatatgatttgaagagaaaccagtatatggagaggtttttaaaactcaacatggcaggtcgtcttaaagggcttccctggctgggcatggtggctcatgcctgtaatcccagcactttgggaggccgaggcaggtggatcacctgaggtcaggagttcgagaccagcctgattaacatggagaaaccccgtctctactaaagatacaaaattagccgggtgtggtggcgcatgcctgtaatcccagctaccccggaggctgagacaggagaattgcttgaacccaggaggcggaggttgtggtgagccgagatcacaccattgcactccagcctgggcaacagagcaagactccatctcaaaaaaaagaggcttccctgtgtgtcctcatggagcaaagtgtgactattcacagaggaacttccttgagttcctttggttgttgcaaaggccttttaagccccacaggccagctcaactatccaattctagcttgttaagaaacccctggcccctgygtaacgagccctgttcctcttttctgtcccgcagtctccaacctgtcccagtatttcagcccagcctcggtgtccagcagcccggcccgcgcgctcctgctggtcggcgtcgtcctcctggcctactggttcttgtccctgaccctgggcttcactttcagcgtcctgcacgtggtgttcggccgcttcttctggatcgtgcgggtcgtcctgttttccatgtcctgcgtgtacatcctgcacaagtacgagggcgagccggagaacgcggtgctgccgctgtgcttcgtggtggccgtctacttcatgaccgggcccatgggcttctactggcgaagcagtcccagcggccccagcaaccccagcaaccccagcgtggaggagaagctggagcacctggagaagcaggtcagactgctcaacatccgtctcaaccgggtgctcgagagcctggaccgctccaaggacaagtgaaggtcagccggccgggcgggtccacagttaccagcacgctgtctcagaaaacgaaaacggaggaaaaaaaccccaaaccccaaacaatcttaataaacacgactgagcaagaaagtggcgctgtgtarggctatttcyacccacccggcagctcttaggacacattcccagaagagcggaaagatcattgacgtggaactacacacgaagtgtaattagtgggggaaaaaatattttttaaacaaaggatataaccatatttagttgtacagtaagagaaatttatctgtgcatagagcataaagttaattttttcaagcatttaaatacatcttttgtaaggttttttaataaaggcagattgagtcaagtttattaaaactttacatggaggggaagaatatgctaatttgacatttgagaaaagtttaaatgcgagcgtttgttttcacagcttagggattggtgggtgaggtctgtgtgcgttattttcatgttcccaaactgtgagctttatttcatgttatttttggtggatgttgacttagttcatgaatgttgtcacttctaaatgtggacagttgggctgcaggatgcaactcaacctcttttggatcctagagacccctgccaagcccccatcagtcctatttttaaatgaagacatcgccatttctagaagacctgagattttcttccctctgtgcttcgatgtattttaacctcaacattttgaaacggaaaatgcaaggaggggccaagaaatgtcctggggatttgatgccaggaagtacctggtaaggattggagattgctccagaatctactgcatgtcccaatttgcagtttgctcactagggctatatacaaaagctatacccttgagggtttttttttttttcttttgatttcctcaggaccttagagggaaaacaaacagtagcagctaatattctcaagtatattgctgcttagaaagatcctcaggaacaattagcagcaataagcaagcctttgaaaagatctgaattctttttcctgaaatatttacgatacacaggtgctttttatctgaaatctgttgtgtcctccttttaggcagtctctgtgggcagagagtgggacttgcgaggtggacagctgtggggatcctgggcaagggagtttcagaaggtgtggctcaggggctggtagaaacccccttttgttaggacttgttttttaaaaaagaaagccctaggccaggcgcagtggctgatgcctgtaatcccagcgctttgggaggccgaggagtatggatcacctgaggtcaggagttcaagaccagcctggccaacatggtgaaacccccgtctctactaaaaatacaaaaattagtcaggcatggtggtgggtgcctgtagtccagctactcaggaggctgaggcaggagaattgcttgaacctgggaggtggaggttgcggtgagccgagatcacgccactgcactccagcctaggcaacagagcaagacttcatcttaaaaaaaaaaaaaaaagcccagcattttgcagctttgaagctgctggggatcacgactgtctctgtggcccttacctggccacagatgtaccctggcaacccgctcacagtgccctgcgtgcaggtttatagataacccctgccagacctgctacaaccaagaccttatggtccaggtctcagtttggagaagatttagctgtctaccacttcttgtgtagtgttcctgtgaagttttatttttggttgcaagtatctggaaaacagatgcagatgtttttgtggatgttgttgagacttttgagacttctgtttctaaggtacacatgatgggacccaaactctcctggagagttccattcacttcctgaaacgtgcacctgtttcaggtgcatgtttattcagtgtgcatggatatttaagatttgctggagcaggctgggcagggtggctcacccctataatcccaacactttgggaggccaaggcaggtggatcacctgaggtcaggagtttgagaccagcccggccaacagagtgaaaccccgtctctactaaaaatacaaaaattagccaggcatggtggtgggtgcctgtaatcccagctactcaggaggctgagnnnnnnnnnnnnnnnnnnnngaataaataggcgcgcccctccctcgcccaatataataaccatattcggagcacgcggcacaaataaacaaaagcttcatttcgcagacaatgtcttcctgtggtcgtagcgcggtatgcaaagggaggggaggtaatacccgtgctacaaggggcgtttttcacacattatgcgcgaaggagttccatgcgatcccgtaagtcgatccgggacaatgttcatttaataaacacttacaggtcaaggtgcctataaatctaaaattgttgatctctggcgtgcgaccttatcccatcagatcatgaccgggtggatatccagagatcctcattcgggtgtgcgaaattaatgaagcgtgatcgactttttcttcaactgtatatctgcatcctcccgcatcttgtgacaaatgtaaggccaccgagccattatttgagccgcactcgaaagtaagcatttgcctcacagtcgtctctatataccccgaatcaacactgcacataggcccccctcccccctccgacttacacaaaccaaaaaagggactggcaccgcttacacttgtagaaggaaaaaaacagccagtcaggcctggagtgcagtggcaccatctcggctcactgcaagctccgcctcctgggttcacgccattctcctacctcagcctcccaagtagccgggactacaggcgcccaccatcatgcccggctaattttttatatttttagtagagacggggtttcaccgtgttagccaggatggtctcgatctcctgacctcgtgatccgcccgcctcggcctcccaaagtgctgggattacaggcgtgagccaccgcgctgggcctagatcaaatctttatccatgcacattggaacacaggattactgggttgaaatcattctagttttgtcatttagatacttgtagatgaatctattttagcacaaggtataaataactcgggaggtcatctctatcttctttccttttgtgcatttggctataccacgtttaggtactaaaacagctttgcttatgttggccaggggaaaacatggcattctgtgcgcaaagctaatgatcgccagccctgccttggcccctcccttgtttatggtcattgtaagatgcccgcatgttaaggcttaagctgtcactgggctgggtgtaatacccgcttcattcctcctcccaccctcttacccgaaacatgaagggcactgtgctctattgagatctcgataagatcatcattttaacttgtattcaactgagggaggtaacatgatatctgggtgctggtggattgagacctcaagcatcaattcaaaattgctgtcgaaaatatgcactattttttttttccactctggctaagtgtaggctctgaagccagttttatagcttgatacattctggtgaaagatgtcttcatttttaatgaaagaacctacagttagtaggtgtcacctcagggtagaaattctgatagaaattctgattatttgaaactctgatagaaatcctagatgctagatttgaagaaaacctgggttttattgcatagatttcaccttttctggggcacatcttaccccaaaataattggggatttttttgttccttctccattccatggaaccttgtagggtgttgggattgggcctcccctcgccacccgccacatgtctttgtttttttctctcttttgtatgtggaaaaatgtatttttgtaccatatctcatacctggagagaaaccttttttctatcttcagggctgtagaatatattagcgtaacacttcactgaatgtgacgtaaaagcattctgatgaaaactggttctgttataattaagactcagtgtttaaaatatcttaatcagtgttaatttcccagtgtttcagtatcacagtaaatacttgttttactgagaacagaaaataatccagaaaaggaaaaggaccagccctctctagattgctggaattgtatggatgtgttggggttggtttagtgatctcttccttgacaccctagcaaagatgcttttgtggagtgcaaacctttcataaatatactttccaggctgggtgcagtggctcaagcttgtaatcccagcactttgggaggccaaggcgggtggatcacttgcggtcgggagttcgagaccagcctgrccaacatagtgaaatcccgtctctaccaaaaaatacaaaaaaaaaaaaaaaaaaaaaatagccaggtgtggtggtgggttcctgtagtcccagctactcaggaggctgaggtgggagaattgtatgaacctgggaggcagaggttgcagtgaactgagatcacaccactgtactccagttgaggcgacagagtgagacccagtctcaaaaaaaaaaaaatgatgaactactgtccatcgatagcgcgnnnnnnnnnnnnnnnnnnnnacacactttcaataccagtcggcattacccgccctttggtttcttttgctttggatttcagcccccatatcatttctggtaacagagcacagcaatagaatttctgggaagcagaccttgtgaatcgtgcctgtgtcttaattcacaaagggtaagtgaatgccgttgaaaggtgtttcatacacttaccccagaaatgagagcctgtctcatgcaggagtcgggaggcagcgatgtcagggaactgggactatgtctttatgactgtgatggtggtaaccaagtggggtggtcccctctggggagctgagtaagaacgcaaaggtttgggtcagtgattaggaagactataatatgactttgtgcatgcccgggagggctgccttgtagagaggatgtgagcagcttagtcgctcatctggccctgtgattcaggcttatggagcgttaagaataacagctgtcaaatggcctagacatggttaatgcaatttgttgctagtggaaatcctgaattgcttcctttctgtgatcactgctacttcttaagatgcttttgatgaatgtcatctgccttacaagttgacacctgataacttctccctgatgggtttccgaactggctgacttaaccaaaaagccagctcttgccatctatcttgcattaaaaggaattcctgaggctcctaaggggtcagctgccccactcctgacttttttatttttaatggtctataccttctgcaacatttttgtttatggccatttgaatagttggactttgactcctcacttgtgaataataggaatatattttgcagaatctaacataatacccttaaaattcatactggacaaccatcagtrtgatgtatagtatctggtgtaaacaaattttattcagcatattaaattattctgtgttttgcttttccttgatatgtaggaggtgcaccagtaccagtttttctcttgtggtggcttaaaacgctgattgccatttgcattgtctactgaaaagctgtggcagcgagtggtattattgaccatgtgttctcatgtctttttgcagatttaaaggttttattgtagtgtccatttaatatctgcatgtgtgtttaatctctgaataccatgtaattaaactgattaacttgtgatggtgatggtgattagcacacactaaaaacccaatgaagcaattgtctccctcttcttaactggaaatcacacttgtgaggtatggtatccattatcaacagtggattcatgattgacttcatattttgtgtatctggttataaattttgtatagcatttaatttggcacttaatataaatccatttgatttgaatagtgtgtgtgtgtacatggtgtgtgtgtgtgtgcactttagtttcgtgagccttgggaaactgattctacaaatatcttatatagagataaatgtatcaggcatttttttgcaaagcgatatatacattcctcttatttattaaatcactggctttggtgttatgtagagatatttgtagatctcagaacagaattaaaatattgtgaaaattacagcttaataaatgtttattgtaattttgttgtatggacttttaaaatatatctcatcacttctaaccaaacatttgtggagtttccccagttttgatgtgtaaccaggattctatggttctattcctcgatctgagaagagtcataaaaccttgaatttatgtattcagttggaggtaaggttgcaagataaaatacaggatgcccagttaaatttgaatttcagataaacaaccagtagtgttttagtatagtgtagaagtgttggttgcttatctgaaattcaaatgtaagcaagtttcctgtatttttagttgccaaatctgacagtcctagcacagtgatgcgtgcctctccaccccaccccgcatacccatgctgctttctcaggtcctaacaatccttttctttctattttttttttttttttttttttttttttgagatggactctcacccaggctggagtgcagtggcgagatctcagctcactgctgcctccatctcctgggctcaagcgagcatgtccggccaatttttgtatttttagtagagatggggtttcaccatgttggccaggctggtctccaactcctgacctcagtgatccgcccgtttcggcctcccaaagtgctgggataacaggcgtgagccatcatgcccagccttaaaaatcctattcttagtaaacatttaggagcaaatgtaacaggagtataatttaccttgaccaagtataattactcttaacccaagagtactgctcctgctttttacgcaaagacaatctcacataggtcgataaggggacaatttgaggctagttattgtgaagttatctgggggcagcctgggtggcctgtcactgggaaagcaggcaggtgagcgggggcggtgaggcactggaggacgtgcagtaggtagtaatgacagtaacagcgtggggtgagaaggaaaccagaatgaggaggggcagctcatttgaataaagtcaatacctgctattaaaataatcattttggccgggtgaggtggctcatgcctgtaatcccagcactttgggaggccgaggcgggcggatcacgaggtcaagagatctagaccatcctggctaacatggtgaaaccccgtctctactaagaatgcaattagccgggcgtggtggcaagtgcttgtagtctcagctactcgggaggctaaggcaggagaattgcttgaacccaggaggtggaagttgcagtgagctgaaatcgcgccactgcactccagcctgggcgacagagtgaaactccgtctgaaaaacaaacaaaaaaaattactattttgtggccgggtgcagtggctcacgcctgtcatcccagcactgggaggccaaggcaggtgaatcgctcgagtccaggagttcaagaccagcctgggcaacatagtgagaacttgcctctacgaaaagtaaataaattagttgggtgcagtggcgcctgcctgtgcctgcagtcccagctactcgggaggctgacgtgggaggatcgcttgagcccaggtggttgaggctgcagtgagccatgattgcaccactgcattccagcctggggaacagagtgagatcctatctcaaaatataatcattttgtaagaatgcattgaaagcaacattcgaattaaacaccataggccgaggaggaggagggagtgggttatcggatggggattaagaggaatgtcaagtacaagaggaatgagacttcacaggagaagtcaccgagggcagtgttcctcggacctagagggtgccgggaaccctgccccagcctgaccagctacagcctcaccatctcccactgccccttctgcccgctgccaatcccgctgcagccccagagcagctggcggcattgctaccagcccctttgcacctatgaaggaaaaatagaatctcgggatctcaaactcattatgccaagggcaaagttaagcttgggaactgagccacaaaacaaacaaacaaaaaaaacaaacacaaacttccttcctttgcttcccaaacagatagctgcctactttatcttgtgtaaaatgtagatttgggctgggtgtagtgtctcaagcctgtaatctcagcactttgggaggctgaggcagaaggatcacttgagctcaggaagcagaggttgcagtgggccgagatggcgcccctgcactccaacctgggcgacggagtgagactctgtctcagaaaaatagataaaaatgaatacataaatatacataaaatgtagattcatgagtgctcgtcaaagccgagtgagactcagccctgcctcactgcctaccattccccacatttttcttccatccttcccctcctgcttgcgcattcccctttaaatatttaagtcctcagaacccattttggaaacagcacaggccacagatcctactgtgacttatgtttcttttccttgggcccggcgtcaaccttgacaaaataagccactaatccattgagacctgccccagtcactttttggtttacactcctatttctaaccaaggccccctgtactgttttgtttttctggtttttttttgtttttttttttgaaacagagtctcattctgtcacccaggctagtgtgcagtggtgagatctcgcctcactgcaacctccatctccacggttcaagcaatcctcccacctcagcctccctagtagttgagattacaggcgcacaccaccacacccagctaatttttgtattttttagtagagatggggtttcacaatgttggccaggctggtcttgaacccctgacctcaaatgatctgcctgcctcggcctcccaaagtgttgggattacaggcgtgagccaccacccaggctgtttttgttttgttttggtttgaggcggagtttcactcttgttgcccaggctggagtgcaatggcacaatctcagctcaccgcaacctccgcttcctgggttcaagcaattctaccgcctcagcctcccaagtagctgggatttcaggcatgtgccaccacacccagctaattttgtatttttagtagagacggggtttctccatgttggtcaggctgttctcgaactaccgacctcaggtgatctgcccgcctcggcctcccaaagtgttgggattacagacgtgagccactgcacccagcccctttttttaaaaaaagaaaaacaaaaacagctttatcaatgtaaaattgacatacaataagctgcacatgtttgaatgtaacttggataacgtttcatatatgcgtacaccatggacatcaaacttgccacaatcaaaatagcaaacatgtccatcacctcagggccctttggggtccctctcactgctctccatccccaggcaacctttgagctgctctctgtcactagacattagtttgtattttttttttttgggctggggatggagtctcactctgtcgcccaggctggagtgcagtggcgcaatcttggctcagtgcaacctctgcctcccagtttcaagcaattctcctgcctcagcctcccaagtagctgggactacaggcgcctgccaccacgcccagctaatttttgtatttttagtagagacggggtttcaccatattggccagactagtctcgaactcctgaccttgtattctgcccaccttggcctcccaaagtgttgggattacaggcgtgaaccaccgcgccyggccctagtttgcattttctagcattttatgtaaatgggatgaaacagcatgtgtctccccatgcccaccccccagcttctttcacttaatataattattttgaaatccatcccagttgttgcccttatcaatagttcactctttttcattgctgcgtagtattccatwgtatggatgtaccacaatttgcttatccattcacytgttgatggactttttggttgtttcctatttggggctattacamataaagygactatgaacacttatgtataggactttgtatgaacatacttttcacttctcccaggtaaatacttaggaccagaatggctggattatattgagggtataggtttaactttttaagacattgttttccaaagtggttgtagcattttacattcctacccactgtatgtgagaattccagttcctccatagcctcaccgacagttggtatgatcagctgttttcacccaaaacattcacttactaataggtattgtcttttttttttttttttgaggcaggatcttgctttcttgcccaggctggagtgcagtggtgcaatcacagctcactttagccttgacctcccaggctcaggcagttctcatgcttcagtatcccacctaagtgggactacaggtgtgtgctatcacaccaggctaatgcttttttttttgtagagatggggtctcactatgttgcctaggctggtcttcaactcctggactcaagtgatcctcccattttggcctcccagggattacaggtgtgagccgccatgcctggcctctttttttcttttttactttttttccatttttcattttgggattacagatgtgagccagtatgcccggcctgtcaggtgtggtcttaactgaagctagccatctttcattaaacaaggaaatgcttatttctgacaagtgtaaacagaatttcaataaacagcttgtggaaattttatgaattacatacattagccaacacttgatcttcacagtagcaaaatatccactgaaaaatgataacatgcatatatccaaagcacctgttctgaagccccaaagaaaagcaaaccaagtcaatagtccatggtcaaatctttgatgatgattaacaaaaaattaacaaaatgagtaatctatagttttttttgttttgtttttgttttttgttttttttgagatggagttttgctcgtcaccaaggctggagtgcaatggcgcgatctctgctcactgcaacctccgcctcccaggttcaagcgattctcctgcctcagcctcccgagtagctgggattacaggcacgtgccaccatgcccagctatttttttttttttttagacrgagtcttgctctttcacccagggtagagtgcaatggcactatctcggctcactgcaacctccgcctcctgggttcaagcgattctcctgcctcagcctcctgggtagctgggattacagacacacaccactacacctggctaatttttgtatttttagtagagacgggggtttcaccatgttggtcagactggtctcaaactcctgaccttctgatcccccgccttggcctcccaaaatgctgggattacaggcatgagccaccgcacccggcctaattttttttattttatttatttattattattattattttttagtagagacagggtttcactatgttggccaggtgatctatattttttatttagtaactgctcatcattgattatattggtggcttcaatgtagataatgctaggtttagctccaaatatgatctaaatatatcttaaccattgctaaccatgaaacaacagctagcacaatgttaacacgggcactattgggagatttagtactcaacatcatgcaagtcccttgtagaataatgaagttttgtgagctggtcacggtgctacagaatgaatgtgtgcagcccctcaaaatgtatatgttaaatccctaattcccaatgtgatggtatttggagacatggtctttgggaggtgattagtctagatgagatcctgaaggtggacccccataatgggactagtggccttataagaagaggaaaagaccagatacccctcgactccaccatgtgaagacacaacaagaaggtggctgttttttaaccagggagaaggctatcaccaaatactgagtatgctagtaccttgctcttgaacttcccagcctccagaactgtgtgaaataaatatttagtctatactattrtattacagcatcctgaccttactaagacagatggttgtcttcatatgraaaattaaaatgacaaaaggctttgttttgtttttggagacaaagttttgctgttattgcccaggctggagtgcaatggcacaatctttgctcactgcaacccctgcctcctgggttcaaatgattctccggcctcagcctcctgagtagctgggattacaggcacgtgccacacgtctagctaattgttggtatttagtagagacagggtttcaccatgttggttgggctggtcttgaactcctgacctcaggtgatccacctgccttggcctcccacagtgctgggattacaggcgtgagccgccacrccctgccaaaaaggctttatttgatctagtccctaaatcacccccagatagcagattggcaacctgtggacacactaatttaggcatagctatagtagatgaaatattcccttagtgcctggaggaagtcccatctgtcaggaaattatctaattagtggaaagaaactggtgcgtgtggccaggcacggtggctcacgcctgtaatcccggcactttgggaggccaaggcgggcagatcacgaggccaggagtttgagaccagcctggccaatatggtgaaaccccgtctctactaaaaatacaaaaaaattagctgggtgtgttactgtgcgcctgtaatcccaactacttgggaggctgaggcagaagaatcgcttgaacccaggaggcagagattgcagtgagctgagatcaagccactgcactccagcctgggcaacagagcaagactctgtctcaaaaaaaaaaaaaaagaaaagaaaagaaaaagaaactggtgcatgtatacacgtgtgttgagcatgcatttatgtgagaaagtgtaagtacacgtgtgtatgtgcatttggaatttctaaaagtgctggtttctaggcttctaatcagaagtgtggcatcaattctccctgatcttaagcagtagaagttcacaattctagccaggcacggtggctcatgcatgtaatcccagcactttgggaggccaaggtgagtggatcacttgagctcaggagttcaagaccagtctgggcaacataccaaaaatacaaaaaattagccaggcatggtggtgtgcgtctgtgttcctagctccttgggaggctgaggtgggaggatcacttgtgccttgggggcagagtttgcagtgagccaaggttgtgcccctgtgctccagccatctcaaaaaaaaaaaaaaaagttcaccgttctgttccatcaaaaaacaagggaaggggatgtgggatgccttttcttggttatcttcaaatggcagtaattctaagctcagaataaagcatccgatgtttgacactatattaaacctattctaaaagaaatgagttctcaaacttaaaactaagatgcttgtggctttcaaagtacttaattttgaattaaaaataaaatctgccgggcgtggtggctcatgcctgtaatcccagcactttgggaggccaaggcaggtggatcacctgaggtcaggagttcaagaccagcttgagcaacatggagaaaccccgtctctactaaaaatacaaaattatccaggcgtggtggtgcgtgcctgtaattccagctactcaggaagctgaggcaggagaattgtttgaacctgggaggcggaggttgcggtgagccgagatcgtgccattgcactccagcctgggtgacaagagcgaaacttcatctcaaaaaaattaaaaataaaaataaatagaatagaataaaatccaaggtcaggccttggctcacgcctgtaatcccagcactttgggaggccaagccaggcaaatcacctgagatcaggggttcaagaccagcctggccaacatggtgaaaccccgtctctactaaaaatagaaaaattagccgggcatggtggccggcgcctgtaatcccagctacttgggaggctgaggcagaagaatcgcttgaacctgggagggggaggttgcagtgagctgagattgtgccactgcactccagcctgggcgacagagcacarttccatctcaaaaaataaaaaaaccccaaaaccaaatttctgttgtataaagctcagagaggtcaagtgacctgcacaaaatggaacagctaataaggaatcatggaagtcaggactgaaacccagcagctgtgattccaaattctgttttctgctgcactgcacagagagtgcaaggcccacgggttccctctgtattgtgaaaatttacagagttatcttttaatagttttttttcaaatgcatgcctttcatcattctcagtcagttaaaccaatctcaggggatcctttgctaggattcatcttttctggacactttttggcctgcaggggtctgagttgccctatgcaaagaggctatgtttgactaggctttaggagctcgtaccaggcagggttaaactattcttgctactcgccttgggaggagataaaacaagtggactaattctactctcatcaacttcgattttgaaagactgaaaaattgctcccctgtttttagatcctttcttcatattgcacaccctgtgtgagttgtggaaaatcattggaatgttattccaatagggtttttttttttaagtatagaaaaatcatggagacrtggaggcttaaaagggttcgttcattcattcatcttttcactcattcatttgcaaaggtgtgtagttctcaaagtgtggtctgggttcctccagttacataaaatactattaataacaggttatttatatttttcactttcattctctcacgaatgtacaatggaattttctagaggccacgagatgtgtgctctccaaacagaatgaatggaaaagctgcaaaagcggagatgagggtccagctgtcttctctttagctacatatcagagatttgcaaaaatgtaggacaatggctgggtacggtggctcatgcctataatcccagcactttgggacgccaaggcaggcggatcacaaggtcaagagattgagaccatcctggccaacatggtgaaaccccatctctactgaaaatacaaaaattagctgggtgtggtggcgcacgcctgtagttccagctactcgggaggctgaggcaggagaactgcttaaacccaggaggtggaggttgcagtgagctgagatcannnnnnnnnnnnnnnnnnnnnnnnnnnnnnnnnnnnnnnnnnnnnnnnnnnnnnnnnnnnnnnnnnnnnnnnnnnnnnnnnnnnnnnnnnnnnnnnnnnnnnnnnnnnnnnnnnnaaaaaaaaaaaagtaggaccatgccgttctcattaacactatttttttttgtttttgttttttcaaagtataggttctttttgtttgtttttttgttttgacacagagttttgctctttttgcccaggctggagtgcaatggcatgatctcggctcactgcaacctccaactcctgggttcaagcgattctcctgcctcagcctcctgagcagctgggattacaggcatgcgccaccacacccagctaatttcgtatttttagtagagaccggtttctccatgttggtcagactggtcttgcacccccgacttcaggtgatccccccaccttggcctcccaaagtgctagtattacaggcgtgagccactgcgccccacctcaaagtatagttatttttcataacaaatacattgtttatggtcacatggaatgggtttatctttgttatttcattttatttatttatttattcatttttttttttgagacagagtcttgctgtgttgtccaggctggagtgcagtggtgtgatcttggctcactgcaacttctgcctcccagattcgagtgagtctcctgcctcagcctcccaagtagccgggattacaggcacatgccaccacacccagctaatttttgtatttttagtagaggtggggtttcttcatgttggccaggctgattttgaactcctgacctcaggtgatccacctgcctyagcctcccaaagtgctgggattacaggcatgagccaccgcgcctggcctatccttgttattttttatttttatttttttttgagacrgagtctcgctctgtcgcccaggctggagtgcagtggcgtgatctcggctcactgcaagccctgcctctcgggttcatgccattctcctgcctcagcctgccaagtagctgggactacagtcacctgccaccacgcctggctaatttgtgtgtgtgtgtgtgtatttttagtagagacagggtttcaccatgttagccagggtggtctccatctcctgatctcgtgatccacctgcctcggcctcccaaagtgctgggattacaggtgtgagccaccacrcccagcattattttaaaatgaattaacacttacatattttttggtttcttagttttatttataatttggtaattatttctagttgtgttactaattttaatggatagatataacccacagaaacaaaagctcttggggtcctcagtaagtttcaggacacatgtcctgaaaccctgctggcaaaggcaattcaccacatagtacacaattcaaagctacattagggtgttgaatgaacactgagctcctgcctggtccccagacgctatgttctgctgccctaaggcaactcctgttaccagtatcttgtggctcctgttagggatattcaatgactacatgagcaaataagtaygtatctttttgttttgaaacagagtcctgctatgtttgactagtgtgcagtggcatgatcatggctcactgtggcttcgacttcttgggctccaacaatccttcccccttagtctcctaagtgggactacaggtgtgcactgtcacacctggctaatgttttaacttttttgtagagatggggtctcactatgtcgcctaggctggtcttgaactcctgggctaaagcgatcctcctgccttgacctcgcaaagtgctgggattgcaggcgtgagccaccacatccggcccttttgcgtatcactttaaaaacacaaatagcatctacacttctctagaccctagtttatctgaatggctacataatatcccattttacagatatgccagaatttagttaaccattcccttattgagggacattaaagctgttggtaaatttggttttttaaaacttttattttaggttcagggatacgtgtgcaggtttgtaatgtaggtaaattgtgtgtcttgggggttttgtgtagagattatttcatcacctgtgtgataagcacagtacccgataggtagtttttcaatctttaccctcttcccacttggtaaatttgttgtgatcaacagctgctcttcccaaattaccttatttaccctttagttcccatggtgtttctrtgactgttatgcaagttgttggacttagtgcaaattataaaacattaaatgttcatttttgcctctaattctttaggaactaggttgtgaatttcatcttttttttttttttgaaatgggattttgctgtgttgcccaggcttaagtgcaatagcacttttttttttgaaacggagtctcactcactctgttgcacagactggagtgcagtggcacaatcttggctcactgcaacctctgcctcctgggttcaagcgattctcctgcctcagcctcccgagtagctgggattacaggcacccaccaccacgcccagctaatttttttgtatttttattagagatagggtttcaccgtgttggccaggctggtttcaaactcctgacctcaagtgatctgcccctcttggcctcccaaagtgctaggattacaggtgtgagccaccatgcacagcccaatagcacattaatagctcactgcagccttgaactcctggcctcaagtgatgctcctgccttggtctcccaaagttctggaattgcagatgtgagccactgtgccctgcctgttaaagatggattcattttatccatcttctattaatgcagaaaatttgaaatcgattgtatggtgactgaatgaagatgtgcatttatatcattggtctggtasatgagcttgatgggttaaaaaaaaaaacacttcacttgctctgtgtgtttcagctatgaggcagtgaggggaagcattattagccatggtgaaataacaatgkgtggtattatttaatcctgcaattgttttaggtgggcctaagttctttcaggcccagggatttggggctcttcatgatgttcatgtcaggaagatcgtgtgtgttctcctgaggctaagcgtgcaggctcatgtagtgatgctggctgaacgtctgctgctcaacgtctaccccagaatcttgaggtgtgctaacaagccaggctttgttttccactcccacagaaccgctgcacagttcctgctatgactgaggggctttaaacactttttaaagattattttctggccaggcgtcgtggcttatgcctataatcccagcactttggaaggccaaggcccaggaattcgagaccagcctgggcaagataatgagacctcatctctgccaattttttttttttttaattagccaagcatggccgggtgtggtggcgcaccctgtaatcccagcactttgggaggccgaggtgggccaatcacctgaggtcaggagttcgagaccagcctggccaacatggtgaaaccccttctctactaaaaatacaaaaattagccagtcgtggttgtgcgtgtctgtaatcccagctacccagaggctgaggcaggagaattgctggaacccaggaggtggaggttgcaatgagccaagatcgcaacactgcactgcagcctgggtgaaagagcgagactccgtctcaaaaaataaaaagataaaaattagccaggcgtgatggtgcacacctgtggtcccagctacttgggaggctgaggtgtgaggatcccttgatcccagaaggcagaggctgcagtgagctgtgatcacaccattgcactccagcctaggtgacacagcaagacatttaaaaaaaaaaaaaaaaaggaaagaaagattattttctcacaacaggcaagtttacaagtcttcaacacaaattgacgatgttgggattagagctcttttgagatagggtcttttttgtttttgttttggttgtttttttgtgtgttttttgagatggagtctctcctgtcgcccaggctagagtgcagtggcgcgatcttggctcactgcaaccgccagctcccgggttcaagcgattctcctgcctcagcctcctgagtagctgggattacaggcatgcgccaccatgctagctaagttttatattttagtagagacggggtttcaccatgttggtcaggctggtctcaaactcctgacttcatgatcggcctgcctcagyctcccaaagtgctgagattacaggtgtgagtcaccatgcccggccaatttttttttttttttttgagacagggtcttgttctgctgcccagactggagtgtagtgctctgatcttggctcactgtaaactctgcctcctgggttcaagctattcttccccttcagcctcccaagtagctgggatacaagcatgcgccaccacacccagttaattttttgtatttttagcagagatggggtttcaccatgttggccaggctggtcttgaactcctggcctcaagtgatctgtctgccttgggctcccaaagtggtgggattacaggtatgagccaccgcacctgtcccaggcagataattttaaaatatactttaaaatttattgcagagacagagtcttgctatgtcactcaggctgatcttgaactcctgggctcaagtgatcctcctacctcagcctcccaaagctctggggattacaggtgtgagccacactgcacctggccagacaagatattttataataaagtttcaacttattgtatttaatattcaaaacagtcatcctagccattcatccttataattactaaagacataatgccagttacttccaatcactggtgaattaaaatttttttctcattcttatatctatacctgactttaatatcagagggtggctatggattggatattgattaaatcataaaacataaggtttgggaaaatgcaaagtgcagcctatgaaattgaaaattaacagaactagctaaaaaaaaccactgcaaagaacttagcacataagagtgtaaaactggcatctaagggtcaaccactttgcgtaagaaatggaacctttagaaagaatgaagtgatcaaacccgtttaagtctagataaaagtcagaaagtccccagtcaatgctaagatgatgttttcttctttttttttggacggagtctcactctgtcgcccaggctggagtgctgtagcgcgatcccggctcactgcaacctccgcctccctggttcaagctattctgcctcagcctcctgagtagctgggattacaggcggcatcatcacgcccggctaatttttgtatttttagtagagacggggtttcatcatgtttgtcaggctgatctcgaactcctgacctcgcgatctgcccgcctaggtctcccaaagtgctgggattacaggcgtgaaccgccccgcctggcctctaagatgatgttttctccctcagtgcctccccacccttgtgacctgtcagacttatgtgtaaaaatgcatctgtcaataactaaatattgagtgcctacgattggccctacattaggacaataaattatctcctttcttacatttatttttctgtatcaaaatttttctcaaagggttttagttcaatggttgcaggtctgtttaagggttggttgaaaaataataccatcattaaaaagagctgatttggctgaacacggtgactcactcctgtaatcccagaaatttgggaggctgaggtgggcagatcacctgaggtcaggagttcaagaccagcctggccaacatggtgaaaccccgtctctactaaaaatacaaaaattagccaggcgtggtggcaggtgcctgtaatcccagctacttgggaggctgaggcaggagaatcacttgaacccaggaggtggaggttgcagtgagctgagatcgcgccattgactctagcctgagggacaagaatgagactttgtctcaaaaaaaaaaaccacaaaaaaactgattttagacagctgagaatctatatataactgacacataagtatgctatacatatctgtatgtttagaaaatgtttaaaagaggcygggcgcggtggctcacacctgtaatcccagcactttgggaggcctaggtgggtggatcacttgaggtcaggagtttgagaccagacttgccaatatggtgaaaccctgtctctattcaaaatacaaaaattagccgggtctggtggctcacgcctgtagtcccatctactcaggaagctgaggcaagaagctgcctcccaagaacctctgccttgggaggcagaggttgcagtgagctgagatcacaccactgcactccagcctgggcaacagagtgagactccgtcttggaaaaaaaaaatgtttaaaagaacagaactggagaaaataatagaaaaggaaatggatctgtatgcagccctaccagagctggaagctgtgagctcaggctaaattatcttttcatttctagagttatatgcttatagtatccttttcctccatcagtcgactttagcattatcagtcatacgtgcgtgtttttacatttattttaattcggctatggatctcacattcacaaaggtctcacataaactttagaacttatctctaaaaatgattattcccacagtcacagattcatttttgtttgtttgtttgtttttggatcaagactttcctggaaatcactgatagttttgaaagcacacagtattcaccatgcaactttaaactttaaacacagcctctgttgtaagcctgcaatgattaaaatctttaataaatcctgaaatttttctctgaatagcaaaaaagactgcattgtgtatatgttctaacattgtacatatttaattagaattaaaaacattactaaatgtaaacatttaaaacagggatttatagcgtaacgcaatttcagcatttctttactctttttttttttgagacggagtcttgctgtcacccagcctggactgactgcagtggcgcgatctcggctcactgcaagctccgcctcccaggttcacgccattctcctgcctcagcctcccaagtagctgggactacaggagcccgccaccacgcccggctaattttttgtatttttagtacaaaaatactaactgtatttttagtaatatggggtttcaccatattagccaggatggtctcgatctcctgactttgtgatccacmcgcctccgcctcccaaagtgctgggattacaggcgtgagccaccgcacccrgcctttttttttcttttttttcaagacagggtcttgctgtcacccaggctggagtgcagtggtgcagtggtgcagtcagtatttttagtagagacggggttttgccatgttggccaggctggtctggaactcctgaccacaggtgatccgcctgcctcggcctctttaagtgctgggattacaggcataagccaccatgcccagcccgttttatacagctttgatttttatttatttatttttttgagactgagtctcgctttgttgcccaggctgcggtgcagtggcgcaatytgggctcactgcaacctccgctttccaggttcaagtgattctcctgcctcagcctcccgagtagctgggattacaggcgcatgccaccacatctggctaatttttgtatttttagtagagatggggtttcaccatgttggccaggctggtcttgaacccctgacctcaggtgaactgcacacctcggcctcccaaagtgctgggattacaagcgtgagctactgtgcccggcctactttttttcttatagttaaaaaaaaaaaaaaaaaaagattttaagtggtctggccctctctttaaacttctgagtttgggtggatagttgagttgggttgggtggttagagaagaaatgctctggacagattgaaagactaaattcctacaaggaaaagtggtcatttttctgtggttttatcccaggggagttggggcacactgtagtaaagggatgtatactctccaagatgcaatgccrcctcgaaatgcctgcctggctcatgggtgtcatgagatctgactagtcaccatgtgtgttcctaaggttcctcagctcatcagatctcaccccaaggtggcccaacctaagtaaaaggcaaatcacaacggacatatccaggccctgccctaaagaggcaagctgatagttactcatatccattttatgtttaggaggggtaataagaaattcggtttgcaaacaccgcatgttctcactcagatgggaattgaacaatgagaacacatggacacaggaaggggaacatcacactctggggactgttgtggggtgggggcaggggggagggatagcattaggagatatacctaatgctaaatgatgagttaatgggtgcagcacaccagcatggcacatgtacacatatgtaactaacctgcacattgtgcacatgtaccctaaaacttaaagtataataataataatagtaaaaaataataattaaaaaaaaaagaaattcggtttggacccattggaatagggagagggaggaagacatggcatttagtccttgccctacaaaaatatctccgttctaggagcctgcgtttgtggggattcagcctggggttccctgcctctgctcaccccatagccaagtagaggtgatggtggggaaatgcccctgccaccggccacaaggtatatgcaagagagcccaaatttatttttatttacttatttatttttcgagatggagtttcggcttttgttgcctaggctggagtgcaatggcgcgatctcggctcactgcaacatccacctcccgggttcaagcgattctcctcctgcctcagcctcccgagtggctgggattacaggtgcccgccaccamgcctggctaattttttgtattttcagtaaagacgggatttcaccgtgttcgccaggctggtctcgaactcctgacctcaggtgggccaccgcgccgggccaagagagcccagatttaactcagaccatcctatctatcaaaagcagcaccagccactattctgtggtccttttattatctcagggcactaatcacttactcagcttgcgaacgtgttccactttctcccactgggcttagcttggttccctcctattccccagcgcactcatcctaggggctcatctgcgtatttgaatacgcatacggaagaataaacatcccccaggtacttcaggcacaaccctcctttggcagcgcagaagtcaagctagaggtcgtgaccccctggagtctcggtggtttcgggttggggagcagagcgggtggggcaggaccgactcgccggtgccagtcaggatatcaaggtgacagcgcccggcactggccttggtcgaagggtgactccgccccattgctaagctccgattgggcacgcccttttctggttcttcttcaggattggctgggaggtgcggcctatgaaccggaacgcgtcgcgattggttggcgctcaggccgatcttccagacgcggaggcctgggccgatgtggcccaactctctgccagccaatcagcgctcgggctgagtgtggcgcgtgagtgtgtccgggatccctccgccgcccgggcgttggggtcgcgggaagggaggggactgggaggggatggggtggggacgcgcaggaggcccgtggggttgacttgggcgaggcggagaggacgcgtgtgctggcagatggaggagaaccgagcggagccgagcagctttgccaggagtcttccactactgctaaggacccctcctgcaaattcagactcttgcgtgacacactaaagaataaattaataggctgggcgcggtggctcacgcctgtaatcccagcactttgggaggctgagccgggcggatcacgaggtcacgagatcgagaccatcctggccaacatggcgaaaccccgtctctactaaaatacaaaaattagctgggcatggtggcgggcgcctgtagtcccagctactccagaggctgaggcaggaaaatcgcttaaacccgggaggcagaggttgcagtgagccgagatcacgccactgccctccaggttgggcaacagagcgagactccgtctcaaaaaaaaaaaaagaataaattaataatcaataaatttaaaaattaaaaaggaacgccaccaaaagaatcatgaaaacaaataaaggctaataaaaataaaagaaaggcttaaagtgcccaaaatgtccaaaagaaatgcacaatatcgacttacagtatagacagaagagacctgcaaattctgcagccttaataccttcagtctttttggaaatgtttcaggagctgctgctctgtgccctgcctcgtgctaggcgtcggggaacccccaagggaaccacggggaccagagcccggcggtcatggcgcttgctcttggaggcacataaagggcttcatttcagatgatgaaagtgcaatggggtgatggagtggagaatgtgggygctctgaattttaaccacgtgctatgacatggggtggggtaaggctcctaatctaggagcagccttctcgaggtctttaaccatctgcataagagatagtataaaaaaggtaagggacatttgtgtgtgcgcgcaagtaagatttctttgcatcttattacaacatctatcccctcccttcaccgtatgtgccagctaatacactagggactttgtatttttcaggatccttttctccagaagcctggctactgaagagagaacttcacacttacataagaggaaaaagaagccagaggatggagtgtcacctcatctggtcatcttttcttgccctgttagaatcaagacagcagagcatagcaagcttcagatggcttgtctggctggtctgagtctctttaggattaaatgaggcctctgttgatggagatcctttgtttcactattagcattaggctaataagtttcagtattttctaaaccccgttttagggtatgtctcctggttgttggtgatgttgaattacagggtgtcctacagagagtagcagaaatgtagctgtgtcttccaagtatttgctatgagtcctcagtggcagatgtctgtgagctgtagcataagatgcattcatgtaacaaatatctattgcgtgcctgccgcatgtgaatacaaggcgaaaggtccctgctttcatgaaatttcattgtatttcattgtattaatttcattgaaagtaataatcaatttcaaataaggatgatttggccttgcacttgaaagaagcaaaacaagatcatgtttacagtgcctgggggtggagaggggaggaacattctatagttgttgactggctgagttggggtcaggtgatcccagcagaagtgggctgattcatcaaagatcaattcattgaaagtcattttgccaaataatcaattcagtgatttagcagaattttccagatttaccaacttaccaaaaatggcattttatggcttaatcttcttgatttagattcaatgaataagaatacagtcatctgaattttttcggacatataagaaaatacactttttttttttgagatggagtctcactgtcacccaggctggaatgcagtgatttgatctcagctctctgcaaactccgcctcctaggtacaagtggttcttctgcctcagcctcccgagtagctgggaatacatgtgtgcaccaccacgcctggctaatttttgtatttttagtagagacggagttttgccatgttgaccaggctggtcttgaattcctgacctcccaccttggcgtcccaaagtgctgggattacagatgtgagccaccgtgcccggccccttccagttctttttctacacatatacattaatgtatagaaaaaaatatatatatgtcaggctggtcgtggtgtctcacgcctgtaatcccagcactttgggaggccgaggcgggcgaatcacgaggtcaggagattgagaccatcctggctaacacagtgaaaccatgtctccactaaaaatacaaaaactagccgggcgtggtggcaggcacctgtagttccagctacccgggaggctgaggcaggagaatggcatgaacccaggaggcagaagttgcagtgagccgagatcgtgccactgcactccagcctgggcgacagagtgagactgtgtctcttaaaaaaaaaatatatatatatatacatatatgtatatatatgtatatatatatttatttttatatatgtcaacagagaaaattttaaacgcaaatgttttcttgtatgtatttttctacaactgtacgtgtcattctacaatttattctatcttcttcaacagtctctttgaggctgggcagtggtggctcatacctgtaatcccagcactttgggaggttgagacaggaggatcacttgagcccaggagtttgagaccattctggataacatagggagaccctgtctctatttatgtatttatttattttttgagacagggtcttgctgtgtcacccaggctggagtgcagtggcataatcataactcgctacagcctccacctcctgggctcaagtgatcctccctcctcagcctcctgagtagctaggaccacaggcacatgttactacgcctggctaattttttattttttattgagacaaggtcccactatgttgcccaggctggtcttgaactcctgggctcaagcaatcctcctgcgtcagcctcccaaagtgctggtattacaggggtgaaccactgcacccagcccccatytctattaaaaaaaaatctctttgagaactgtgatgtttgtaggtgaatgtgattgtttttagtggatgtgcatagcattgtacagtatggattatactatactttgccgttcccatgttgaaggackttagtttgtttctagtttttcaccctaggcttagtgaagtaagactcacccagagtcttggggccctgcttttattaattgttttatttttttttatatttttattttttccaaggcagaagaatttttcttagtacagaacaaaatgaagtctcccatgtctacttctttctacacagacacagcaacaatctgatttctctatcttttccccacctttccccyttttctattccacaaaaccgccatcgtcatcatggcccgttctcaatgagctgttgggtacacctcccagacggggtggtggccgggcagaggggctcctcacttcccagaaggggcggccgggcagaggcgccccccgcctcccggacggggcggcggccgggcggaggcgcccccaacctgcctcccggacagggcagctggccgggcrggggctgaccccccacctccctcccggaccgagatggcagcagtacagtccagcttcggctcrgcatcagtagagatgaggttgtgccatgttgcccaggctggtcttgaactcctgggctcaagtgatctgcccgcctctgcctcccaaagcactgggattacaggcatgagccactgcgcccagccggtcccatcgttttcttatctttattcctgatgaggatttgaagttgcrtggtcatattttctcctctgctttcccctgggggctggagaggaggtggggaagctcaaccttgagacatcaactccggcacatctcgtacttagtaactggcaccgactcaatatccacagccccctgggcatgcggggagtgttgatgcaaccacaccatggaggccagaaaaagaaatcctcaagcaacactttggcctgatggactcaggggacctgcctgagtctgcagktggaatcacccctttccctttcttctggcctgacctcggggagccactgtgtcggcagctgctgtctgtgcagatgctgcagcttcctgtccctctgctcctccagcctttccttccgtctctgcactgttgctttggttatgacttgggtaaaatcagaggctcgaacttgttctcatctagtccggctccaagtactcatcgaatccagcagcatatcctgatggttctcccttccaaaatagttctatgtatatagaagtattcacagatttatatttatataaaaataaatgtatatatttacactatgggatgtagagctatctgaatataacatgtatrtacaatttatgaaataataaatgcacaccaagtagtcaccacccagcttaataggggatgaccagtatcgtggaaatccctccctaaattcagcctctttatttgtcctatgagaaaccagtgctatatctatagctctatataccactatgtaagtatatacatttatttatttattttttgagatagtttcactcttgttgcccaatgtggagtgcagtggcatgatctcggctcactggattacaggcatgtgccactgcacccggccataattttttttttttttttgagatggagtcttgctcttattgctcaggctggagtgcaatggcacgatctcagctcactgcaacctccgcctcccaggttcaagtgattctcttgcctcagcttcccaagtagctgggattacaggcacccgccaccacgcctggctaatttttgtatttttagtagagacggggttttgccatgttggccaggctggtctcgagctcctgacctcgtgatccgcccgcctcggcctcccaacatgctgggattacagacatgagccacagtgcctggcccataaatttattttatttttttattttattattattatttttgagatggagtctcactctgtcactgaggctggagtgctgtggcgtgatcttggctcactgcaacctctgccctccgagttcaagcgattctcctgcctcagcctaccgagtagctgggattataggtgcctgccaccgcgcccggctaattttttgtatttttagtagagacggggtttcaccatcttggccaggctggtcttgaactcctgacctcgtgatccacccacctcggcctcccaaagtgctgggattacaggagtgagccaccgcgcccagctaaatttattttttatactgttccatccacccctcaaacccaaccacactctatgaccacacaacagacgaataatcctttcagaatgtatatcatgtcacttccccactcaaaagctgccaggtggcttctcatcacastttgaataaaacccaaagtacttaccccacggcctcccaaggcctcatatagccactgcgttaagacagtgccaagcaggcctcagggactttgcatgtgctatgccctctgcaaggcttttcccgaagatcagcactgggctggatgtgtcacttcatttaggtgtcagctcatgttacttcattagggatatccttccttgatcacttttttttccttttttttttttggtgagactgaattttgctcttgttgagcagactggagtgcagtggtgcaatcttggctcgccgcaccctccgcctcccgggttcaagcgattctcctgcctcagcctcctgaatagctgggattacaggcgcctgacgccatgcccagctaattttcatatttttagtagagayggtgtttcactgtgttggccaggctgacctttttttcccccatgtttggggcttgtctttgtctctcaaatgcgaaatataaatcatgtttttacaagttttgtgaatcttgacttttcacaccttgtttttgtaagcaaaagtttcttattaaaataataaaatgactgtctttgtgtgcaatatttatctcaaatgtttgttaaaatagcattgttatttctcaggacaacagcgaggatcagcccctgcagaagcttaggaactatgtacagaactttacagaacagacgcaatactgtagcttaagcctctctgctgaccagagaatggaattctccgtggactcgaggaacaaaaggaaactaggcagggaaagggaaaaggaaagtggccatttgaatcaaacttcagctgctatcagggcacatcttgtggtggccacagattgcaggctgttcttggaagattcgggctcagcacaggattccatttgtctacctggctacactcctggctgaggtgccatgaggtcaatgtcactgaagtacctggccagccaaactcccgcagcaaagagtcccaaatcgaggatcaagttcctccagaagtcactcctatcagtggcaaagcggtagacgccctgaggctaatctcccacattgtccagtatttcgggagtttcattagccaagcaggcagcgctcatccagatcccgctggaagccatagtaggaagcttcgcacaggccctttttttttttttttttttgagacggagttgcgctcttgttgcccaggctggagtgcaacgacatgatcttgtctcactgcaaccttcgcctccggggttcaagcgattctcctgtctctgcctcccaaatagctgggactacagagacgagccaccatgcctggctaatttttgtatttttagtagagacggggtttcatcatattggtcaggccggtctcgaactcctgacctcaagtgatctgcccgtctcaaaaaaaaaaaaaaaagtggcttctttctgatgtggtgtgcattcctcaatacagtacatcaaaattttattttattcaatcacaacacggcatatttattccaattacagccaatccacctcttactttgatataaagtgctcgttttttatgaccatttaagcctgtgatgaaaatgtctagaattcaactgaagtcaggatacagaccctgaggttgcrcacagtcctgtcaggagagactccaaagtggggattctttggcaaggaagacagrggtttctcactgagcaggcagccatcagtgtccgccatgttgattttctttaccgactctctccctaagacagaaattttgtatttttccagcttcttcttagcactttggcttttgtttttatgtgtgcaaagagatatcaagctttgcgaagagaggagaaaagtgagattacaatttcccagagcatatggactatcctcgggtacttctggtttctgtctcaactatgggtgccattcctcttccagaccatccgtttggtactttttgggaaatatctttgctgtttccaaatactcatgtgttttatatgaaacccctttcaacatattccagtatgcggagcttgcagtgagccgagattgcgccactgtactccagcctgggagacaaagccagactcttgtctcaaaaaaaaaaaaaaagggacgtgggagaggaagcaagatgggtcttgaaaagacacctccgaaggcccgtgagtgtctggaagtatgtcacagggggtgagggctaagtctccagtcattctggctgtggctcacctctgccttgggctacctcacaggtgctgtgtctggttgggtgggccaagctggaggaattaggagtgaaccaagtggccgtcagatatataaatccaggcttttccctgccccatgaaaactggtcaacccactggtcaaagtggatttccacatgcatgagggctgggtctgtgctttacacagctgggtccccattgcccaactcacaacgggcaacctctaggcacgtgctgagggaatgaatgtttcttgaactcctactgtgggtcaggcattggggactgcgtggtgcactagtgagacaaggatcctgcccctgtggaatttgcattctggtgttaaaggaatgaacacaaatacgtagatctctcaaagatgaatctccctctgggtggaaatggactmatgcctggcaaatgcagtaacagggagacaaagagccagaggtggccccagaatttggaggccagggagggggcaacctagaagtcatgtttatatagcaagcaccctgttttaggtttgaatctccgtttatatgtggtgattgggagatggaagctgtttaaaattaggtggtggaagtgggagtttacttcataaaattccaatactggtcaggcatggtggcgcgatcctgtaatcccagccactcgaaaggctgaggcagtaagatcacttcagcccaggagttcgaggttgcagtgagctatgattgcgccactgcactccagcctgggcaatacagcgaaacctcgtctgtctctaaaaaataaaaataaaaacaaattaagctccaacactgcaaaaaactattttgggggaagttgattgggtggctaagataataaatgaagacaaacaacttgggatggtctttaacacggagcccacagtaggggtatgataaataaacctccaaaatatacctgaagtccatttcttctctccaactccaccctggtccagccaccatcatcttttgcataatttctcctgcctttgcccctgaagactattctcaactcagcatcagggagattcctatcacagccacagtcacagcgggtccctctccgctcaaaaccttccagtggtctcgccttaacccaggataaaggccaaagtctccactgggctccaggacctacctgagccaccaccccttcctctgcggattttatcttctaccccaggtctctcacatgaaaaatcttgtcctccttacaaagttccctaagcacccccggcactcgcctgcctcaaggtctgagccctggctgttccccctgcctggagactgaattgctcacttctgttgccttcttcgggtcactggtagaagttgccttttcaagggggccttccctgccaccctatttaaagagaaacacccctccccccacattctgtactctcccttgctttctctccacagcacttaatacctttttttttttttttttttttgagacagagtctcgctctgttgcccaggctggagtgcagtggcacgatcttggctcactacaacctctgcctcctgggttcaagcaattctcctgccttagcctcccaagtagctgggattacgggcatgtgccaccacatccagctaattttttttgtatttttaatagagatgaggtttcaccatgttggccaggctggttttgaactcctgacctcaagtgatctgcctgccttggccttccaaagggctaggattacaagtgtgagtcactgcgcccagcataataccttttattatacaaatattatatacaatatgtatttctctgtaatgtgtgaacccagagaatgttaggtctcaattcatttagaaagttaattttgcgaaggttaagtacgtgtgcccacgacacagactcaggaggtcctgacatgtgcccaaggtggtcagagcagagtttggttttacaccttctagagagacatgagacatcagtcagcatatgcaagatgaacactggttctgtctggaaaggcgggacaactcgaagcaaaggtgggaagacttgaagtggggagggggcctgccaggtcacaggtagataagtgacaaatgcttgcattcttttcagtttctgatgagcctctccaaagaagacaatcagatatgcatttatctcagtgagcagcggggcgactttgaatagcatgagaggcaggttggccctaagcagttcccagcttgacttttccctttagcttcatgattttggggcctcaagatttatttttctatcacactttcccccttttctttttaaaaatcttttggagaaagcatttttagaagaaaatgagtctcaggccgggcacggtggctcacgcttgtaatcccagcactttgggaggccgaggcgggtggatcacgaggtcaggagatcgagaccaacctaacacagcgaaaccccatctctacyaaaaatacaaaaaattagccgggtgcggtggcgggcgcctgtagtcccagctactcgggaggctgaggcaggagaatggcgtgaacctgggaggcggagcttgcagtgagccgagatcaggccactgcactccagcctgggcgacagagtgagactctgtctcaagaaaacmaaaaaaaaaaaagaagaagaaaatgagtctctgctctcaggtttcatctgatctttcatggctagaatggtttattcctagacaggtaggtcccaagttattaggaaggctcatttttagcaggttgtgaagtctcatgtcctatgaagagaaaacgggggaggaagggagaaaagcaataacaaacaaaagaacaatcctggaaaattgatataggccacattaccctgaagtccatacatcagtaggcagggatgaaaatgtcttatgtttgtaaataggttgctgttattttcttctgaagtttaagttgtctagcttcagtttgcagggctttatgaaagcatagcttagtttttggtgactccaaattagaaaaaatgggaaaaaagaagaaaaaaaattgaaaacgttattttgcrggcttgtagtcaagaaaaattagaatttggtccaaactgtagacaataataaaaattgaaaaacattaagcaagactagaatctaacaacaggtgtactacagtttttgaaacataatttttctctctccagtttcccatttttactaaggacaaataatggtatgacttatttgctttattatacttggcctgattatttgtatacaatgctgcaagaataatatatattttttaacataggcttttaaattggctttgatggaactttgttccatagaaggaatctcagatgagacattttaaagctgagtccaggcatggattcataccatcaaatacctatgaattggttgaatccctttcttcttgaggttccaagataaacttggagttcttggacctgtcagaaagtgacattgtttacttaccacaggtcaggaatcctgtacagggactgtgtaggcagaggtatgaggccagtttttccaaggggcttttatttgctccataagtcaagtttgatcccttaaaggaaagcacaccattccagtcaaagccttgtttctccaactgtgtcctgttacaaatgaaaacaggttcttaccgcacttatgcaattaactgtattgttgtaagttaagaatactcacaaatagtttccaaaattttgtagaaatcaggtagagagaaacaaatatgctccaaattttgttcatagtcgtatcccgtactcaattgttaaaagctataaatagcttaaaagttttcttcactcagaaaaacaaaaagatcagcaatgttttaagcaaaaagttaaaaagattacagattatttcagacttcttcttcttctttttttttttttagacagagtttccctcttgttgcccaggctggagtgcaatggtgtgatcttggctcagtgcaacctctgcctcctgtgttcaagtgattcttctgcctcggcctcctgagtagctgggattataggcatgcgccgccatgcccagctaattttgtatttttagtagagacggggtttctcactgttggtcaggctggtcttgaactcccaacctcaggtgatctgcctgcgtcggcctcccaaagtgctaggattacaggcctgagccactgcgcccggccaggactacctacctcttaactggatctctgagctctgggcagagcccacattgaatcctgggtctccaaaaagggagaagtattttgaagttagacgatgtgatgcttttacagtacgcttaaatttttttttttttaacaaagatatttctttttttttttttttgagacagagtctcattctgttgcccaggctggagtgcagtggcgtgatctcggctcactgcaatctctgcttcccgggttcatgccatcctcctgcctcagcctcctgagtagctgggattgcaggcacccgccaccatggctggctaattttttgtatttttagtacagatggggtttcaccgtgttagccaggatggtctcgatctcctgaccttgtgatccatctgccttggcctctgaagtgctgggattacaggcgtgagccaccgtgcctggccaacaaagacatttctaagtgtctaaactacactcttccttaaaaaccccagagtagcatctgttgcaatagctgttaatgaaaaaaacagaattcagtcaactgagaaaaacaaaaacaaaaacaaaaaaacctttgctctaaaaaaaaagcatcagttcctaggagagaaaaacaaaaacaaaaacatgatagccttttaaatacaaacacgagcacatgcgcacacacatcttggatgttagcttttaatgaagctgacttttaaccattgagctcctttaaaaaaatctttttaaaatctcattactatatttctgttaggacaaattgctgctatttcagaagtaccaagtagcaaaccagaaaggacttgatttaggaactaaatctaggctgtcgtggttagaaaaagcaggcagagccttagctatggaactgcagcttggggcaacagccattgctttcactttggcctggctagcaaaaaggtggccttatgtaaataaagcccctttagtagttaaaatcaaacatctttcctcttttaatttttttcttttgctggttgttttttccccctaccaggccacgtgtgtgtgtgtgtgtgtgtgtgtgtgtgtgtgtgtgtgtgtgaatttagccactttacagtccttgttcccagcaatttggaactttccttttgatttgatcaagtcagatatagttgatcaaacccaatgggaaaagaccaaagcaacaacaaaaacagagacaaacaagcaaccaaaaaagcatttaagccaaacaaaaaatggcacaacttatatgatcactgagcacgctctaatggtaaggataaattaatgttagaggaaagcggtcccgatccagaccccaagagagggtttttggatctcaygcaataaagaattcaaggcgagtctacagactaaagcaaatgcaagttccttaggaaagtagaggaataaaaagatggctactccatagacagagcaccctgaggggtgctggttgcccattctcatggttatttcttgatgatatgctaaacaaggggtggactattcatgcctcccctttttagaccatatagagtaacttcctgacattgccatggcatttgtaaactgtcatggtgctgatgggagtgtagtagtgaagtcaagcagaggtcactctcatcaccaccttggttttggtaggatttagccggcttttttactgcagcgtgttttatcagcaaggtgtttatgacttgtattttgtgccgacctcctgtctcatcctgtgacttagaatgccttcactgtctgggaatggagcctagtagatctcagcctcattttacccagcccccactcaagatggagytgctctggttcaaatgcctctgacattaagaccagctggctgttaaccttaactttagccaagacaaaccccaattcagttacttacctagggatgggtcttaggctgtagactgctctctaccattctagaagcaggaaaaaagacctcatcttccctgttggaagcgagctcaaactccataaaggagttacctgccttccattgtcatggaagcaggaaaccttgccttccttgttggaagcaagtaaaactgcaaagaaaagagttgtacagcaaaataaactttagatctccaccaaattttgggagatcagggaggctctggagggggtgctctcagacctgggctcactcttgtaatcccagcactttgggaggccgaggcgggtggatcacctgaggtcaggacttcaagaccagcctggccaacatggtgaaatcccgtctctacaaaaatgcaaaaatgagccgggctcggtagctcacgcctgtaattccagcactttgggaggctgaggcgggcggatcacctgaggccgggagttggagaccagcctgaccaacatggaaaaaccctgtctgtactaaaaatacaaaattagccaggcgtggtggcacatgcctgtaatcccaggtactcgagaggctgaggcaggagaattgctttaacctgggagatggaggttgccgtgtgccgagatctcgcaattgcactccagcctgggtaacaagagcgaaacttcgtctcaaaaaaacaaaacaaacaacaacaacaacaaaaaaaaaaacacgaaaaattagctgggcatgatggcgtgtgcctgtaatcccagctactcaggaggctgaggcaggagaatcgcttgaacctgggaagcagaggttacagtgagctgagattgggacattgcactccagcctgggcgactgagtgagactcaaaaaaaaaaaaaaaagctaaggcggggagggggccttccaggtcataggtagataagggacaaatggctgcattcttttgagttttcaattagcctctgcaaaggaggcaatcaggtgtgcatttaactcagcagaggggtgactttgaatagaatggaggcaggttagccctaagcagttcccagcttttcttttccctttagcttagtagtggggccccaagatttattttcctttcacaaatgtgtattttgatacccattggcatactatgtatattattgtattatactatgacattatcttgtgtatgtacacgatgtacttatttgttaatcgtctcccgtcttcctcacacctgtacccctcctctcctgttgacagaggacaagaattttgttttgttcgctgctgtatccgcaaagctcccaaagtcctccgaatgccgcaggctctcagtaaagacctgcaggaagaaatagcgaatgaatgatgtacacgtgtaggaaacagcgggctcggacgcctggcttctccggctgccctaacgccctccagctccaggtgaggtcggggagctggggccaaggctcgtgagcgcccctcacccccacgccccccggccgcgggcgctggagccggcggctgcgagcactcctttgaacggcgctgcactcagcggagggttacaggcgggagggcggggcctggaagggggcggggattcgaggcggggcctgcggggcggggcctgggccaagcggcccgcaggaggcggcggcggccgttcagtcccttgttccccgccgccgccgtcgctgacccagcccgccaggcgctcctgaccgtcgcttcctccaggtcccaggtccccaggccctcgcctcagccccggcccctggtcnnnnnnnnnnnnnnnnnnnnnnnnnnnnnnnnnnnnnnnnnnnnnnnnnnnnnnnnnnnnnnnnnnnnnnnnnnnnnnnnnnnnnnnnnnngccccgccatgtccaaggaggagcgccccggtcgggaggagatcctggagtgccaggtgatgtgggagcctgacagtaagaagaacacgcagatggaccgcttccgggcggctgtgggcgccgcctgcggcctggcgctgggtgagagtcgggcgcgcggccgggcctgcgggggatgggcgggagccgtgcagggtggttgggtggtctccccatggctagtttcacgcttctggggctggaggagccacttgatggcggggaggccttctgactgcggggttccccccagtcttggggaacatcacccctccacagcacctcctggcacttcctgactctgcagcgtctcctctgcatgtgggggtcaccctctccccgggagtgtcacccctcgggagggccagctgcctgttgaccgtgtgaccccttgctaggctttcctacctgtgaggtgctccctggagtcttgacctccggcctgtgggggcttcccccggacatagggcctttttgacttgcagctcttcctctgtttgtgggggtcccttgccagtccccagtgccgtgcactctgtccccctgacctccctcatctccagctgcccctgctggaggccagcacctagcaggatggtcaggcaggaggccctgtccacgtgtctacactcccagcccccaaacagaacctagtaaaagactctctttccacccatcaccttgaacctcagaaactgcctctctcggtgcgggtggggcaaaggctccttctccgtggggtaaccgctccgggtgctcttcctgagctctagctggcttgcccaactaccagctccacccctccaccctgcctcccctaggtattcctaggggatttttttttttttttttttgagacagtttctctctcgttgcccaggctggagtgcaatggcgagatctcggcacactgcaacctccgcctcccgggttcaagtgattctcctgcctcagcctcccgagtagctgggattacaggcatacaccaccacgcctggctaattttgtatttttagtagagacggagtttctccatgttggtcaggctggtctcgaactcctgacctcaggtgatccgatcgccttggcctcccaaagtgctgggattacaggtgtgagccacggcgcctggcctcctaggggatttttaactcatggtctcccctcctcaccccctccgctggcgcagggactcccttgtttctgttggtggcgtcactgttcttgctcaggctcacagggatggacaccccagtcacctgtggcaccagaagtcttctgccacagccccatgtcgctcacatctcctcctttgcagccccttgtcaggggttctggggcctcctttcctcctcaccaaacagtggttggttttcctgcttcctgcttttccatccatttgcatcctgcttgctttgccagagtaatcttgaagcatacaggtcttactttgtcactccttggctcagaagttctcagtggttccttgttgaccacaaaattgcagacggctgcctggcagcttccaggccctccacagcagtggggagcttccacagagtcattttcmtaggctaacccagagctgttcctctccttcccttcctctcccttggagacaggtgtagtctgttgccccaggggcttctggacagcagttggtaaatgagtatgtgttggattagggcagcctggagactcctggaagaagcaggaggctgccatgtgggattatgttcttcctctgtgtcaccttgccttgattccatctgtttcctctgccagcaataacagaatgctggtctggtgcctgtctagccctgatgttatgaaataatttcagatcgggcagccctattagatgggtgaaaccaccttcctccgtgggaagtgttgaagagaagggatttgtaatctgactatctggattttttttttttttaagcctcgcttttctcccccaggctggagtgcgacggcgcaatctcggctcattgcaacctctgcctcctgggttcacgcagttctcctgcctcagcctcccgagtagctgggattacaggtgcctgccactatgcccggctaatttttgtatttttagtagagacggggtttcaccatgtaggccaggctggtctagaactcctgacctcaggtgatccacctgcctcggcctcccaaagtgctgggattacaggtgtgagccaccgtgctcggccgactacctgggttttgaactagctctaccacttaccagctgtgtgatcaggaggaagtcattggatctcttcatgccttgtttcctcatctgtaaaatgggcataacaggacctgagtcattgagtgggtgtgcaggtgacaggagatggtcaagcccagtgctcagctctgccctgggtccctggggttgtggagtaaacatgagcaagtgctgggagggcccgagcatggctgcggagctcctttccctccttcagggctctcagactggtggcccatgggccaggtctcatgtccagacacactgttgagttgcctgcatttaaaagttaggagagggggctgggcgtggtggctcacacctgtaatcctagcacttggagaagctgagatgggtggatcttttgagcctaggagtttgagaccagcctgggcaacatggtgaaacccccatctctacgaaaaatacaaaaaattatctgggcgtggtggcatgcgcctgtagtcccagctactctggagactaaggcgggagggttgctggagcccaggaggtggaggtcgcagtgagccgagatctcgccactgcactgcagcctgggcgacagagtaagactctgtctcaaataaataaaagttgggagaccatatatgaaaagcaagctttccaacctctgagatccccaaggcctgtcatgctgggtctgcattcccaacgtggcagcattgtccggagctgagtgaggcccctccctttagtttggaggagggcatttagcactgtttttgtccttttctcctcttaccactcttgaaggtgatttccacctgactctcccctttcatattcctggccctggaggctttgggctttgcttgaagatccagctcaaatgctatcttctttttgattattctctttgaatatttctgccttccctcttctctccaagcacatgtaatttgggctttcattctgccctgcctttttgtgtatttgtgagcattctttttttttttttgagatggagtctcgctctgtcacccaggctggagtgtggtggcgcgatctcggcttactgcaacctccgcctcccgggttcaagcagttctcctgcctcagcctcctgattagctgggattacaggcatgcaacaccaagcccggctaatttttttgtatttttagtagacacgggggtttcaccatattggccaggctggtctcgaactcctgaccttgtgatccacccacctcgacctcccaaagtgctgggattacaggcgtgagccaccgcgcccggctgtgagcattcttattgcttaaagacagtgcccgcgaactcgtatcctctcctctgtgtcccagcagaggctcacttgtagcctgtatacagtatggggccatgctttggactggatgtcagtagagagcaagscacacatcctcagcagccttgctcccgccctgcaggcttcagggaggaaggcaggggcattccccactccggccgcctctccgtgagcccgtcttcccagaccaaggttggcaggacgtttctatccctgcattttgggaggctctggtagggttacccaccctcttttccactgccataaccacaggttggttggttcttgtcactgcttccagctgaagccacctgtgcactccctgcacatccacgtggggctctggggtcctctgatgcagacttccttggggtcggctgcagctccagcctggcatatgtgcctgtgattccaggcctctagcaagctctggcagacatgctgcatgtactagccctctgtaattaggaggcagggaggtggcaccagtttcaaaggcatgctcttttggaggactgtgccaagtgtccttctgtgtaccacaagctgcacgtcggctctctgtgcaagcagctgggatggagtttgccaacaaatagaaggcttgggccctgttctcaartagctccgggtggctaggggagagagctcatgtgaagatagtgccacacgttagtggacgctgggcattccacgaatggggcattggtgttgacattctgagtactgcactgttgtatgacagatgcagctgacggctgtaacttcagaagaatgtgtgttcagrgttccaagctaaggaatccaggagtggccaacccggatttattccttgtctatgaggaacatctgaacccccggcccatcccatggaatgcaagctctacagggggattgaggccctttcttttggattaagtaaaggttaccaggtggaagttgctaggggagggtgctgagtgaaggtgctgtataaactgcgtgcattttacaagcggttgcggttctcctgtccagcctgctgcccccagaccatccctgtaggtaagtttccaataaaccctgtgtctggctcactgcttccagatctctggaatctggtgccatctattggagttaacaggggtccagcacaacagcagtgcgctgggtttagcagagaatgcggtttagaagggcggatagcctgtaatctcagctacttgggcagcaggggcaagaggattgcttgagtccaggagttagaggctgcagtgagctatgatcatgccactgcactccagcctgggcagaagagtaagatcctgtctctaagaaaatgaataataaaaaagaggcagataaaatcttcagctaagatttgaaggtgtgggctggccaagattctcgtaggtggagaggaagaagggctgaaaattcagaagcctgtagggaccaracaggtscccaagataataatagttactattcagtgagctctctctgtatgtcgggctccatctggcrcctgatatgtatcaactaatgtaatcctctcagtaatcctaccaagtaggtggtagtartagccccatttcacmgctgaacaaaccaaggcacgaagtctcagttaagactttgtagctgtaggcagtggagctgtagtctgccgtctggttagttgttgcctctggcatttgcctgagggcccgatgaggcagctgttcccagttctagctaatcctcactrtgtggtrtggacaatgcatttgttacctattgctggtgacaaatcagcccaaaagttagcgacttaaaacaagaataaacctttatcacctctgagtttctgtgggtcaggactggggagtggctagttgggtggttctggctcagggtccctgaggggctgcagtgggaacgcacccgtccccaagagctcactcacatggcggtaagttagtgctggtggtggcagcaaggtagtgcaggagacatctgccatatgccacctaggactgcgtgagcatcctcactggcttctcctggagcaggtgacccaagagagccatgtggctgcagtgaccgttacaacctggccttggaactcacgtttggccacttccacaataccctgttggtgacacagatcagccctctcaggttggaaaggggaccatagagggccatgaatgcctggaggtgacaattactggctgatgaccacagtcaggtactcacttttctcaggagaagccggagtttcatttaaaaatggatttatgtgcttgctttggcagcacatatactaggtagaaaaatttgcatgatccctgcacaaggtggagatgcaaattcacgaagtagcccataaaaaagcaacaacaggcttttaagtgtgagcagcttgcacaggctgaatcagacctgggcttgcggttgcagcgtcctccctggtagaggcggggagcgtgggagcagaagagtgtgtctgaagagtcgcatttgatgagagggctgagttgctgacagtgggaaagtttccacctgaagtcggccgcttttkctgtcgtctcccagggtccttgtggtgtcaagaggccattgtggctgcatccttccagattcatggggctggccgcgtctgccttccttagtgatgctgttggcgaatgcacttttgtgatacttttttttggttgttgttgttgacagagtttcgctcttgttgcccaggctggagtgcagtggcacgatctcggctcactgcaacctctacctcctgtgttcaagagattctcctgcctcagcctgccaggtagctgggattataggcatgcaccaccacacctagctaattttttgtatttagtagagatgggatttcaccatgttggtcaggctggtctcaaactcctgacctcaagcaatccacccatctcggcctcccaaagggttgggattacaggcgtgagccaccgctcctggcgctttttttttttttttaaatggggtctcactctgtcgcccacccaggctggagtgcagtggtgggatcatagctcactgcagacttgagcttctgggctaaagcgatcctctcagctgtccctgccccagttcttgtgatccctccttgtccaacataactgaggaccattcctggacaccacagtcagaggggacactgctgaagggcagggagcatcgtgtctcttcttgtcttccccaccggggctgggaacagtgaggatgggcaagcttgacttcactgatggcagtgagataattcagctcagcggttgtattataccttttyccccattcctgataccccattggccatcttcctgttatgttattatatccttgccagtctctgccttcctggagccctagcaaggctgtgctttgaaacagaagcactgtatggcttcccttggtccccgataggataaaattctcctgtccctaaggactgattggctcactgtggccaatccacttggatcctaggcagttgagagggtaaagagtcctcagcgaggctggggttagtttttcagtgaagtcacatttcctttaggagttaaatacatctctttgtgtcaagtttccagctcatgtcttgatggtggggaaaagttattttgagtataactgagtggaatctgcaagggggaactcccctgggcataaaagttagactgttgtggaataaaaggagggagaccttttaccatgtaacttttgttttttttttttttttttttttttttgagacggagtttcgctctgttgcccaggctagagtgcagtggcgcgatctcggctcacttcatcctcggcctcccaggtttaagcagttctctgcctcagcctcccacgtagctgggattacaggcacccgccaccatgctcggctaattttttttgtatttttagtagagatggggtttcactattttggccaggctgatcttgagctcctgacctcgtgatccacctgcctcggcctcccaaagcactgggattacaggcgtgagccaccgcgtctggcctccatatgactttttacactttcgtaattttgagtcttgtgaacatattgcttcaaaaatcgaaataagtagtaacacctcccaacattatactggccttgagaagtcatcaacagactaccagttttgaacttctgggttttccaatgtatcgactataaatttcctaaggttgtatggtataataatggtgaactcctaatgccatggtgttaatttccaaggccctgttctaagcactttctacatgtgctcatttaaatcctcacaacagccctgtggctggagggggattattaattatccccattttgcacttgcctgaggtcacaaagctaataagtggcagaaccaggatttgaacccgggcatttgggctctagagtctatgttcttaggcatggtagttaagatataaaatcactgaagatgactcaaaacatcaccgcctcagcttttgttctttttggggactagtggtgttgggtttgcgtcaatacaaattaagctccttcctcccccagaccatttctcctcagatgaatttggctcgcttggacatgctcaaggcttctgaggtgtgtccatcttattaatggattgccaagatttcycttmtaaggttaatctgagctatttcatttttagagagttatgatgacttgtaccattggtccgttgagtcatattcagacttctgggcagagttctggaaattcagtggaattgtcttctcacgtgtgtatgatgaggtaagtagagattttccrtggatatcatctctttttgtggtcgtgcttcaaagtgaaatgctaattttggggaatactgaatygtatctcctttttacaacctcatgcagatgggaaaaagtcattgccctagagaactggcattaaattatcacagacctcatcgagaactttgcagcctgttaatcctctgttgtatggggaccccaggccctgtcctgggaacttgagtgatcctaaatagtagttttgtttgtttgtttgtttgtttttaatttttaaatatttggggctgggtgcagtggctcacacctataatcccagcactctgacagaccaagatgggaggatcccttgagctcaggagtttgagtgcaggctaggcaacatagcaagaccctgtcttcaaaaaaataaattagctggtcgtggtggtgcatgcctgtggtcccacctactcaggaggctgaggtgggaggattggttgagcccaggaggttgaggctgcagtgagctgtgactgcgccactgcactccagcctgggcaatagagccagaccctgtctcaaaaaaaaaggtttaattatgttaaaatacatatatcataaactattatgtaaccatcttaactattttaaactgtacacttcagtgatgttaagtacatttacattgttgtagtttttttttttttttttttttgaggtggagtcttgctctattgcccaggctggagtgcagtggggccatcttagtatactgcaacctccacctcccaggttctagcagttctcctgcctcagcctcctgagtaactgggattacagtcatgcaccaccacgcctggctaatttttgtatttttagtagagacagggttttgccatgttgcccaggctggcctcaaactcccaaccttgggtgatccacccgcctcagcctctcaaagtgctgggattacaggcattagccaccatgcctggccacattgtcatagttttttttttttttttttgaratggattcttgctcttttgccaggctagagtgcagtggtgtgatctcggctcactgcaaccttcaactccctggttcaagtgattctcctgcctcaccctcccgagtagctgggattacaggcatgcgccaccacgcccagccaatttttgtatttttagtagagatggggtttcaccatgttggccaggatggtctcaacctcctgacctcatgatctgcccgcctcagctttccaaagtgctgggattacaggcatgagccaccgygcccggcattagttttttaaactatttagaagtttcgttctttatttttctttgagaccgagtctcgcttttgtcacccaggctggagtgcatctcggctcactgcaacctccacctcctgggttcaggtgattctcttgcctcagcctcctgagtagctgggattacaggcgcccgccaccacgcccggctaatttttgcatttttagtagagatggggtttcaccatgttggccaggctggtcttaaactcctgacctcaggtgatccgcctgccttggcctgccaaagtgctgggattacaggcgtgagccactgtgcccagctggagttttttttttttttttgagatggagtctcgttctgtcccccaggctggagtgcagtggcgtgatcttggctcactgcaagctccgcctcctgggttcacaccattctcctgcctcagcctccccagcagctgggactacaggcgcacgctggcatgcctggctaatttttgtatttttagtagagatggagtttcaccgtgttagccaggatggtctcgagctcctgaccttgtgacccgcctgcctcggcctcccaaagtgctgggattacaggcgtgagccactgcgcctggctggagttttgttatttttttaacctgcagcttagaaaaaacttttcaattccttacactgtaaatcaataaatatcgggaaaaagggagtcctgccattcaaagtcgaatttattgtctccttggggcaaaccattttgaaatgttgatcttttgggactttgacaataaaaatcaaggttccagcactccaaggaaggaagcaaaggctgaagcccccaaaagttgtaggcaaggggcaggtggtcctggagcttgctctcctggtttccatgcgtctgggcwgagcctgacgtgttgggtgtcgtctttgwctttaggatctctcactgagtaggtgtttaatgagtatttgtggaacacatatgttactggggatggttgttttccgttggcattaatccctactttcagtttctagcttttaggccagttcagagttcagtccataaaatgatttaaaaatgctctgggccaatgagtgagctggcttcctgggaagaagaaccayttttgctgatttgtgacatagtctcatgttttgctgatctgtagcgtagtctcatgtgtgtgcgtcttggtttgttgtcattctctataggttgtggacacatcgaaaggaatcgcagatgtccccgagtggttcaaaggcagtcggctcaactatgcagaaaacctcctgcggcacaaagagaatgacagagttgccctttacrttgcaagtaagtcctgatggcgagacctgggatttcctccgtggaagttctagatggtgcatgcatgcggtgccacatatttggagagataggatttctaaaccatatgttggcacctttctgatgtaattaagatttctgtcgactttatttttgctggggaggggaaagggccagtgtgtggtcatgctttatgggcaaaatggagatactcagtattaagtaactagcttgtgtcacacagaaagttaatgatggaactataactagaatctcttcccattggcttttccttttaaaataaagttgaggctgggtgcagaggccgggtgtggtggcccaggctggagtgcactggcatgatcatggatggctcactgcarcctcaatctcccaggctcaagcaatcctcccacctcagcttcctgagtagctgggactataggcacacaccactatgcatggctgattttttttttttttttttttagtagagacagggtcttgctatgttgtccagggaggtcttgaaatcttgggctcaagcagtcctctcatcttggtttcccagagtgttgggatttcagacatgagccactgcacccggcccctgtgcagcttttaaaaatttattattatttttaaattgtgtgttccactttgggaggccaaggtgggcggatcacgaggtcaggagatcgagactgtcctggctaacatggtgaaaccccgtctctactgaaaatacaaaatattagccaggcgtggtggcgggcgcctgtagtcccagctactcaggaggctgaggcaggagaatggtgtgaacccaggaggcggagcttgcagtgagctgagattgcgccactgcactccaggctgggcgacagagtgagactctgtctcaaaaaaaaaaaaaaaaaattgtatgttcagcaagagtttattggacactctttgtgtctaagacatcttgtaatgyaagactcagagataaactgaagtcgtgttctgcctscagaatattacattctaatcatggaaataaggccaacatacacagaaacagttgacaatctatattaaatgccaaaatgagtctccaagttggcaattttttttttttttgagatagaatcttcctctgttgccaaggctggaatgcagtgatctcagtttgctgcaacctctgcctcctgagttcaggtgattctcctgcctcagcctcccaagtagctgggattacaggcgagcaccaccattgctggctaatttttgtagttttagtagagatggggtttccccatgttggccaggctggtctcgaactcctgacctcaggtgattccccccgcctcggcctcctaaagtgctgggattacaggcgtgagccaccatgcccggccccagttggcaatttttattagaagccagagaaagattaattcactgtggtataaaatactcatcagaaacttcactcactccctagatcagcacaagaaaccaaaccactggaaacaggcagtgagtggccctgcccaggctacagagcagggcctcccttctgccatcgtgggaagggaccagcagcccctgtgcagttggtaaagatcatgggcagtccagttcccaccgagacttactggggacacatctttccaggggctgggggccccagggcttccatgtatttttcaaaagcnnnnnnnnnnnnnnnnnnnncttccatgtattttcaaagcccatgggcacttctgatgcacattcctggtgaagagccatggtagcaatgtctcgacgtaccatatggggctggtcagtgttccattgctgttttccttggttctcagccttgacatggtcagggcagagtagataggtggtctggggtcagggctctgactggctctcccgtgccctttgcatgcccacctgtctgttacatccatttgttcctcagatctgtattaaatgcctcattagggctgggtgcagtggctcacgcctgtaatcccagcactttgggaggctgaggcgggcagatcacctgaagtcaggagttcgagaccagcctggccaacatagtgaaacccatttctactaaaaatacaaaaaattagccaggcgtggtggtgggtgcccataatcccagctactctggaggctgaggcaggagaatcgcttgaacccgggaggtggaggttgcagtgagccgagattatgccattgccctccagcctgggcgacagagcaagactccgtctcaaaaaaaaaaaaaaaaaaaaaaaagcctcctctgcaaggagacaagctgcctgccctgggagacgctgatgttccggggggcaaagcgtggtggtttaacaataagtaagaaaacatgcttggaagaataagtaaagcattgtgatgggaaagggatgatggggtggggtgtagggctgttttagacagggctgccagggaaagcctgtttggaggagtctacggaacttgatgaagccttcctctggctgacccctgtacctggaatctcctccccgcacctctgcggaagtcatgttcccaggcacaaggaacagccagaagaaggccctgggctggaggaggctctgtgtctgtggggaacagccaggaaggctgagctggggggcctcggtggtgagtccaggagtgtggggaggtgtgagagggagtgggccatcctcagggttctgagcaagggctgggtgatcccgtggtgacctggctgctgggtggagaacgggaagggattgcatcatgggaaaggagacttaggggactgctccgtgctccagctctgcgtccccagggtcacccctctgacagggtctcactctattgcctaggctggagtgcagtggcacgatcgtggctcactgcagcctcgacttcccaggctcaagcgatcctcccaccttagcctcctgagtagctgggatcacaggcatgcaccactgtgtccggctaatttttttttttaagtttttttgtagaaatgaagttttgccatgttgctcaggctggtctcgaactcctgggctcaagcaattcacctgctttggcctcccaaagtgctgggattataggcatgagccaccgcgtccagccagctcctttcttccaattagcatataattcatataccacagaaatacccttttaaagcctgcagctcagtggtttttagcatttttcaagaggttatgcagccaccacccctagttccagaacatttccattttccgaaaggaaaccccataccaattagcagtcactctctgttcctgcctcccccagctcctggcacccacctctctgctttctttcctgggtttccctgttctggacattttgtataattggatcatacgatatgtggccttttgtgattggctgctttcgctcagcacagtgttaccaaggttcatccacattgtagcatggatcagtacttcattccttttatgtcctagtaatctgccacagtacaggcagaccacatttcgttgatccctaagaggctcctgtgagactggcctgcctcaggcactgcagtgcatgtgggaacctccctagggtgccaacccagtcgcctctttcgtaatcctgagaaggagaacragaacgctgcgtctcttttcttttcctcgtctctttaaatgtgtgtgctttaacccaatgtctcagacacttcatgagctcctggtttctcctgtaaagtgggaacggtcaaatgtgaatccttaaaaaaaacccaaaaacccaaaactaaaaatctaaacccaaaactaaaaaactaaaaatatacttgattcctagtgatgacataagccagtcttcccagaacttgtaatacgggtgtctgggtggagactgaactgggtggggtgtctctctctctctctctctgttacatacagtattggctgaatccagccagttgccttttatttttttaaacccggccctgtctcgagggtgggttataattctgtgtctgtttcacaccccctacccctttaccttagcctgtcttctcttcactcccaccatctcttctcttttaagtatttgagccccccctttttaaaattattttttatttattattattaattttttatttattttgagacagagtctagctctgtcccccaggctggagtgcagtggcttgatctcggctcactgcaagctcctcctcccgggttcacgccattctcctgcctcagcctcccgagtagctgggactacaggcgccsgccaccacgcctggctaattttttktatttttagtagagatggggtttcaccgtgttagccaggatggtctccatctcctgacctcgtgatccacccgccttggcctcccaaagtgctgggattacaggcgtgagtcaccgtgcctggcctttttattttattttattttgagatggagtctcgttctgtcacccaggctggagtgcagtgtcgtgatcacagttcactgcaatctccacctccccagttcaagccatccttccacctcagcctcctgagtagctagggttgcacgcgtgygccaccacactggctaatttttgtatttttagtagagatgaggtttctcaccatgttggccaggttggtcttgaactcctgacctcaagtgatccacccgcctcagcctctgaaagtgttgggattacaggcgtgaaccaccacgcctagcagagccccttcttttaatgagctttatcccttccttataattgcagtgggaataaggacccttatgccagtgatcacagttagtttacaaatcgcatcccttacttaagcargggcctaagcagccgattattggctcgggggctttaagatcattgtgcttcgttttctgcatgtttttcctgacttgttccttacccagctgggtgcaggtgctcacggagctctgctccatgctcactcaggcgttctcagcaaaactcatctctcctatgggtaatccccgtcgaggccatgcgatgccctgcttaaaaaaatacatacatgtgcacaattgccttcatgctccagcgagtagagcaaacaacatgcattagcacatccgtgttgagattgttagaacagctgcctgcgcagcacattttgcttttgaagagtagctatcagcttaccgagtattttcacatgatggaaagttttctgggctgggaatgtgggagaggtaataaaaaggctaccccagggcagcaaggagaggatgaagggcagacgcgtacaactctaggcaaataggaaaaaaaaaacgagtttttttttttttgaggtggagtttcactcttgttkcccaggctggagtgcaatggcgtcatcttggctcactgcagcctccgcctcctggcttcaagatattcttctgtctcagcctcccaagtagctgggattacaggcacgtgccagcatgcccagctaatttttgtatttttagtagagaggggttccaccattttggccaggcttgtcttgaactcctgacctcaagtgatctgcccgcctcccaaagtgctgagattacaggcatgagccactgcgcccagcctgattttttttttttttttggagacagggtcttgatttgttgcccagattggagtgcagtggtgcagtcacaactcactgtagccttgacctcctgggctcaagcaagtctaccacctcagcctcccaagtaactgggaccacaggtatgtgccactgtgcctggctatttcatttttttttttttttaaaagatggggtctccccatattgcctaggctggtctcgaactcctgggctcaagtgatcctcccatcttcacnnnnnnnnnnnnnnnnnnnnatgccaaagggaaattaggatgtttattcactttctaaaagagacaattctgccagcacggtggctcacacctgtaatcccagcactttgggagcccgaagtgggtggatcacaaggtcaggagttcgagaccagcctggccaacgtggtgaaagcctgtcgctactaaaaatacaaaaattagcttggtgtggtggcgggtgcctgtagtaccagctactcgggaggctgaggcaggagaattgcttgaacctgggaggcggaggttgcagtgagctgaaatggtgccattgcactccagcctgggtgacagagcgagactctgtctcaaacacacacagacacacacacacacacaaagaggtaattcatgttatagaactgaaaagcgatgatcaatcaggagcaaaatatttgcatcaagggtaatggtcaaaagagtaacttctatactgtagaaattatcttcaaatcattttcctgtaccttcacaacactgagtcttacttgtattagttatctttccatgtcrtagatttcctgaaagccatagtttagaacaaacatttcttacctcccagtttctgtgggttacaaatccagcagtggcttagctgggtgatcactcatcaagttgcagtgaggatgctggcaggggttgcaggcatctgaaggcttgactgaggctagaggaaccacatccaagatggtgtgctcacgtggctgttggtgggaggcctcgttcctcctcstgtgggctgcctcctccagaggcttcctcagtgacctcacagcatggccactggcatcccctagagtgagccagatgggaactgcagtgtctcttatgaccacagctcagaagtcattgtcatttccacagtaacccatcgattccccaggtcaggtgtgaataccagcgggcaggagtcactggggggccattgtggaggccggctacacactgtcccttcccatttgtacagtctgttaggcgaaaattggtatcttcctgttttaacatacatttctttgataacgggtggttgatcgttttttttttaatttttttctgtactatcaaagtttttgacagtaagcttgtgtcacttttaatcttctaaaaaattatactactgagcaataaaagaagtgaatttttttgtttgtttgtttgtttgagacagagtctcactcggtcgccgaggctggagtgcagtagcaccatgttgactcactgcaacctccgtctcctgggttcaagcaattctcctgcctcagcctcctgagtagctgggattacaggcgtccaccaccacgcccggctaagttttatatttttagtacagacggggtttcaccatgttggccaggctggtcttgaactcctgacctcaggtgattcacctgcctcagcctcccaaagtgctgggattacaggcgtgagccaccgtgcccggcctagaagtgaatnnnnnnnnnnnnnnnnnnnnnnnnnnnnnnnnnnnnnnnnnnnnnnnnnnnnnnnnnnnnnnnnnnnnnnnnnnnnnnnnnnnnnnnnnnnnnnnnnnnnnnnnnnnnnnnnnnnnnnnnnnnnnnnnnnnnnnnnnnnnnnnnnnnnnnnnnnnnnnnnnnnnnnnnnnnnnnnnnnnnnnnnnnnnnnnnnnnnnnnnnnnnnnnnnnnnnnnnnnnnntgaaaccccatctctactaaaaatacaaaaattaggtgcaggtgcctgtaatccccagctaactgggaggctgaggcaggagaattgcttgaaccctgggaggcggagggtgcagtgagctgagatcgcaccactgcacaccagcctgggcaacagagcaagactccatctcaaaaaaaaaaaggatcactttctatatttcatgtaacatttctccctccctccctcacttcctcccctcctttccttctttcctttcctttctttcctttcttttcgacagggtctcactctgttgctcaggctggagtgcagtggtacgaacataggtcactgcagccttaaacctctgggctcaagtgatcgtcccatctcagcctcccaagcagctagggctacaggtatacaccaccacgcctggctagtttttaaatttttttttttttttccaagacagagtctcactctgtcacccaggctggagtgcagtggtgtgatctcagctcatggcagcctcaacctcctgagctcaggtgatcctcccacttcagtatcccgagtagataggactataggtaagcaccaccatgcttggctaatttttaaaaattttttttgtagagacgaggttttaccagttgtccaggctggtctcgaactcctgagctcaagcaacctgcccaccttggcctcccaaagcgctggcattacaggcatgagccaccctgcctagccttagttttaacattttttgtagagtctcactatcttacccaggctggtcttgaactcctaacctcatgtgatcttcctgccttaacctctcaaagagcaaggatgatagacatgaactacttctctcagcctatataacattcttgaaatggcagaattatagagctagagtatatgtaagtgattgcccggggtgggggtggtgtaggggtcagggatgactataaaggggcaacaggagggaagggtttggggtggtggaaatgtcctatatctcaattgtggyggttgcaggaaattccgtaaggtggcagagaacctcgcacgtgcatgtttcatccatgtctatttcctggaaccacacatatgcacattgcatccacgtctgtttcctggaaccacgcacacgcatgttgcatccacgtctgtttcctggaaccacacacgtgcacattgcatccatgtctatttcgtggaaccacgcacgtgcacgttgcatccacatctgtttcgtggaaccacacacgtgcaccttgcatccacgtctgtttcatggaaccacgcacgtgcacgttgcatccacgtgtgtttcgtggaaccacacacatgcacgttgcatccacatgtgtttcgtggaaccacgtacgtgcacgttgcatccacatctgtttcacggaatcacgcacatgcacgtcgcatccacgtctgtttcgtggaactacacacatgcatgttgcatccatttctgyttcctgtctttgctggtgtattctgtttatggaggatgtagccactggggaagctgggtgagggggacatgggacctctctgttctttctttgaaacttcttgtgaatctgtaattaaaaaaaaaaacccacaattataattaaaggattcttcagttaataaaagcattcccggtagaaaatcttatttatttatttattttgagacaggttcttgcactgttgctcaggctggaggtcagtggtgtgatcatggctcacgtgatcctttgcctcagcctcccaagtagctgggactacagacgtgtgccactatgcctggctaatttttacgtttttggtagagatggaggtctcactctgttgtcagggctggtcttgaactcctgggctcaagcagtcctcccacctcagcctcctaaagtgctgagatcacaggcatgagcccctgcaccgggcctaatagagaatctttacgcagcacatgttgttagtgtatatgttcggctgactcttgcagcctttcttctgtgtgaggttaagttgacctgtatcttgcttgtgttccctgcgtctgttttccctgggtgtagattaataacctgcattgaaacaggtgggatttttcattcagtgtctggcttgcaacttttctttttgcggtggtctgtgtacaatttaccctttttctcttcccaggggaaggcaaagaggaaattgtgaaggtgacttttgaagagctgaggcaagaagtggctttgtttgcagcagcaatgaggaaaatgggtgtgaagaaaggagatcgggttgttggtaagtattttgggtgctggtgatggtttgagggaggagaccaaggtagaatgggtgatgtgaaggtcaagacggctttcaaataagggggagtcatgtcatattacatggaaccttgtgggacttggactctacatgcaaggagaaaaaatagaccaaggaaaattgctgaaagaatatgctgctctgcgaaggcaggaatttgctttgctttgttccctgctttgtcccagagcctaaaacaattccaggaacatcaagggagtgcattcagtatggcttgctggagggatgaaggcgcattcaatatgggcttgctggagggatgaaggcgcattcagtatgggcttgctggagggatgaaggcccattcaatatgggcttgctggagggatgaaggcacattcaatacgggcttgctggagggaggaaggcgcatttaggagttagccctgcagtgaggcagggcaggaaagggcagtctgggcagcagaaacggcctgtgaaaggcctggaggctgctgaaggcagcaagcaggaggccacaggcctggaggcagcaagcaggaggcgtctacacgggcattaggagctctgtggggtggaacatggagggcaggaggtggggcaggtgcccaggtctgatcccaaaggcctcgtccactttcttccactctgcctagagtttcctgaggtgctggtccgttctgacgcccttcccgccttgagccataaagcaagggaagtaggacctaagagcaggccccatttggggattgttctggaaggagcaggggctggaatgtgtagaccttgaggcgtggtttgtcttcccactctgggccggggctctcctttgttccctgggatagcaactgaggatttcccacgaagaactgcttaggtatttttcttacaattttcctttcaccttgacttgtggaaaaaatgtaaaggcctgtgcatggacctgttctttaccccaaacatacttgttagttaattgagatgcaggtaggtgtgtacatggggatgagcaggtgcagacgaaggagatttatcttccagtgcagccctggtggttggggctcccgacctccctccctttcccctccatgtcatcggacaaggaccacagggggcgggtggcaggaaaagccactggggaggggcttgggctttggagccttggtgtttggcacgggtgtgcctctcccgagggaacttactgcaaattgccgttcagcttgtttgcaaagaggcaggaggagctgggcggccttgtcatctataagtgcagtaagtggctggaccaagaatcctgtgcgccaggccccactaccctgccccgcctcccccttgagtaacaggactggacatggagttagtgctcagcgtttggtagctgactaggaaggaatctagcgatgggcatgccggctgcctcctgtctcagcccttggcggcctgttctccttcagcctatcctcagggttcaccctggcttgtcggggttgcctcctcagaggccgttcctggttagccttcgaaaaatgcatcccactcttcctgcagctgctttcatcatagtcctcatggctcacctgaacctgcagggatcttggtgtgtttgtgtgcgtgtgttctccatactagaaggcaggggctttgttttctcctcactgctgtatcttcatagagagtgcctggcacctagcagcatctaagaagtgtttattgaatgaatgactatgggtgttgggctgatcatcagagcagactttttttttttttttttttctttttgagacagggtctcactctgttgcccaggctggactgcagtggcgtgatcatggctcaactgcagcctcgaactcctgggctcaagggatcctcctacctcagcctcctgagtagctgggactacaggcacgtgccaccatgcctggctaatttttgtatttttggtaaagacagggtcttgctatgttgtccaggctggtctcaaacttctgggctcaagagatcctcctgccgtggcctcctaaagtgttgggattacaggcatgagccactgygtctagtcacaaagcaggcatttttgaggctgaaacctcactttttgggttcttggtcgtctgatttaatctgtacacttttaaggtcttgcaaaggaatgcaaaatgttctgtccccagtttttttcttccctcccaattctcatttaaaaaaatcttttgaagcaaacgtttctgagtgaaggagagacaaaacaggttatattggggacagccaaggtccctgtgagctatgctttctttgaggagacgcctggccgcgatgccctggacccttcagaggtgagctggttccttgtgycccagccattttgtgggtctcagttggatacggatttgacctgatcatagttactaggatttgggactttgagttttccagaaaacactagaaaatgattaaaatggggttggatgctttagagtcttcaaaagatggagttaaagctgcgcctagctccgttttcctttgtctgtgaagtggttcccagggttggcgtctgatgtaccatgggagaagggccagctcctcctcacttgtcagccacatggagtcagatggttaagcagcctcccctgggcaccgagtcctgccctgaccctgggggtgacagtgttgagatgcttcagtttacgctcatagccaagtctcatcttcgctgcaaactcagccaacaccaaccatctgccggatgtgggtggaaccccatggtggtgtgacccctgcccsttggatgcttatggcccagcaggggagtcgcgtgtgaatccagacaaacagaaacacccactgcaggggggagaaggagggaaaaagggagccagctgactagggacccctgggggcacacctgggtagctgcacctcgctctgatgaggccttgttcatggcccttcgtctcgtgactgccttctgccctactgtacaggtcctttcctctggaatgtgtagagtgatctggttaattgatcatagtctctgtggccatgaggattccctgcctctgttgtcatgaaagccagcctgctaggagatggagggcctgaggacctctgccccttataggcttgaatatggctcttgacagtactgcttgtgttcttcattccctctcctctctatccatccaaccaaccatccaccagtccacctgtctgtgcagccatccatcaacccatccatctgtccatccatctatccatccttctctccacctacccatccatccgtcatcnnnnnnnnnnnnnnnnnnnnnnnnnnnnnnnnnnnnnnnnnnnnnnnnnnnnnnnnnnnnnnnnnnnnnnnnnnnnnnnnnnnnnnnnnnnnnnnnnnnnnnnnnnnnnnnnnnnnnnnnnnnnnnnnnnnnnnnnnnnnnnnnnnnnnnnnnnnnnnnnnnnnnnnnnnnnnnnnnnnnnnnnnnnnnnnnnnnnnnnnnnnnnnnnnnnnnnnnnnnnnnnnnnnnnnnnnnnnnnnnnnnnnnnnnnnnnnnnnnnnnnnnnnnnnnnnnnnnnnnnnnnnnnnnnnnnnnnnnnnnnnnnnnnnnnnntgccatccaactgtctatacattcttctctctacctacccattcacccatcttccatctctccatccactcatctatccttcactcattatccattcatccatccatcttccattcatcatccctcatacatcatccatccgtctatacattcttctctctgcctacccattcacccatcatccatctctccatccatttatctatcctccatctgtcatccgtccattcattcatccatccatcctccattcatcattcctcatccatcatccatccatccatccatctgccagccggcaaatatatgaggacccttgatgtgcagggcatggtaaaaggcatttggtaaagcaaagaacaagacaggcaaagtcccagccctcatgtgagaaccagatactagacggccagttacacaggtgattattcatttgcagttatgctaagtttggtgaaggagaaatacagtgtgctttgcaggtaactagttgggggacctgagttcaccgggttgggggcaagacagccttggagaaggctgctctgaggaagtttcatttgagtgaagagctgcaggatgagcgcacactgagtggagactgctggtgtgcgtggaggagtgttcagcagatcagacagctgtgcaaaggcaggaggtgattaggacaactgaggagtcggaagaaggctgctgtgaccagatcccagggagggatggggagcagagggaggagagcccacggggtcattgtcatcagagcatggagaatggattgcagggggatggtggggagttgacaggctggcagcaggcgattcatctgggcgggggctggtggtcaggatctcaggcagttcaaggccagcccccttcccactctgaccttggctctcagagaaaccttttggacatctgctacctcccatacaccctgaacccaaggcttcttcctatgttttctccacaggttatttacccaacagtgagcacgctgtcgaggcgatgctggctgcggcaagcattggtgccatctggagctccacgtccccggacttcggtgtgaatgtgagtcaggrtctgtgacagagggggcaccccttgccctgtgagcatcctgggcaggggctgcatgggctgaattcccaggggagccggacagcagcgtgagcccagcgggaggaggtggcgttgcagctgcctctatggggaaagaagccagaaggacttgcgtctggttcttcctttcaagcagtcctgacgttcccccactcctcgccgtgttcatcgaagacgtgggcaggtggcgtatgcagcacccagtgttgttaaggtctagtaaggtcgagccctgtcttcctcacctgggatttagtgaccacgtgaggtttgctaagtgtatgtcctctgaagagagttctctagatttttgttctcaaagtcctgcctgcagaagttccccaggacctccctgtgttggtttctgctgttaccagccccttcctctggacccgtactgtgtgggtgtgcactccgggagggtggcctctctgtccccaaaccaccccagggtgtgtccagctgcccagagtggcccaggcagggccggaagcatgtgctgatccccactggggccccccagcctataggtctttccacggggcaaatgaagcagccgcagagcgggtcttcctggggcccccactccccagccagggccctctcctggctgcagagccttgagcgtcagggaccttcaggagccatgagaacctgttacaggacatgcagcatccgtgtccctgaccgctcctcctggtgccagctgcctctgttctgggccaggccctgtgccgtccgtcagtcagcagcaccagctgcaggtgtggccgctggccctttaaaacccagtgcccggagttggtgtctgtgcttgtccacaggtgaggcttttgggtgtgagcttagaaatcatgtctacttagaggcttgctttttcagtaaggttttggaggaggagtgtcctttctccacaccgtgggaggagagatcagacacaggcccagaggagtgagactggccagccgtgcatcaggccgcagcaccagctgggctgatgatggagccctgctgggttcagggagggcgtggccaccttgtagatctgtactgtgtggctggatggccgtgccctgccttctggaactttcctgtgttctttcccaggccatctcaccccaggacctccccaggtcagcagggactgacctgagacagaaactcaacctgtggcctctcctgtccctagggccctctgtgggggctgcctgggctgctggggccaatggtgtccttgtgggagggtctggaggggtggagttccggactggacactcagacccctcagccgaccttgagccaggctgtccagggcagagggaagggccccagggtgagacggcaggatggcagggtgtgctcaaggccgggcaggctggctgcctctgctccatgtggcttccttgatcagtgtccatgggcaagtgccctggtgtccccagagggagaatggcagcagtgttagtgcaactgcacagatggcaggagccacgtttgtgtggagccggggacagggtgtgaccctccaggccagcccagtaagtgttagctactgtttgaactagtcgggagatgggtgtgttttgagttaaattatgactaaccttttgtaaaygggttgtgagaggctgggagagccgtgtgtggcaggggagtgatcatggcctcccagagctggagtgtagcctcctccccctggagaggtgatatcagagcaactggaatcggcctttggtggtttgtctgaggccagggggtggagagagggagagcctctgactctgcatggctgcagtggcagggctggaccccagcctgtctcacagctgcatccagcctcgctgggtcattgtcctgtgcacgtcactccccgctgactccagtccggcaggatctgcccatcctggaaggactcaggagggatgcatggctctgtagcaaacatggtctcggggacactgcttcctggccggggttggtccagggttttctggaatcaccgcctccccgagccacctctggagtgggaagtgctggccgagctgctgggcgcactagatggcagcatggctctgctcaccccatggctcccgcagcttctgggaagtgaacagtcccaggccctgcggctacgtctcaggtcagaaaacagggccacctgccctcctgctgagatgcttctctctgtcgctcattttgctagtgtccgaggtatagactccatcctgccggagacgggggtgtgtgtgacgcacgttactcgcactcgaactgagatccagccggttggcagggagtctgtcggcatttggtggcttcgtggcaggcattattgggcagcactcctggccgtgtgcacccagcgtgggagggcctgcgtggatgccatgttcatagcgcttggtcccacagacacctggacacccgctgtcggagctgagtaaggacctggcacaggtcgactgcgcgaaagcctctgctcaccctctatttaccatccttgttcaggggctaaaactaacagggatgaattcctggagttgctgatgaggtggggctggaactgagccaaggctgatgggttctgggctcgtggacagttcctgcatcggtttgcagatctctacttaaaaaagagatccygtttttaatttccatcatcaccatgttaaacttcagactgtgccccattttcagtaaggggcgctcttcagaaactgcaatgaagcgtgaatgtcttccctttggaatcatgttttctcttgctttgaaattatatttctttgaatctcagagaatatcgtaaagggaaattgccactctcctacaaatcctgtgttgacttctggtctctgttgatggagtcgcaccgttggactcgtgggttcacacgcctgtccactgagagctcctcggctggctgtgctgggtgctgaagggaccctctctgctgcagagccacagaccgcagtgggctgtccagggagtgctggggcatccgtctttactcgatgacactgggggaacgcgtttctggcctccgtcactcccctgtgctttacttctacccattccatgctctctcccaccactgcccacctccttctgcctgctctctgctggctgcctgggcatctcagcttgccttactaatgcttttgggctcgaagggcatcgccaggttggggaagtgctctgttctaagggttcccaacctttccagccccagcaagatctctaggtcctgagtcttttgatggctttgggttttttgtttcactgtttacctttgagcctttgccattttcagagatgtcagggaaggccaccctctgatccctgcacaccagagagcccagcctgtagcctgcaggccttgtcctcctgaagtgccatcakgtggccytgtgtgtgtgtgtgtgtgtgtgtgtgtgtgtgtgtgtgtgtctgtgtgtgtaaataggacagccattctcgctcgctctgggtggctgtcaccatgattcaacaccggctgttggtttcaatgcttgattggttgctaagcaccgtattcrggtcagacacatgttcataggtgtgtttgttttgttgcaacatgaaagctgtcctcgagcagctctcctgggccaggacaggctgacagctggttttggatgctcgagatcttgatccctgctggtccagccaggaaaacttcagctgtgtcagaggacccctgagtcttttcatggggctaggggccagacctctgattcagaaacactcgtctttgtagcctgatcactgtcactgtgcctggggtcctgtggtatttgagccccagatcactggcaggctcagtcctttcaccttgagatcctggtcaccctgtactgggctggttctctgagatcccagtttccttgtggaaattctctgccgccctccggggctctcccaggctggctctctctgtttcttccctggcctcaggcttcctggcaggtcttcctctgggccccactccayctgcccctgggtgttgatctctatgtcctctgttcagaacagcctcttctccctcccgcctacyctgtgggacctgcttattcttgacgctgggctttggagatgctgactccagcggctttctgggtttcctcctcttcctcctgattcagtctgctgcagtatcttagcacccgaatctgttctgctgttttgattttctgttccatgtacggtattagtgttttctgagtggagccagcacagtggtgaggagcaccagcacccacatcagacaagccaggctgcagcccagccatgcctctggccagttgtgaggctttgggcaagtcactcaccccgttcctgccttatcagggttagggagtggatactattgcccctctttttttctgagacggagtctcactctgtctcccaagctggagtgcagtggcgcgatctcggctcactgcaagctccacctcctgggttcacaccattctcctgccttagcctcccaagtagctgggactacaggcgcctgccaccatatccagctaattttttgtatttttagtagagacggggtttcaccatgttagccaggctggtctcgatctcctgacctcgtgatgcaaagtgctgggattacaggcatgagccactgtgcccagccttattgcccctctcttaaggctgtgaagggcagtaagtgcttctaatgagctcagactggggcctggcacatagtaagcattcagtaaatgctcaatatgttttaactggcaatcatttcttccccactaaaccaagaactctcggtccatcttagaatcccgggcacagagagggcaccagtgtagacatgccatttgtggtttgtgtgttcgccacagccaaggtctggacaggccccttacctgtgggtgagggagcttgggtgtcaggagtgttgggactcactttgcataaggggtggctggggctggagggagccaggtgcagggataccttgtccagggccatgtggccaggaaagggaggagtaaggaccatggccttagagtaggttgaatgtgttaccttgatatttgcatagagagcgtcagaagtaaacagagggacacccaagtcccagcaggacatgaaagagtctgagaaatcgctgtgcatgcacttagttaagtggacgtggtgtctttccaggaagggcaggcacttgctctcggggggtgcatctgggcactgagaatggggaagaggggcttgcctggctgggggtgagcttctgtttagatgccttgttccagtgccagtgcccaggcgctggtctagggggtgaagacttctctcctggatgcttctgtcccagtctcctgcccatcagaagtggctggggaggaggaaggggtggcattctcagtccaggagggtttggtgccaggaagggccatttctgggcattctgttcttctgatggatttgggcagggtgtatgttagcatcagacgcaaggagggctagccctggtggcctgcggagtaaatgctggtgggaccggggtgccacctgcctgcagactcggcctgttgctgctggactcctggggggcaccattttggggctttctgcaaccacctctgtgtagcagtttagagcagaagaagaagtagtaggaaatagtctttgtccaccaaggacgtcactgaggaaggggtaccgggggtacccttgaaatggaggagggaggaggtggacggtgaccgaaggcctgatgtcctgaggccaggggccaagtccctgttacctgtatgtcccatgcacttttttaaactgatgctgaagttggccaatgttttacttaaaaaaaaaaaaaaaaagtgcgttggggcagctccaagggcgtctctgtaataatgtcacagtcattcccttgtcccccacccgcccgccgtgaactttgctgaggggcagaggaagtggcgggagtagagagaagcttggcttggtctgcgcctcctcccgtgccttccgcagtggccaaggtgttcagctggaggaagacccctccttcctgtcattactgtgcatcctgagagcacttcagccttccttccccctgtccagtcagcactggcggggctgccagaagttctcaagactcagtgagccccagaggagctcacaagtccccagggggagccccatctcagtaacccccgccactacaaccctgccaaaccaggagctcgggctgtgcgccacaccctttcaytcccttccctaccgttggctgttcttgccgcctctccactgtcctccttcatacgtttgattgagcggttcctcggttcctctgtgaccccggctaggcactgccatctctcacgcgtgccgtcgtagtagcttccgaccagtctcatttctgcttctctctactgtacacctttttatctttttcttttctttcttttttaactttcatcacctttctactatccagtacacaccctttaacaagtggatccgaaccagtgtttgtttctgtctctctcccagattaaatattctttagagggctgggctgggtagcttacacctgtaatcccagcactttgggaggcagaggcggatggatcacttgaatcccggagtttgagagcagcctgggcaacatggcaaaactccatctctacaaaaaagaaataacttagctgggtgtggtggcacacagcctgatcctgagcccgggaggttgagtctgagtgagctgtgatctgtctactgtactctagcctgggtgacagggcagaaccctgtctaaaaaaaaaaaaatccttcagtgactttctcattttcttttgttctgtttttctcattaccttttttttttttttctgagacagagtctcagtctgtcacccaggctggagtgcagtggcatgatctcagctcactgcaacctctgcctcccaggttcaagtcattctcctgcctcagccttccaagtagctgagactacaggcgtgcgccaccacgcctggccaatttttgtatttttagtagagatggggtttcaccatgttggccaggctggtcttgaactcctgatcctcaagtgatccacccgccttggcctcccagtgttgggtgtacaggcgtgagccaccgctcctggccctcattaccttttcaaactgtattgctggggtttaacaccactatttattttgctggattgagttatatgtggccaccttgcctaactgatttgttctagtggtttttctggtgactttcacagattttgtgtgcagctgttcccattgtgtgtagggggcaaactgtttctagttcccaccccgggacgtaggtgggggtgttcggcacaggtgcaggtgggctgggggtgggcgtcttgcatgtccttttctcactggacatcttatcttttaccaagtgcgaaatgtgccgtcaggtgtctgccagataccttttgtcagtgaggaagtatccttcagtttccagctgattaaagcatgggtttggaaagcatgttgccttttatcagaagcttccaagataatcatgcgatttccccctctgttagcctgttgctgtagtcgataacattggtctgtaatctctctctcttttggtttgtgtgtttcctgtctttctccgacttctgtaatggtttacgcagaagggatgctgtagcttacagagacttggtggtgctcgcctgcagagctgcccaccctggtgtccctggaggaggtagacctttgtcacttcagctgtggtgctgctttttgaataaattttggtaatttttattttcttgagaagtcatccattctatctggatttcaaaatctattaaacattgttttctggctcatgaatcttttattctgtagtcaagtgtgatttctaattttgagaggccacatgcttcagcttagtcacctgcaatatgagggtgataaggccacccatgtccaaggtcattctgagcagtaaatgagcgaatatcggtccagtgcttagggcagcacctgacacagagtaagtgttctacaagggataactggaaatgttaggtttccttttttgtttgtttgtttgtttgagatggagtctcgctctatcaccgaggccgcatgatctcagctcactgcaacctctgcctcccgggctcaagcgattctcctgcctcagcctcccaagtagcagggattataagcatgggccaccgtgtctggctaatttttctatttttagtagagatggggtttctcaattttggttaggctggtctcaaactcctgacctcaagtgatctgccggcctcagcctcccaaagtgctgggattacaggcgtgagccactgtgcccggccgaaatgcattttttcttcttgaccagatttttcaagaagcttacttttattttattttaagacagggtctttctctgttgcccaggctggagtacagtgctgcgaacacagttcactgcagcctcgagctcctgggctcaagcaatcctccccactcagcctcccacgtagctgggattacaggtgccctgctaatttaataaaataattcttttgtagctgtccaagctcgtctcccaaagtgttgggattacaggcgcgagccaccatgcctgctaagaagcttatgttattggttgttttggaaaaatgatttttggttttgctggtcaagtccatcattagtttttccttatggctttaattccttctctctttttctttccctggctacctaattttgagtgtagtttactgaaaacattggaaatggaaaacaataacatttgcaattgttttcctgttgtgtttctgatagatcgtatgttctggggagtgggaaccctgtctgtctggttccctggcacggtgcctggcacctagcacatggaataaacaaatgctttctactccctactcttctctgttaattcaccttctagttggggaaattggacagtgttgagtaaactctgaatcctagaactcttagcacagaaattctcaaattttatcacacctcaggatcatctggatggctggtgagaacagattgctgggtctcctgcagagtgtccgattcattaggtctggggccccaggtgaggctgactggctgcctgggggaccacactttgagctgcccagcctccctcccacaacactctgccccttagactcccccagagtcagcgtttctgcttccctgctaagagtcaccagggagctctgaaaacaaatgcccgccgctcctgacccgttaattagttatcctaatgagcttaattaacttaatagtcccactgcaggcggtgctaccaggcagccagggtggagagcctgtgctgtgaagtccttactcacaggttctggggccactgtatgtgccctgggggtagccctaggtgttggtcttgaactgcttgcatcaggctcatgtgcgagggaatagcagccatctgggcgatggctacccatgtttgcagatggcagtctcttaacacagtgtaaccttgaggatggccaggagggaagtgaatagaagccttgtctgagagtgctttaatctgttactaacattaataatctgttaataattaataatctggactaacactcagggagtgtcagtgaatgttatgagttccaagaacaagcccatgcctgcatggaaggaatcccctgtttcaggaaagcagtgcccttggctggactgcagactccacgtgcagtacagaccagagacatgggtgtggtgatcctgccttttaagatggggctcattaactagtgtatgcacgtgtaggcttatgccattggttggcataaatgcactgcttggaggattcaggttcctctttaattgaagattccgagaaccaaaatatggggccactttgctttgctgttgtggcctctttggaagatgaatcttcttttgtatacactagcagagctgtgctaacaggctctttctgtaaggtggggaatctttttggtagtgtaaacacacactctatactcttcatatttcagtatatgtctgtaaatacttctggtatttcttgatattgatgccttccttggcatagtggttgttctcagatataagttgtgctttgatcaacttttttttttttttttttttttgagatggagtctcactctgtcgcccagggtggagtgcagtggcactatcttggttcactgcaacctctgcctcctgggttcaagcgattctcctgcattagcctcccgagtagctgggactacaggcacgtgccaccatgcctgggtaatttttgtatttttagtagagatgggatttcaccatgttggtcaggctggtcttgaactcctgacctcatgatccgcccacctcagcctcccaaagtgctgggattacaggtgtaagccaccatgcytgcctttttaaaaaaaaaaacaaaaaaaaaamcagaatcttgctcggttgcccaggctggagtgcaatggcacgatctcggctcactgcagagcgattctcctgcgtcagcctctgaagtagctggggccacaggcatgtgccaccatgcctggctaatttttgtatttttagtagagatggggtttcaccatattggccagctggtcttgaactcctgacctcaagtgattcacctgcctcggcctctcaaagtgcttggattacaggtgtgagccagcgcgcccggcctcatcgactttctttattggctacgggtgctggggacacagggacctggtcatgcactgatgatgatgccctttctctcccgtgaaatgcagtggtcctattggctactgaaggtttttgccattttttyttttagagacagggtctcactcgtgcccaggctggaatgcagtggtgcaagcatagctcactccaaccttgaactcctgggctcaagcaatcctcccacctcagcctccagagtagctgggactacaggcacccaccaccatgcctgctggtttttgccttttggatgatcaatgatgactttttcctcctgctttcagggtgtgctggaccggttttctcaaattcagccaaagctcatcttctctgtggargctgttgtctataatggcaaagagcacaaccacatggaaaagctgcagcaggtggttaaaggtgtgtggcccttccggctcccagccggcatggctgggtgtgtgtgtgggtacataagagtctgccaggagtcaatctgggtagtctctgccccagattgtgttatattctctgccccagattgtgttatattttgtggaaaaaaaaaaaagcagccaagcatctttgtcctgtaaccttgtgttttctcctctcgctccttccaggcctaccagacttgaagaaagtggtggtgattccttatgtgtcctccagagagaacatagacctttcaaagattccaaacaggtaatgtaccgcattctgacccacaggtccgtgtggacccactggagctcctgcggggaagtaggcctctggatcttcyacttggggtcactcagagaattttagaagtggaggaggttttagttaaaagcatcattttgtagataagrcacctgaggccccagagtgaatcccccaaggccacatagtgaatgagtggcggaagagagacrgtcccaggcaccctcactcttccaatctggtgtcccttatgtagggggctctgatggggccaagcccaccttcctagattggccacagaaattttgcattggaaatcatgtttacatgtatgtgcacatggtgcatgcactgcacacgcatgcacacgacaaggmacacatatctacacgtgtacacatgcatgtgcatttacacacgtgcatacgtgcacaggtgcacatgcatgtgtacatgtgtatgtatggctatgcatacataaacactcgtatatgtatttttcaccttttaggacatgcgtgtgttccccattgctgatgacatcttccttggcttttctgacatttgtaraagaataagccacatgttttgtgtacccaataggattgtaagaatcttcatttttggccaggcatggtggctcacgcctgtaatcccagcactttgggaggccgaggcaggcggatcacgaggtcaggagatcgagaccatcctggctaacacggtgaaaccctgtctctactagaaatacaaaaaattagccaggtgtggtggcgggcacctgtagtcccagctactcgggaggctgaggcaggagaatggcgtgaatccgggaggaggagcttgcagtgagccaagatagcgccactgcactccagcctgggcaaaaaagcgaaactccgtctcaaaaaaaaaaaaaaaaaaaaaaaaaaaaaaaaggaatcttcatttggaatagagattaaggaaatggattatggattatggtttagtcaaagctgaattcttcccaaagttcttggagttataccttcctttaatttttcttgaaacagttgtggggagagggttctgagctcaggcgtttacccccacggggtaagctttcccttgagccttgggtcggggccactggagggcaccttgtacgtggctccttgaggcctggtgaggaggggctatgtaaacatggcagggtgtcttcataccagccacggggaccagaggtggaagagaggaggagatggcggagccctttttgttccagcaagtggtagtcggtgcatggcttgttaccgtctgtcagggtgttctcaggggcaccacaaggtacaaatcatgtgtcctgtcctccgggagttgcartctagttggagaggtgagacccacctgcagggaggttgagctgtgaccactaggagtgggagggacaggatgtgcccaggggttgacagcagggcctgggtgcttccctgtaggatctggggaggtggcatctgggggtggctttgaggtatgagcagggtctggggacagctgtgtgtgcagggcatattctggagcctggagggtgctgcaggcaaagtggtggcttggcgagggccatggtctccagatccgacttgtcaggttcagctctcagctgtgtgaccctgtgccagtaacctctctgagccttgtgtctccatctgtaaaatggagatgaggtggtacctgtattaggtcgttcttgccttgctataaagaaatacctgagactgggtaatttataagaaaagaggtttaattggcttatggttctgcaggctgtgcgagaggcatggtgccagcatctgcttctggggaggctgtatggagcttgtgatcatggcggaagggaagtggagcgggcactttacatgggaaagcaggagtggagggggtcggggggcggggtgccacacacttttcaatgaccagctcttgtgtgaactcagagtgagaacccactcatcaccaaggagatggtccctgccattcacgaggaatccacccttgtgatgcaaacacctcccaccaggccccacctgcagattggaggttacatttcaacacgagatgagggtggggacaaacatccacactcttatcagcaccttcctctcaggctggctgggaggattaaataagctgctgctctgcaaagcgtgcacagtcagctctcagtgatcctgcctgtcattgtgcggccgcggtgggctctgtcgcctgaagcacctgagtcagggtgggcagattcttcacaggcaggcccgggtgcctgtcccatggactgtgggaccctgccgaccttaataaattataaccaggtgccagagcgctggctttctttcatgcaacctcggattttgtgccccaggtgtatggatggaggccatgatgcatggaggctaggaggaaaaccagacagggtttaccagccccctggttggcctggctattttttctgaataatattcatcagcagttgatataaaatgagggcatccagcagaatcatgttagccacttcatttagcccgacaccccaggggctggactcccactgcagtccatcctttgattgtggatgccacagataaagcagaaacgggtaygtgcccatctgtggagaattgacggggccgggggagccaccctgtgggcttttcattcttagaagagctttaacaaaggtaatcattatgtactgtgatttatgggccatttgacagaaaaggcttttctctgtgtgaagtatctgattagatccggcactttataatgggattcttataggaggtagaggtgggatggggttttcattggctgtaaagttccacagtgaatagttttcctgacatgctggagcagacggctttgtttgtttcttgcttagagttgaattattttggatgccctttttaaaccaccatgtcttccccaggagaaacctttatatttaaggatgccttctcatgcaagacagcaaaattcttcattttagtctgtatggcatttgtatttcagagtaattatccctagcaaatggctgcaggctgcgtttaactgattcccacctccttccctgagagaaagtccatttgtcagttgagtatagggccaatgttttgagatggatgttgctgctgaattcaaaatagaaaaccaccttttcccaagatggcttgtggcttctgcggctgtttctagtgcagaaaacaaatctcctgtttgtgtcgcccctttggtggttcttggccacctacaacaatgctgcctgtcagctttgggggtaagcctaggcacacttcctgggtgacagtcaatagctgggattaattttatttgttcttgcacagatatttgtatcttgctattgtaaacctcaggatctagtaagttagtgacaacacatgatatttgctgagcggttctctgtcattgagctgtagtttaggaaattgaccccacatctgtaggaagggctcattaatctagcatctcctcctctcccttctccccacgggggaagcatcttacttcagacccacttggtgagtgcttccttttgggcaatcattggaaacaaagcgtttgctaatyaggtgatcaatagcaaacaaaggacatgggctcagaagacttcaaggccatttccaaagcctccttcagccgtgttggtacacacatggcttgttcattgtaagtgatccttctccgtggtggttatgaaaacacttaaaatattctctaaaagacagcccttggccctgtcagcagtgctgattaagcaacttgaaaccttcactcgttcgatgagttttccttcaattagcytgaatctctgagatctaactgcctcccctggtcccaggaagtttccaaatctggycaccgtccccctggmatcctggcttttctrggggtagaaacagagggaagtgcacgggtggaatcagtgggtccggtccagcattctgggacgttcatggcgtgtttccctgcgtttcggcccacagtgtgtttctggatgactttcttgccaccggcaccagtgagcaggccccgcagctggagttcgagcagctgcccttcagccacccactgttcatcatgttctcatcgggcaccacgggcgcacccaagtgcatggtgcattccgctggggtaggtctctggggaaggctctgcagggcytcctgttgtctgtttgcttcaacagggcctcccagctgatgatggcagtgttggagttgtcaaactgcaccccatccccggagagtccaacgtgcagcttctctccaagtggggtgctgcacggagatccggcactgggcccagggcagtggagtgctgccacttcaaaggctgggatggcacctaacaccatggcgataggcttggaggtcactgtacagcgcggtgtgccttgggggtggggggtgcgctggctgaaccagctactttcaccctgcaggtctggaccacctgggggattgtgaactcaataggtgggccctgccagyattttaaaaagaacgaatcagaatagacaagaatagataatattagcgcagtgccagacgcaatggcccacacctataaccccagcactttgggaacctgaggtgggcagattgctttgagcccaggagtttgagaccagcctggccaatatagcaaaaccccatttttactaaaaaatacaaaaattaactggacgtggtggcacatgcctgtagtctgagctactcgggaggctgaagtgggacaattgcctgaacccagggggcggaggttgcagtgagctgagatcatgccactgcactccacctggcaacagagccagactctgtctcaaaaaataaaaataaaataaaatattagcacagaataggctcataagaggtatgggtggtgttctgtgaagctgtcattacatggagcggaatgtgtgcacgtgctgggggcgttgtaaaacttatgtctgaccgtgggttgtggtaaaatatttgaaagccactggttaggttattagaaggctaggttactaggttattaggttattattagagtctaattaactgagaaagagcctgcccgtgctgcgagtctgttagggctgccataacgaaacaccacaggctgtgtggaacaccaaggtgccgcacagttgctcttgtctgaggcctctctccttggcttgtggacggccgccttcttgctctgtcctcgtgtgatctttcacgtgacaccgctggtgtctctgtatgggtccaagcttcttctcctgaggaccccagtcagatcggatctgggcctgctctgacagcctcatttaaactctgtcaccttttaaaggcccatttagtcacattctgagatactaggtattgggcttcaacatacgaattttgggggtacacagttcagcccatgacacatgcttttaatttttcttatttcaccgaaagtctaactttattaaagcacctgaaataatatgttactactatgcaatagaatgtatatgtataggttagtgacttttaacctgttattttattttattttatttttttttgagatggagtcttgatctgtcgcccagactggagtgcagtggtgtaatcttggctcactgcaacctctgcctcctgggcttaagcartcctcccctctcagtctcccatgtagctgggattataggygtgtgccgctatgccctactcgtttttttgtttgttttgtatttttgtggctttttttttttttttttaagaccgggttttggcatgttacccaagctggactcaaacccctaggctcatatattccacctgccttggcctcccaaagtgctgggattacagatgtgagccacccatgctcaaccaaaccttttatttttgaaaaaaataaaatacctagagaacctctagaaaagctgcaagaatagtaagctccatggtacccttcagctgaattcttccattgttgacattctgtctttaacattttcaacgtccttttgttttgttttgttttgagatagtttctcactttgttgtccaggctggagtgcagtggcgtgatcatggctcactgcaacctctacctcctgggcccaagcgatcctcccacctcagtcttccaagtaccttggactacaggcacgtgctacttttttgtttttgtagagatggggtcttgctatgttccccaggctggtcatgaactcttgggctcaagtgatcctctcgccttggcctcctgagtgctggaattacaggcatgagccactgtgcctgatgtcaacatccatttttaacacgtcctaaaagcctctttcgccttctttctctctcagcgtatatacacatgttgttattttgctttttgttgaaccagttgagagtacgttggagccacaatgatctttcactctttaatatttcagcacgtatctcccaagaacaggagcgttctcttacagaagagtgtgtagcgcgctcatcaaattcaggaaggttggcgttggtgcagtgccgccccctcatctatggtccacagtcaggtcgccagttccccagtagcgtcctagcagctcaggcggtggcacgtcagtcgtcaggtctcctgcatgtctggagcagctccttgggcttcttcgtcttccgtgacactgacattttcaaagagcccaggctcctggtttggcagaatggctctgtttgggtatgtctggtgtctcctcgtggttaggtccaggtgatgcagctttggtgggaacacgctggaaatgatgtggtgttcttctccgtgcatctatcggggggatacaacgttagtgtatttcatttctgtgatttcactaggccactcttcagaaatgaaatgcctgggtcaatgtggtgctttgctttttttttttttgaggtggagtcccggcactgtcacctgggctggagtgcagtggctcaatgttggctcactgcaacctctgcctcccgggttcaagcgattcttgtgcctcagcctcctgagtagctgggattataggcgcccgcgaccacggccggctaagtttgtgtgtgtgtgtgtgtgtgtgtgtgtgtgtgtgtgtgtttagtagagacggggtttcactatgttggccaggctggtctccaactcctgacctcgtgatccaccttccttggcctcccaaagtgctgggattacaggcctgagccgtcacgcccagctgaatgtagtgcttttctaataactgctatcacatcttacttcctctgatcctcttctgcccctgggcttcctgactcggttgaatccttaccttgcactcagacttctcctgggccggtctgtgggagtcaggatgcttgcgacgccgtggctcccaccctcacgctgctctaggctctcctctgggccagctcttcagctctccccatagctcatttccccatttccctatcagttggctcagcctatagggaggagaaaaatccactgtatcttggtcaaaccttctgatcaccactttttcccccaaactcagaagaagagaattctccaagtggagaaacctttgcttgataagacagtggcatttgaaaaggaaatatacaagttcccttattctagctcacttagcttttatagacgttccctctacctagaagcagtttgaatcccttccataaaaaggaaatatttacattggaatcatttgaaagccctattaggctttttacagagtattttcatcagaatgtggaaaggagccaatgtggtttcatcatcacctagatctagattcactgaaggtcttgttgcaggctgtgaaatagattgaaggtccaagagcctgtccacgcacagcaggttaattctcaagaaacccaggggtgggagcgaggggctgaggtcaggggtggggggcaaaggccttatttctagcagttacactggctcaacggagttgcctctttgcaggcagcgagctgtcctgtcgctcaaatcgtctgattttatgaaagccagtcggggtgtgttcacagactaaggtgtagttggaatcgcgttttccctgtgaaagggcagccctgttgcacctgggtgcaggtctgtgagtgagccaccgagatgagcatttttagaaatcttgcagacaagggtcggggcgggggcgggtgtatgtggccaaacaagacattttaggaaaaatggaaatgtataactgtacttttatttttagtgctctttgcatagtgcatgtcatttttttaagaggagcataaaaatgtattagatataatatagcttgctcataaaatgatcatgcctggtatatttagagtgtggaaaaatcaggaaaaattatatgtactccatcttcactgggctcttgcatctctggagaagtgactaagcatcttgctcgttctctagagttatcttgactacaaacttgaaaacagtgaggcaacataggccagagtcctagggctgctcgtaatcttcccaattgagtagggtggggttctgttactggtttgttggtttgtgcttcctaagtctgtgaaaggtgtcagaaagtggctcccctttctcttcctttacatgaaattactctcctgcgctgagacccaggaaactgtttatgctgccttaccctcagggaaagcattcagacttgaccataaatatttaagaattaagggaaaaacgatggatgtaacttgttaagagtcacacagagaaattcttgagagaggaggagggcccatcatttgttttgtgccatctgagagaatgaggctaatgaaccactgaacgaaggtgggctcctatctctgctgtgctctcagcagaccacgtgagcgaagctgtagagttaagtgctgattttaagtgaaaaagaaagtgggagagggatttgccacaggctcctagaatccgagttccctgtcctttaagtggattcgtggaaagatttagttcatggagacagttcctgaaaagtttgtcacccccaaattattgcctacccactgtgcaggagaacagattgtcatgtaactttctaagaagcttttgagtgcctggggaagggaagggaaggggaggctgtctcttgaccctgactggggattcttgttaaactccaccctgcagctcagcttccagagcccggaggcagccttgggggactgcagaaaagggcagtgtattagtctgttttcatgctgctgataaagacatactgagggctgggtgtggtggctcatgcttgtaatcccagcattttgggaggccaaggtgggcagatcacaaggtaaagagatcgagaccagcctggccaacatggtgaaaccctgtctctcctgaaactaaaaaaaattagctgggcatggtggtgtgtgcctgtagtcccagctacttgggaggctgaggcaggagaatcacttgaacccaggaggtggaggttgcagtgagccgagatcacaccactgcgctccagcctggtgacagagcgagactctgtctcaaaaaaaaaaaaagacatactgagactgggcaatttataagagaaaggtttaatggacttaacagttctacgtggctggggaggcctcacaatcatggcagaaggcaaggaggagcaagtcacatcttacatggatggcagcaggcaaagagagagaatgagaaccaaatgaaatgggcttccccttatcaaaccatcagatcgcatgagacttatttgctaccatgagaatagtatgggagaaactgcccccgtgagtcaattatctcccaccttgtccctcccacaacatgtgggaattatgggaatacaattcaagatgagatttggatgcagacttggagccaaaccatatcaggcagcgtctgcctgtctgcctggcagtctctggaagcttcagttgctgctgtttgtgggctgggtggcggttgcctgtttgggatggactccggaataggagttttggctcctgaatgggagcctgtgttggataggattgttcctggtgagctcttaaagggatcatctcctgcaactggcttttggaagcttttcccttgggtataatgagggccttcatggctgggttttaatatataagtccttgcttcagccttctaggccctccacaaccaggagcacctttgtgatgagccagaggctcacatctgtggaccagactgaagggcagtggtcactgaaggggcagcatccccgtctgtcctcaggatcttgtacgagatccgttggaaagacaggaaaaccgaggctgggagcgtggagtgacgggtgcaggggccactggctctgctctctgggttgtgcctggcgatgggaagcttcctctcctccctgcccctgccagacacacagagttgcttggaacaagtgtgttctgggcagtggaagattatatagttgtaaacagacatgagggagctcccggcatgccaaggaagagctcccaggtgtgctgttaggtggaaaaggcaaagtgcgggacactgtgtcacaatgaacaaaatggcattaataaatatgtgccggcatcagcaagaaagacgttcacaggaaactgctaggaccggctgcctcttgggagaactgggtacaggacagggagagaggacggcttttcatagtatctgcttcagagttctggaccgtgcaaatacattgcctattaagcaccaaaattaaaaggtaatagggcatagtgggtgggagggagcggttctgcttgggtgttttagccagaagcagggtcttgtgctgtcccctcagctgaggcattcctgaaatccgatcttgaacgtgagtcccagctacagtcttgctctgttgccagtgccccacccccaccacatccccctcaccccsctgttccctgtccctcatgaggctgggctagcacccgtcctggaagggttaggccctggtcttttgctcgttgactctcttctcaggaagggtcacttctcttctgcctgaagctggtgggcctccgtggtgcccttgatgtcctgggcaccgagagcttgagggcagacaggagtgtcagggttttcctctccagactacaagccacgctcagctcttgggggagagggacatgggggcatggctcatcacaggggagtggggggaaccctccaaagtctgcttctcccaggaaagaaaatggggatctgctggggcttcttcctggcagcgtctgagcagcgcgtgggccaggtaccagattcctggtactgtatgcctaacagagagcacccgctcccccgtgtctcccctgcagggcaccctcatccagcatctgaaggagcacctgctgcacggcaacatgaccagcagtgacatcctcctgtgctacaccacggtaagggcttccccaggtgctggcctgtgctataccacaataggggcttccctgggtgccagcccatgacacatagtaaggacttccccaggcgccggcccgtggcacatggtaagggcttccccaggtgctggcctgtgctataccacaataggggcttccctgggtgccagcccatgacacatggtaagggcttccccaggcgccggcccgtggcacatgttaagggcttccccaggcgccggcccgtggcacatggtaagggcttccccgggcgccggcccgtggcacatggtaagggcttccccgggcgccggcccgtggcacatggtaagggcttccccgggcgctggcccgtgacacatggtaagggcttccccgggcgccggcctgtgctgcgccgtggtaggggcttctctggggcgctgcctgtgctgcactgtggtgagggcttccccagcgcacggtgtcgagttgggcccgctcctccgcccaccctgcctcagcagcgtggaatccacgccatgaaaccataactcaactcaaggtgttggaggccttcctgcccttgttgagcactgaaagacagaaggttaggacatgttaaaggaagtgtattttaccccagaggaggagaactcaaaacatcaagagcttccacagtgatctagctacaggtcctaggtgatgcttctgtgctgagttttttttttttttttttgcgatgaagtctagctgtgtcgcccaggctggagtgcagtgactggatcttggctcactgcaacctccacctcttgggttcaagcgattcttctgcctcagcctcctgagtagctgggactacaggcgtgcaccaccacgcccagctaattttttgtatttttagtagagatggggtttcaccatgttgagcaggctggtcttgaactcctgaccttgtggtccgcccgcctcagcctcccaaagtgctgggattacaggcgtgagccaccgcccctggcctgctgagtctttatgccaagtggaatgcagcaggcacatgcctgacctgtgaggtcaatgcccagggcccttctgtgccccttatgagagactccccacagatgcaggagggaggacaacccccccaccccagtgacctcacacaggtgcaggagagtatcagaccccccacccatgacctcacacaggtgcaggagactgtcagacccctgggactgcacacagatgtaggagtggggacagacccctgggactgcacacagatggaggacgggggacagacccctgggattacacagagatgcagaaagggtcagacccctgagacctcacacatacacccgtgcaggggacagacccctgggatctcacacaggctcaagagtggtgaccttgggtgtgtttttgatgtgtgactgtggagaggcccctccctgctctctgtgaccagctgtgaattaataaggggcttgagacaaatgattcaggtttttttttctgcagggatttgctctacaacccacccctgtccccaatccctaacgtagaataccagtgccagccccacccccaccatggacccttgtgtgctgggtcctttctgaaacatttcagggcgggaagcccgggcagcagcatcagtgcagtgtccttacggaggtgcaggaagctcccagcagctacgatgatgcaggattcggctgcctccctgggacacggcaatttaaaatgggagggtcttgtattgagaggaaggatacaatggaaagaactcaaaaatttggagcagttttctcagaggcatttcatttttactggaaggatcctgtccactaagaatcaggcagttagatttttcctggagcagcttgaccccacctgtgttcttttatttttattttattttattgttttattttttgagacggaggctcactctgtcacccaggctggagtgcagtggcgcgatyttggctctctgcaagctccacctcccaggttcacgccattctcctgcctcagcctcccgagtagctgggactacaggcgcccgcccccacgcctggctaattttttttgtatttttagtagagatggggtttcaccgtgttggccaggatggtctcaatgtcctgacctcatgatccgcctgcctcggcctcccaaagtgctgggattacaggcatgagccaccgcgcccggcctcccgacctgggttctaacagcagccttggtggcagttgtttcatgtcctgcagccctgggcccaggctatactgtgacccaccnnnnnnnnnnnnnnnnnnnnnnnnnnnnnnnnnnnnnnnnnnnnnnnnnnnnnnnnnnnnnnnnnnnnnnnnnnnnnnnnnnnnnnnnnnnnnnnnnnnnnnnnnnnnnnnnnnnnnnnnnnnnnnnnnnnnnnnnnnnnnnnnnnnnnnnnnnnnnnnnnnnnnnnnnnnnnnnnnnnnnnnnnnnnnnnnnnnnnnnnnnnnnnnnnnnnnnnnnnnnnnnnntcagcctccaagtagctgagaccacaggtgcactccaccatgcctggctaattaaaataatttttttttggagtccaggcacggtggctcacgcctgtaatcccaacactttgggaggatgaggtaggtggatcacttgaggtcaggagtttgggaccagcctggccaacatggaaaaaccctgtctctactaaaaatacaaaaaagttagccgggtgtggtggtgggcacctgtaatcccagctacttgggaggctggggtgagaggatcacttgaacccaggaggcagaggttgcagtgagccgagattgtgccactgcactccagcctaggtgacacagtgagactccgtctcaaaaaaaaaaaaaatgtttctccatagagaccaggtctcactgtgttacccaggctggtctcaacctcttgagctcaagtgatcttcccaccttgccctccaaaatgctgggatgacaggtgtgagccaccaggccttgattcagcttttagcagctttgttggacaatgaggtggccaggaatgttatgctgcttggggcttccaggcactggtttcctctttgggaacagttcctcaataaaagaaattgaacgagtacattaagacctgttcagaaagcagctcaatggctaggtgtgatggcttatgcctgtaataccagcactttgtgaggctgaggcaggaggatcccttgaggccaggagttcaagattagcctggacaacaaagtgagacctcatctacaaaaaataaaaaaattagctgggcgtggtggctcacatctgtggtcccagctacatgggaggctgaggcaggaggattacttgaggttaggaggtcgaggctgcagtgagctctgattgtgccacggcactccagcctgcgtgacagagtgagaccttgtttcaggggaaaaaaaaaaaaagaagaaagcacctcaactaaatggagacctttggctgtgtccttgtgccctctgcctttgtgcgtggggagtaggtgtgggtgggccctccaggggacgctggttttgggtcactgtagcccgcatgatttggggayggcactaggctgtggcgggcgggaggcaggttcccgacaccattcatcatggatgaacaatgtcttggggtggttccgtgtcagtccagacctcattctgtttcatgactgtgcaatggctgctgtcatactgctgggggtcaggtgctgttcagaacgcctcatgtgggttcagtgactgtgtaggagtgtcagtagcaagtgtgcacctcctgtggccttgcttgtgtcgataacacctacattgctttgtctctgtcaccagcaagggtgcaacagacattctgtgacrcatcttcatgcacatgtgtgaatatgtctgtgtgatccattcttagatgtggagttgccgggccagagtgtcctgcatttgaaatgggaagttagcaccaacctgtggctccatcttaggtggtttcccagggacacaggaagctgagggggcagcgctggggggagctgcctagygcccgctgaagcckcatccctcctgtctttgcaggtcggctggatgatgtggaactggatggtgtcccttctggccacaggagcggccatggtcttgtacgatggctcccccctggtgcccacgcccaatgtgctctgggacctggttgacaggatagggtaggtaccaagatgctgtgctcaaagcaagggacaggcagcaccaggaaggctccttgggatcagatgcagagctgtgcctgccttctaccgtggtcggggcgtctccagcatgctctgcctttgtggacgccccctctccaagaggagggcatgggaggtgccagaagcagaaggtgaaactgttaggaagggagggacaccaagggccagggctcttccctccagagtgagggctgagaaaaatcctacgggcagtgtgcaatctcatttcttttaagaatctatttctattttgaaggttattttttagtaaaaatggtatgtatcgtaaggcacgcggcatggtattttgctgtgtatacgtatagtgaaatgagtactgcagtcaggcagattcgcatttgcatctcctcacacagttacctgtttgtttttagcaaggagagcacctgaaatggactctcttagcaaagttccagcacttattgcatagtacggcgttgtcagctgcagtcatcatactgtgcattcatcttatttctctagttgtggcatttcccagcaaaaggaggaaaaccgagggtcgcctagagtcctgtttcacacaggttctgcagattcaggagtgagattgtattcatccattttcctactgctatgaagaaatgtctaacagtgggtaatttataaagaaaaagaggttgaatggactcagagtttcacatgactggggaggcctcacaatcatgatggaaagtgaatgaggagcaaaggcatgtcttacatggcaacaggcaagagagcgtgtgcaggagaactgtcctttataaaaccatcagatcttgtgagacttattcactatcgagagaacaactcgggaaaaacctgcctccatgattcaattacctcccactgggtccctcgtacgacacatggggattataggagctacagttaaagatgagatttgggtggagacagctaaaacatatcagagatgaagtgaggtgaaggctgaacgcacaggggaggtatgtggataagttcatgaggggtgggtgcagaacctgtgactggggggctgcgtggtgtttggatttcctgccacctttctcctgagcccattggcaggaggagaaccctgtttgttcctagccgtcccttggggctggcagccacctgtcttctagggtcttcctcacctcatcataactgcactgagtgcttcctggggcccctggaggtggtcatttatttcctgtggccctggctggatggtagacaggaatcccatgagcacaggcgagagccagttgggtacccttctggtgcctgagaattatgcaaatggggataggtgtagtggtccctgctcccccccgaccccaactccttctcatcatcatcattagaaaggcctcatgagatccagtctcgtcagcactttgctgatgaattaatcacaactggctggcgtgttctggccactgtggtcttggtcacccttggcctaatgacagtgtttccagagataagaatatagaagttgccagagctccaggggcccagaaacaaccatgctctgtcctaattacatctgaatctgttcttgggggaaacaggagccactcatgtttttaaatccttggccattaaacattttaaatataacttggcctgggtaatatttaaatcctgacatttggctcacaatcttagtgaggaaggctatttcctaatgagattgtttccagcaaaaggttaatcaaatccctgggaacttcagatggctttagaatctttacccttttacccttaagccaggctccaggtggaggaacttttattggtgtgtcggggaggcaggcactgggtcgggggttactggaggaggggtggagagggaaatgtacatcagtgaggcccggtgctaatgagatccagggatgaagcatcccagggagaccgtgctctgtgtgtgcatgggtgtgagtctgcgtgtgtgcacaaaagtgtatgtgaaagtgtgtgcgcgcgtgcatggagcgtgatcttgtgaaagggagcgtgggagtgcgtatgtgcatgagtgtatgtgcacctacatgtgtaagtgcaagtgagtgcatggatgtgtgtgcatgtataggtgtcgggtgtgtgtgcatgtgcatgcagctgtgagtgctgtacatgtggatgcatgtgtgccttgtgtatgtgtgcatgtacctgtgtacacgcgtacatgtgcaagtgttcacagcatggtggctggttccgtgccgtaatcacgggccctgggttggccagagcgctgaggctgattgaggtgtggtcgtgctgtcgcagggctccctctggatgtggccatcgccccgcctgagagagcctcctgcgccgtttggcgaggcaggtgtgacttggcaccctggcaggggctgcgggtgaggggctttcggaagaatgcaggctttaaaccactacactggtcgccaccagcagtgagagggagcgggtgctgggcggggcaggacacttcagctcagttctgtccacctcctggaaactgratgttgtgtaacagttgaaagcagtcatggcaaaccctgttttgtggcaagaggcatgcggggcaggcayagtcctcgtgatgctgtctcagtgcctctgattaaaacccacatctgttagtaaatgaggggtgagatctctgttgattaccagcatgtcagctctcagccttattgacacattcgatcaaagagcatttattttgtaggcacagacaagataatttgaaaagatgaattttcttcttcacaggggtgtgtttctgggttctagtgaggggactattctggacagaattagggccaggaccccggggactttgtccagtttgctagtagtggggcaggtgtggacgttgtctgggttgcccagttttgcccgtctctgaatggggccattgtctaagatggttctagagggcaggggcctcgtgggcgagcaggcttgtccttctaaggaagtgcatgggttgggtagcactttgtcgggatctgcaccccgtgtgtgctggactacgtgctctgagccaagctccctgskgggtcctgggggccacacagcagcgaccaggggccagcacgctctgtcctcatggggctggcactgggagggggaaggtaaggaaaagacagaggccaacctcaggctctgaggagtgctgtcagagacctggggtcagggagtcctcgagagtcctcgagaggtcttggcatttgggctgaggccgaaaggttcaggaactacttttgcaggactggggacgtgtacttcaggcagagggaaccacgaggagatgggcctaagatccatgtgttgtggaagctgggaggggcctcctgtggaccgagtgtgaagggctgatgcggggctgggggcaggagcaggggtcagaggggcggggacttttggagctgcttggagggtgagtttttccccgagtggaatggaacagcagtggacactgaatcaggagaacactgatctggttcatgttattaaaagggcagtgtaggccaggcgtggtggttcacgcctgtaattccagcactttgggaggctgaggtgggtggattaccatgtcaggagttcgagaccagcctggccaacatggcgaaaccccgtctctactaaaaatacaaaaaatacaaaaattagccaggtgtggtggtgcaggcctgtaatcccagctacttgggaggctgaggcaggaggatcacttgaaccctggaggcagatgttgcagtgagctgagatcaccccactgtactccagcctgagtgacacagagagactccatctcaaaaaaaaaaaaaaaaaaggcagtgtagcgcctgagtgaagagagcattgccagggctggggtaggggcagaagctgagagactcaggttgctggagcccacaggcgcagtggcgaccctggaggggctgcctgtgggctgatccacacttccctccgaacagggctctgggcagtctcgggcaccgggtcccaacggtttagggacctgagactgtctcatgctttggtgcagcgacccctacagtacttgctagaaataagacgtggcatgagtgcccgcaggtgggctcccgtgcttccaagagctgaatggtgttgcatttcctaaccgtcttacctgcaccctggagatagatgggggactttgccgtttcttcagacaagcaggactgtgactcacaggccggagagcatcacctctgagtgctggcggagcytcaccaagatcagggtttgcagagtcttgcctgcacttagacgcactttagacccacagagagccttcgagttttctgggggtgggcagtggggggattgcacaaaacccgtgtgttgtttgggcgtggctgttgattggagagctttgtacctgtagctggaggtggtcactgctgctcagggccgggtgatcaccattagagtcatgaggtctccatcctctgttagtgatacttgcaaaggaagtgacaccttagtccttggctatgatgttgaagtagttaatcaaactctgagtttatgaaagaagcatgggggatggtgggaggagctagtctccctcccccaaaactccagccatctctagggtacagtggtggctttgttggtggcagggtgkgtctggggaagtaagagaacgaaggtgtgggaggtggaaggaccatggtaacccgcctccttgcgtggagggagacccaccctgccattgccttagccacgcccagcccagccagccctgaattccgggatgttctgtgccatgttgcctcgtggcttcagacagcgaatgctatgacggtcttccgtgggatgagtctctccaccgaatgtgcaggactgaggttctactgcccagagtgacccagaagagtctgaatctcacagcctcctctaggccccgaagagaataacgttctttagttgggccgactgagtttacatgtgaagggccgcctggctggaggaaaagctgaggaaggaaatagcatattagacagggctgcccttgaaagcgcagtgaggtatattcagcagcgtgtgttgttctgtgagcacaaatgcatagaacggtggattctgaaygttcaagaagagctggacttttctaagtttcataaaaatgtgatcttgtttaagaaaaggggatgggtggagagtttcaagtatggcacatgttttcacaaataaagaattctcccagcactttgggaggccaaagcaggaggagcacttgagcccaggagttcaagaccagcctggcaacatagcaagaccctgtctctcagctgggcatggtggcatacaccagtagctctagctacttgggaggctgaggtgggaaaatcacttgggcccaggagttggagactgcagtgagctgtgattgcacgactgcattccagcttggggcaacagaaggagaccctgtctaaaataataataataataattctgtagccttctcttcattggtgaatgaatgtgtgaggatagaatttgaggggacttgatttttatggcctcctttggtcccccaagatacaatactctgcagttgggaagataatgggttcgggtgagcgactgttttatgtgacgcctcgtggtaaagggagctggccctgcgtgctgaaatcagtgtaaagagcagtcaggtgcacctgtgaggaagtcaggtgccgtgactcagactcgagtaaacatgaagtatgagttcaacccagaaaactgctctctcttgggttttgcaaacttgtcagaaataaatcactaactttagaaagctttggtgcaagagccttgaagagtttctggtgttttctttcccgcctgcaycctagcatcactgtcctggtaactggggccaagtggctgtcagtgctggaagagaaggccatgaagccgggtgagtgtgcctcttcagtactcattccctgtactgccaatcaaggaaattaaatccatcctatttcckgcttgcgagtgaggcttcaggcactgggtttagttttaatcttttggtgactctgcaccccagtggaaacccacagtctccagatgctccacacgatcctgtccactggctccccactgaaagcccagagctacgagtatgtctacaggtgcatcaagagcagcatcctcctgggctccatctcaggtatggccccggtggggacagtccttccagccatccccgccggccccataagtatgcacacctctgcccagtgcttggattcatcccaaggacacagtccgctgggcagccaatacgcacagtcccttctcatgatctgaggcagtgatgttccaygaagtcactgtgaacacggaacccatacggaacccttgctcctgggggaaatagatttatgtacacacacacacctctcacatcgattatagtcttaaaatccaaaacaatacatcttggtaggttctacattttttatcttgcaaaagagaaaatgcagttcagaagcattcagtgacttgcccaaggctgccccaccgtcaggtgctagagctgggatgccacgcccgggaagacagcaccctgccccaccctgccctgggctcctgtgtgtgagagcaaggcagggaggctgtgtcgccttgtgtgacctcagtgggaatgtgcctgggtgacttagggttttgactgctctgcaatgtctgagagtgaccacaaaagctccagagtatggatctggaggtgtaacataccttttagtgagtaggcaaattccccaaaatagaatctgcaaatagtgagaatccactgtatggaaggacaaatattgccacattgtttatataagtaaaaaatagacactacctatatgcccagcagaaggaaattgattgaataatttagggtacagtcttaatttatgcagccattagaagtgcatgaaatacactgatggacatcgaaacatggccattggccatgatgagtgaaaaaatcagattgcagaattacaaggtgcggtcatttttgcaggtggaaaacaggtatatatggatgtgtacatgcacactcatgtatgtatatatatgggtgtattatatgtggattccaagtgaatttttttttttttttttgaggtagagtcttgctctgtcacccaggctggagtgcagtgggtgcgatctcagctcactgcaacctctaccttctgggttcaagcagttcttgtgcctcagcctcccaagtggctgggatcacaggcatgtgccaccacgcccagctaatttttctatatttttagtagagatgagatttcaccgtgttggtcaggctggtctcgagctcctgacctcaggtgatccacccaccttggcctcccgaaatgctgggattacaggtgtgagccactgtgtctggcccccaagtgcattttttctcataacttttttcttaacataaagttgtgctttagaaaatggttcacgcacgtggtaaaaaattcagtccacaaaggtgtcctcatggctgccgtcccccttccccaaggaagccgacgtcgttcccttcagagatgttctgtgcataggtgagcgtgtgtgcttgagtgtgtgtgagtgtgtgtaaatggggcgagagcaccccatttttacacagatgtagtttagggtacacacctcaattccccttcacatgacttaagagttgattccattgctgcccatagaaatctttgggtcagtttttttttttttttttaaagacagggttttgctctgttgcccagcctggagtgcacactgacacgatcatggcttactgcagcctccacctcccaggctcaagtgatcctcccacctcagcctcctgagtagctaggaccacagktgcatgccaccacgctcagttatgtttttttattttttgtagagacggggttccaccatgttgcccaggctgttcttgaactcctaacctcaagtgattctcccaccttggcctcccaaaatgatgggattacaggcatgagccaccgtgcctggcctgggtcacttttattttatttttacatatttgtagttctgatttttctccttgtgatttaaaaacatactctcaaagcacctctttaagaggtgctatttatacaaaattagctgggcatggtggcacatgcctgtaatcccagctactagggaggctgaggcaggagaatcacttgaacctgggaggtggaagttgcagtgagctgagatcgtgccattgcactccagcctgggcaacaagagtgaaactccgtctaaaaaaaaaaaggtgccatttgcccgaagcctgaggccgacccctcagccttcctccccaccgttggttcctcggcctgaggtggggggtctgagccattcccaccagcagagtgagcagcaggaaggaggtcaggagccctgctcaaccttgatggtggcagaaacgaacgtgactcactcattttcgtgggacacatcagtcagtgacatgaaatggcagagaagacatcacattttattctctgcctgaaggaagaaataaaatcacactccacaatcttgcagctgggaactttttgttttgtttgtttgtttgttttgacagaatcttgctctgtcgcccaggctggagtgcagtggcacaatcttggctcactgcaacctccgcctcctgggttcaagcgattcttgtgcctcagcctcctgagtagctgggattacaggcacatgccaccacgcctggctaatttttttgtatttttagtagagatggggtctcaccatgtcacctaggcttgtctcgaactcctgagctcaggcaatctgcccaccttggcctcccaaagtgctaggattatagacgtcagccacctcgcccagccacatttctgtttttccaaccattaagtccacataaaccatggcactcgagccttcccatgtgatgggtctgtctaggcagtgcctgccaggtatgtatcacaggcaaagcttccattttctgcgatcctgagtcttgaatttcagcatgaccacaggaggtcatttacttagcggatcctctggcaggaaggctcggctaaaacgtcaatcaccagatgtggggggttcattctaatttccatatcacctctcccactgctccctgaagagaagccccacctgtctgggatgttgcagtgtttgtctgggagagtagatatttgtcctcttggcaccttctcctttgttgctcactaatttaacacaatttgtcttgggcttctaaattttgagtctccctttgccattgcttgcaggaggcaccgacatcatctcctgcttcatgggccacaatttttctcttcctgtgtataaaggggagattcaggcccggaacctgggcatggccgtggaagcgtggaacgaggaaggtgatggctccaccaactrtttctttctgtgattaggcgtgagttgggagtgtgggagcgttcggatgtrtaactttgcttggacatagttctccaaaacagccctcggaggggaggcccctgtcacttgcagtgtgatgtcctttccctccagcttggtttaacacccgccgggcttctggtccctagcctctgagaggtcagggtcgagctggaggacaggtggagagatgtgtgctcgggaacagtgggcaggtgggtggtcattgccctgcatctgaaccctggtgctggatacacaggcagcagccagctctgagcttctgagaacctggtcrttgaagggatagtctcccgctatgctgggcctggcagctagaaatccagctgtgctaggaggggtgagcagggctcagtgcacctgctctgcagagcaatgtgggaggagtcagtgaagctgaagatgcatacgtgccctgtgatctgggaatgccactcccagaagacttacttgtgatccatgcaagaatgtttgtagcgccccatgatttgtaatggaaaacaaaattgggaacaatagaaatgtccatctttgagaggaagaaactctgtgatcacatgtggagaatgcccaagtggtgaatacgaatgaaccagagtgagacctagtagcccgaacgagcccagatgtcatgctgagtgagcacaggaagatgcgggacacatagaaggacagcgtgtatgtgttcaaaggcatgcagagtgacgacatatgctattcaaggatgcgtgtggatggagcagaaatgttaacacacatgggaataacaaatcactacgtccgagacagcgattttggggagcacacagggaggggacttcatctgggaggaacgcattattaggctgctgtgacaggtgtgtgggcgtggaccatctctgtacctttgtatatgtctggaatattgcataataagtaatagcttaagaaagagagagagacagccagggtgtgtggctgtggtgtgtgttgggcttatttttaattctcccataccaggaaaggcggtctggggagagagcggcgagctggtgtgtactaagccgatcccttgccagcccacacacttctggaacgatgagaacggcaacaagtacaggaaggcgtatttctccaaattcccaggtcggttggagagatgcagacagagctggccagcctctgccttggctgggccttctgtgtctaattctgtaccatcgtgcccctcccctcttccttcccccaccagggcttggagaagctgcttatagttcattccgccagtggggggataatgaatttttgatcaatatcttgttgtcttcagcttgaagctatcgtgtgcaactgcaatctggtttagttgaatctcagccacctctgcccagagcctcttggccccagcccctgctgctgggagctggcacgagcctctggtttgcatgtgggagggtggagggtgtggggctgaaacagggtgatgcctgcctgttcacgaggagtggcatgtggaagtggcgtctggctcgggtctcttccttcgtgtctctcaccatcatccagtcctcatggagatgctggaggaagagcgcttttgcggtggaagcatttacaacccgacacgtcactctcacatagactgacacccttgggtgtcgtcttttgagtggtgccttgccccaaagcagggaagtcttttatttaaagctctgattcctgcctccctctaatcttatttcataagcagtctcgagttactgctgctatataattcatcgtttagcaagccttctgttccagagttatttatactcagtacttgctttctgcagtctctcaaaaggtaatctggtttagcacagaccacgtatggagaatcagaaagcggtaagtggtaggatttgccaggtatccttcctgccttgcgtgtttgcgtttcaccgttaaagccattgtgcctggaatagtgccttcctgcagcagcgtggggcatccccccaggggtggctcagcctccactgcatacctgctgcacctatgccccaccttggctcctgccgtgagcagctgtgcagacagacgaatgcagaaaagcaagagtggatgtagagaaacactcatcagatgaccctgaagaggagggtagggcctcctgccttgggaggagaggccaaaaggattagaatctcagcttgaggatccatccaagaaatgatggcccttcatcttctgtaacattgctctttgaaaactctcttttctgtcactttatttgtcacatgtgcaagggttcatgtgatagatgtctctcaggattaatttcagaataatctttttttgaaactgatattccttcttggagaagacaagtactttgtgacgtgttatatttccatttttgccttggctgccaggaaactcagagctgaaataattgctttgtttttgtagtcctcttacctttagggtaagattttgcttctctttgaataatcctgtcatgaagtcagttttaaaggtagcttcctccaatacttcctgagtgtaggtgagagatatgaataaatatggaaagacaaaggcagatcagataatgagatctgaagctgtttatcatggacaaggtgaacataggctgcacttagacccttcctcaagcaccagcgctgagagattcttgggctgtataggaaatggcgtgatggcaaaaccaagcaacaagagcaagccttcgtttccacaactcggagtgggtttttggacgtcgttaccttaaaaaatgatgccaggtgaaaatgtaaacaggccgtgtgctggtatggaaagatacccaggatgttagtaagtgaaaatgagagtttaagaacagaggacatagcatccctttggtgtaaattttaaatttttattttagagacaaggtctccgtctggccccaggctggagtgcagtggtgtgatctccatccactgcagccttgatctccagggctcaaaggatcctcccgcctcagcctcctaagtagctgggactacaggtgtgtgctaccatgcctggttaatttttgtattttttgtagagatgaggtccctctatgttgaccaggctggtctcgaactcttgagctcaagcaatcctcctgcctcagcctcctcaagtgccgggattactagcatgagccaccacacccggccttgtgtaaattttaaaaaggaagtacatatgtgtgattgtgtgaataaatgaataatgagtatgaatatggggttatatgagtggtgggattatgagcccattttggttttctttatggctttttatttttattttttgacacggtatctcgctctgttgcccaggctggggtgcagtggcacgatctcagcttctcctgcctcagcctcctgagtagctgggattacaggcgygcgccaccacgcccagctaatttttgtatttttagcggagacggtgtttcaccatgttagccaggctggtctcaaactcctgatcttgtgatccacccacctcggcctcccaaagtgctgggattacaggcgtgagccaccaggcctgaccactttttattatttttaaaaacttaaaattttaaaagaaagtaaaagcagacttaagatttaggtcattgcagatgccacattccaaacaggcctggtctgctatcggcagtcacctgttcccactgtatttccactttcgcctcagctcccaggagactcgaagcttaagtcagtgccttgaagaatgagaatgatctaaatctgttcagtctgctgtagaaaggaagacatcgtttctgcggcttcgttttgccatcaggccacttcctctgtggtgccctggagccagccactagtggattgctcctctcagcctggctttgcaagggatcaaagtgtgtcggggaagttttcacaaaaaacatttcttcagagtggatttacatcctcctttttctctgcatttccggggtctcagtaattagggcacagtactgcagatggcccagaaaacccagaaatttctcgtccgattaaagggagatctgactccaggcaaacaagactgtatgttgttgctggcaccgaagtgccagaatgaggcaggattcccaggtgagcggcacaggcttgcagctctcatcttccagggctgccattcatagactcagtttgctgagtagccatacaggcgtgctcctgcagaagctaggcacatccattgcaagcctaggagtggatttttttttttccttatttgtgtatgtgaatcttttaaaagtccaatgagaaaagaattggtttcattctctagcttggggaggcgggaggaaagacctgaagacctgcagttctctttttttgcattggaataagtagctttgggctcatttcattctcttcagctgcctcccagggaccatgcactcctgtacacagtccccttggccttcgtccccatagaaggcttggtggtggcttgtggcagtgtctgcttcatgatgtcacataaatgcgtgagtagactaggtagctgttgagtcataagctgtttgggttagctcttgccacagagtggagaagtgctggagaagtgtctcgagatttgggagggaggagatgccttctgaggctgccgcccgtcagtgaagacacagaagctggcttctttactgttttcccttcccggatcgcaggaaatcttcggggcgttattgcaggaggccagcctgctgctgaggcagatgacttctggcattacaaagcagcagagatgcgcttttgattacggccagccagttcccctcagtgtggctgatcaagggctggtggtggtgtcagcaggaggaggcccccagctggttaactgctcccttggtgactctctcggctgtgtggcttctcttcactgtttggcgcctgggtggaggatgtggccaaggaacctctctccttagaggcggcatccaaatctgggatttgatccctttggtccatcagcttcatggtgccaccccagcgtgcaggccttctctgaacagctgcacatgaggccactcacgtggcctgctgacactgtgttgctgtcatccctggctctttcctcttccccgtctcctcatcccctgggttttacctgctaatcggctctctgtccatgtggctaatgttttggttcaagcctacatgactcggactggtgcagtagcctccttcctggtcacgagcacgtgtattccattccaagatctggccccaacctctgcacaccctgtgccctccactgcccctggccactcttgcttcccaagacatggcttattctttcctgtgctacactcagggttgtctccagacactcctgttgacccccagtggcctggccgagcttggtcctgccctctgtgaattcccgggtccttgctggtgcctgaggagctgcgttcctcctcgccggcggtgtcagagctgcccgggcagcagccccgctagagggcatgttccttggggcaggaactgtctggctccctctggcccccagccccatgccagacctgcctctgggccccagtgatgtctgcggacctacacccagcgtctgtccaggcagcctgtcatggccccttctcctcgggatgaccgggcacctctgctgtctttgcaggtatctgggctcatggcgactactgcagaatcaaccccaagaccgggggcatcgtcatgcttggccggaggtaagggctgcagagtcggcttctctttcctggagccccaccttccagaggcatgggggtgggagaggaggtgctttctataaaagtcagtgacccccttcctgggcacctcactccactccagcaccagggtgtccacaccacccacacctctgctggtgtctgggaccccccagcccccaccggctggtgcgccatgtttccccacccctgtgcctgtgcacacaccatccctgggcctgaagaccccctctgaggaagcattgtctgctcagtctgcaacatggctgactgtccctcatcttggacccttcctgtgtcattcctggggtggsgcatccctgtgccagcttccttcccgagggatgggtctgggcgtgatccaagtctccctgccctgtgatggggttctcgggtagggagtgtcaggatgggggttccacagcaaaggcacagcagtgtccacacctgcaatgggggacacgtgtgcaggtgggaaggcagtgaggtgacagatgttcctgcctccctcgatggaaagctttaacctgagagggagaaagagccgggtggtagggcaaggagctggggagcggagtgtccgtgactagtcctgggggatgccatgggaaagtggggggtgactgccctcccgtgggacccctgggacttgcttcactccagagctgyggtgtggccctgacctcttctctctttccagtgacggcaccctcaaccccaacggggtgcggttcggcagctcggaaatctataacattggtacgtgcttcccctccctgagcgttctccagtctccaggaaggaggagggtcctggcgggagccccaggagccccacctttggcacaactctggccccttgttctctggtgtgacagtggacatttgtgagcctgacctcctttccagaacataccttgcccacactgccatcctcataaaacctcaaatggggtctttaaggtccctttgcccatcctcttcctcattatagctcatcctcccggtgagctctgctgggctggttacttgtgtctatctactcttttttttttttttggagacagagtctcgctgtgtcacccaggctggagcgcgatcttggctcactgcaacctctgcctcctcagtagctgggatgatagacatgcaccaccatgcccagctagtttttgtatttttagtagagatggggtttcaccgtgttggccaggctggtctcgaactcctgacctcaagtgatccgcctgcctcggcctcccaaagtgctgggattacaggcatgagccaccacgcccggccaacttgtgtctactctttatggttgaagaaaccagaagcacagagagggttcaggattgctgaaggtcacacagcatcatgcaggacaccaagcacagagagtgtaggcctgtggatctcacaactgtacagtggagtcacctgtgggccttcaaacttcccagcccagggacccagacccagcccaggccgcagagttggtcagatggcctcttatgctagtgcttaggtcagagtcctaaacttatgtcaaggtcgtttgtgtggccagggtagagaaatcccgatgtctgattccagccttttttcctcactccagtggagtccccaccacaggcacctgctttcttttttaaaaaaatttttttttgagacagggtcttactctcttcacaggctggagtgcaatagtgtgatctcagctcactgcaacctccgcctcctgggctcaagcaatcctctcacctcagcctcctgagtagctgggtctacaggcgtgcaccaccatgcccagctaatttttgtattttttgtagagatgaggttttgccatgttggccaggctggtctcaaactcctgagctcaagtaatcaacccacttcggcctcccaaagtgctggaattacaggtgtgagccactgtgcccggccacctgcctccttttttgggaggccgacagggtctcactctgttggccaggctggggggcagtggcgccatcataactcactgtagcctcgacctcctgggctcaggcgatcctcctgcctcagcttcccgagtagctgtgtctccaggtgtgtgtcaccatgcctaacttaggttttgatttttcgtagagacaaagtctccctatgttgtccaggctggtctcaatctcctggacttaagtgatcctctcacctcagcctcccagagtgctgggattataggcgtgagccaccatgcccggccctcttttttatcttgaattaatttctcattaagtaaggcccacacctggcttcctggtagaacatcacccatcctgccaaacctgaagctctctctgcctccccagtgatgggttttcttccgcttgtgaaacggcctcctcagcaaatgtccctccaaggcccttctccygggtggactgggagaacacaggcaccgctggaagkcttgggggacccagcctgcccctcctgctctgccaggttgctgtgaggcccgaccccacactgaggggccccctgcgtgaatgtgcaccctctcctgtctccacagtggaatccttcgaggaggtggaggacagcctgtgtgtcccccagtataacaagtacagggaggagagggtgatcctcttcctgaagatggcctccgggcacgccttccagcctgacttggttaagaggatccgtgacgccatccgcatgggcttgtctgcgcgacacgtgcccagcctcatcctggaaaccaagggcatcccggtatggccrtctcccgccagcgaggagaccgcagccatcgccccacgagcccacacattgaggggcgcttacatctgagcagcttgccggtgctttatatatcgtttgtccacgttgcctagcaacgccatcctctccctgccatcctttttcctacccttcctaagactgcatttaaagcaacttctgctaaatacccatgttcagagggttagcaggcccagccctgcaggtccaactggcttctccctgctatcccctggttttagtgtattctcaaaatttttaatgagaacattaattttaactttttattttttattttatttttttgagactgagtctgtcacccaggctggaatgcaatggctcaatctcagctcactgcaacctccgcttcccaggttcaagcagttctcctgcctcagcctcctgagttaactggtagctgggattacagtcacatgccagcatgcctggctaatttttgtattcttagtaaagatggggttttgccrtgttggccaggctggtttcaaactcctgacctcaagtgatccgcccacctcagcctcccaaagtgctgggattacaggcgtaagccactctacccagccaattttaactttttaaagtgctgctgggagccgttgctgttgccttttagttttaagttctgctggtacagacaagacttgactctttttagaggcaggtcttcctaaggctgtgtcgtcatcccccagcccctggccccagtacgctctgctttgattctaagtgggggaggaggagggtcacccaaattggatcacagctttcatttgcattgcttacaaaacggataccccrcaagctgacagaagctgctgtgtgtgtgtgagtgtgtgtgtgtatgtgaatgtatacaacaatttagacagtggcaggctgtatttgaagcctatggaatggctattcgttaaggagaagatgggagcacacactcactgggttcccaggggaagctgactttgatgttgcccgggagcagggctgattctgtgaggtgtaactagagacaggatttaccaggagagtctgcttcctggagaatgttgaaatatctgatgccgtttactttgaaacccgtagatcattctctttgccttaaaagttatttcaacatcttcaaaacaacctgtccaggagtgggggctggggagagcgcttgcagcacgacaacggtgtgcaatccctgatcatccctggaagactgactcctactcgggaccctgttcctcctcctcccggcgcctgtccacatctgcgctgactcccactcgggacccctgtccctcctcctcccggcgcctgcccgcatctgcggtgttggttgctttttgtggtgtccacacgtttcctttgtgttctggttctgcatgggaagagccctgcagcttggggctttccatccatctctttctttttcccttatttttggttggtgactcttggcggctctctgtggggacactgatgctctccaagaaggtacttcttgaatcagtgacccttattgtctttttctgatgagggtctaaggttttccttcagtgaatcagtgctgtcttatctggaacattttagggaactggaatttgcatttatccccttggctttatattattgaaaaagaacttaggtcttttgctgccaaaacagttgttaccaaaccatatttgatcacgagagtagtggaacaatttattatgaagggggaaaactcagcacctttctttccctggttgtcctggcttttgtgggcttgcgtccagggcacccagctgggctctgggctctttctctccccagataaggtctcctcctgggtgcattcgggaagttatttggagggttcttccagatttttgaatgcccttacattttcgagccctcacggcaggcttaggagaggatttacctcttttattgctgagctagggaggggtccagcctccacagggaggtgacacggcgtggccccagcctgcccattcaggaactggacccacttcagggtcagaagaggacaactgaggtctcatctgcaaagtcccggggccttgctgaggcaggagagcctgttgcaggtctgacccttcacatgttgcttgtagggagtgggctacccacccctcaccaccccgagaacagcctgagcccggggcgcatctctgtctctgtgtggagagacactgccgcttctgttccctgggaagccagtgccattttcagcatttagggggttcctggtgagggctcaggagagatctgggcccagagccagccacactccttgtgttgagtaagactcatcccatctctgatctgtgacacgaggagaggagcccctcactcacccgccacagctcagggtggtgatgcggcaccattggagtgagcggccccgggggactggggaggctctggccggcgtagtccttgccgccagccttcacagcgggttctctgagggtctttatgcacaggggctctgtcacttagctctggccccccctctgcccctgaggcatgactttgggcaacgcagcatccaagcctcagtttccccatctctaagatgagttgacaacagagcctctctggtgggtgccgtgggccacagggtgcccagaacgcagtccccgtgcctctgtttctgtgctgcctccactcaccgtcagccttcattcggagtaggtgcgcatgctgtgcaaagcccttccacacacctgatctcagttgctctctgtgcaaaagtcagagaggctttccctgcatttcctgtttgaacagtgtcctggcctccatctttagctttgacagtgtttaccatgggggtgctgagggtgagttcttgtgtatgtkcacatctttctggtggagtggaggcctcttgaggacaggaaccttgtgggtctacctccttttcttcggagctcagctgactgcctggcaaacagcagatgcttttggtgtctggtgagtgaatggggggtggggagctggtcctgtgaccctggtgaggcgggacaaacttgtcttcctcacacccatcttacttcctcttatgaggaaacccagagagatgaggggtcttgcccaaggaaggggtgtccatagtcagctctgccttctgctcacccagaataaagacctggggaccccgcgagggtcatggccaagtggaatggactcctggcatttgagggcttcccgactgcagccctcaggcagccatggctgtcccaagtccagcgggcctttgctcgggtcatggctgggatgtctggcccttcctgacaggaggctgctgggctcctgtctacttggggacgcctcatgcaggagctggtgtgggggtgggcaggggggcggtggcttcttcctttctctttccctttyctctaccttttcccctctccccagaggaaatggtagcaggatttcttttaagaggatgctgctgtattttgccagcgggtggaaggtggcggtattagctcccgtgagctgcacgtggacccctgtgtgaagcgtagcagggcacagagcaggcgagacgtttgcatctcacagcgggagggccggcgacatcacatgaagtgacaggcaggcccttggaagccggtgcttagatccttaattagttcacacgtcractgaattttcaagtgaatgaattttaattacatctcaggttaaaaaaaaaaaaaggcgccagtgatcgaggactcgtcactgggctctgttgctcctgaagtttcctagcccacaacacaccaacactgccaagggctcttctggattcaaggtgaaacacatgtgccataaatcttggagctctgaatgtttggaaagggcccgactgtgagaagaagtaacacaccgtcccgtgcagatggctggctctgaggaggagttcatgggagcttggggacactcttgcctctagttctaggaagctgggccacttctgaagtaatggcaatatcaataaagtaatggtctttatcatagaataacgtgataaaatatatagagaagtaaaaaagtataaataaaagtaaaatcatcataaaacatagtagctaggcacttctgaagctgtgtgtgcactgattcattcacccagtgactcacagccttatagcctaggtgctggcacccctactttcattcgaggaagtgaactcaggttcaggaatttacccagcatcccccagatggggtggcaggagccacatcttccctgaaaactttcttgcccagggtgtctgctgggatttaggaatggtctatgcctgcatttttatcctggtcaggctgaccctgaaccctgagagatactcttttttatattcccatctggaatatgcactgccggggtcagtggggtgtctggagggccctctcgaggccagcttggatgtgacacgtgtcgtgggtcccaacggggcccagtagagtgtgcagcgttagaaaaatgaacatgctcggctgggcgcggtggctcacgcctgtgatcctagcactttgggaggccaagatgggtggatcatgaggtcaggagatcaagaccatcctggctaacatgagaccatcctggtgaaaccccatctctactaaaaatacaaaaaattagctgggcgtggtggcaggtgcctatggtcccagctactcaggaggctgaggtaggagaatggtgtgaacctgggagggggagcttgcagtaagcggagattgcaccactgcactccagcctgggtgacagagtgcgactctgtctcaaaaaaaaaaaaaagaaaaaaaaagaaaaaaagaaaaatgaacatgctcatggtgacctctgggcaactttgaaatagcctcagtttctcaacagccgtgccagggggcgggggtggggtgtggagagtgttagagttgagtttcagcaccagtccttgaaagtgcctttcagaagaacaggttttatcccccaaacagagagacagtggtcagttcaccgtacttcggtgcacgtttgcagacctggtgggaagaggggcatcttagagccgagacccattcactcttggcrctccaggtggagctgggcctttggggcctggatatatccagggctgcggattttccccccttcaggtttaaatgttcctgtttttctacctttccctcgcagtatacgctcaacggcaagaaagtggaagttgccgtcaaacagatcatygctggaaaagccgtggagcaaggaggtgctttctcgaaccccgagaccctggatctgtaccgggacatccctgagctgcagggcttctgagtcagactgsctggcgtgtcactcagccgcacccgtgtgcactgtaacttttgtgtgctcaagaaattatacagaaacctacagctgttgtaaaaggatgctcgcaccaagtgttctgtaggcttggggagggatcgtttctctgttttgttaaatctggtgggtacctggatcttccacacgagtgggattctggccttcagagaccaggagggagtgtctgggccgcaggtgtggcactgtggtgagagtgtgtgtctttgcacacacagtgcagcgggaacggtggggctggctggtgctgaagacagacacactcctgagccaaggtcttgtcttcaacctccccgtcccgttgtcccattttgctctgtgaaggtgcaaatccctttcttcccttcccatctcaggctctcctgttttccctcagggtccagtatgcctttgagctttagctgttagaaaggaacccccgtgacttgacacagctttcacagctggctgctaggaccggcgggctgggtgttcacgtgtgtctgtgtcatggatgcaatgcaggccctggaggactgtgcgtcacccgtcaaccagagcgtgcctccgggccagcttccctccaaggaatgagtggatttcatacaggatctctttattgcacagactgaatggctttacatgtttctaatgtgaattaggcatgtgaagcagtgggtgtccacccgtgtccctcatgggtgagccctccagctgtgagcccaggcagtgtggtcaccgagtgaggaccctcctcaccaggaaccgcatccctgtgctgcctccacctgagagttgctagggggttcttgtcgagatcatgtcatcagcacccctaagtcaagtcacgggtttccatagccaggcagttggtatgtacaattcagttcagcgtatgaacttgtatctctaatmtgatgtccatttttatattttttgaaactgagcacaatgaaatcctttcttgaatcattttccttttggattataaaaatatgggggaaagtgctatgatgaattttatgcaataaatgtatacatgtgtgcacatgcacccatgctgtgtgtgcagtgtgctggtgtgttttctctggaggggggaccgcatctgcgtgtgtgaggctggtggtgcttgtgcgcccgccaacagctgtgccctggagttgtgtggttcgaattgttgggggcacttcccagggccctggtacttacccacattcccttgtgaccaacgaggagtgctgctcagtgtgaagccagcaccctgggccccctccaccctgagatcccccaacacccagcgccagccaggtttctggctcctttcttgtcatcgcaagagctgcatgtcacttgggttgtgtgtggctacatgccacgggatccaggcttggcccagcagcgtttatggctctcacgtcacaggaagttggaggcagtccattctcccggggccgggcagcaactccacagtgcagcagtcctggctcctgtctgctgcactctgctgtcctcaggatgtggcagtcatcatcttggccctgcctggctgccccacctctagtctttcatccgtgctgtaggcaggaagaaggtgggagtgagaagggggctgggtaaaggcaaaaagctgcatctctggagtgtgtccctttttatctgcaaaatgatggcttttctggaaagccggcagcatctgctgggcctcaccagccagcctggggacacgcagccgccttcgctgcaagggcatccgggggtctgagtatttcaaagaggacctgttccccttttttgtgagtttccaacagctgctgtaacatttccacaaaggcagtggcttaacacagccccagtttattacagtcctggaggtcagaagtctgctgtgggtctcactgggctgaaatcagggtgacagcagggctgtgttccttcaggaatctgcaggggagaatccatttccttgccttctcccgcttctagaggccactgtgtttcttgtctggtgccctgttgtcttcagcaatggccggtcacaccttccttccactgtagctctctgacgctgacactcccacccaccgtgtccacatgtaagaaccccctgtgattgcagcaggcccacttgaataaggataatctccctattttgatgtgtgctgattaacaaccttaattccatctgcagccctcactcctcctcacgacgtcgtagtccattttgttttgctgtaacagaatacctgaagctgggtgatttataagttaataatttattaaggggttcatttggttcatgattctggtggctgaaaagtccaagactgggcagctgcatctggtgagggcctcatgctgcttccactcagggcagaacatggagggggagcaggtgcatgcagagatcacgcagtgagagaggaaaccagaccattcaacaaccacgcccttgggaactaatctgttctcacgaggcacaagtgacggtgagaactcaccccctacagaggggattaatgtattcaggagggatctgacccctcccaacactgctacattgggtgtcaatgtcaacatgagttttggcatatagacaagccacatccaacccacagcaccatgtaacctaacgcattcacaggttccaaggattaggatgtggatatctttggggggctgctactctgctgacctcactttgcaaacacagtctgggtcctgctggccgagggagaagtggatggtggttgttgggagcagcagggagccctggttgatgacacttgggctgggattgtcctcccctgtgagtggcccgtgggccttagggttcaggtcgggcctggggcctgcaaggtcctctcctctcactgggtgcctggagattcccttcatgttgacagtgcctgaggagtcattacagcttaatcagcgtgccctttagttccagcaagacggcccaggctgaataagcccacgcatccttattaataagccctgccggacaacttcattaatgagggacagatggtctggaacaacagccagttgagtgcacgtggtgctgagcctgcttttgacgttccttggcccgagcatcactctaaagaacccaccacctgccggccagctgccttttcatctctgagatggccgtgggctgcaccgtgccttctcgtcttcttccagctccccaccaggcctggcccatcaggagcttctgaaggcatcaggatctgccacacagcctggctagggctgccaggattctgctatctcccacggccagcaggcctctgagcagctggtcctcctccaggcccttcctgcccacctccaggaaccttctccaggctggaggcctccttctcatgcttgggctgcccagccccaccttctcgcccgggaggattctcctcaactggagctgaacgatcaactccagctgcagtcagccactgacctgtccccacaggggcatctgagccctctaggatagggcccaggttggctcactcatctgtttcccaaacagaaggcctgaaacccacacgccttagaaaaggcatcctcctgatgtcgtaccacccctgtcaccatggctgtaggtgaacagaagagccccttccctcgagtctgcaaatgcccaggagaagggctcatggggaacaacactccctttgaggacccagccacaacctatcctgtgatgggctcaagccttcagagggaatgtcacatgcagctttatgggggataatctgtcactgggttcaagctgggctgctctaacaggtgcccccaaatctggctcaatccggaatgtgtcttctctcctgtcaccgctctgaggtgaatgggtaggccagggcgggtaggtagctttgttttgcaaggtcacccaaggacctgggcttccaaatggttgctgcctcccctggtgtgcaggtcttgtccacttggaagatgttggctcaccacagtcatggaggaggtgacctaacattcaccctcacccccttggccacaaccttgtcacctgactgcactcagctgtgtaggaggcggggagatgtgctgcccagcagggtgacaggtgccctcccagaactctagtggtgggtgcagatggctctgtgacaaggaagggtggggaatggtgatgggggacagtcgcagcccctcmcacaggaatgaaggaatctggctgcttctgtgcccgactccatctctcctggacggctgctgctttgcttgagctgggatgggggttaccccgctgggtcctgccgcccaggagagatgaagaatcggctggggtggggcgtgggtgtgcacgtgtgcggaggcgatgctgcttgtgttcgcatctctgtattttgaagggtagactgtgaggtttgtgaggcaaacgcatcggtttttacaacactttggccttatgtgtgtttgtgaatgtatgtgtatgtgtgtgtgaacatatgtgtgtgaatatgagtgtgcgtgtgtgcccttaaagctgagattgcatgcctatcaaaacccgaaagagccaggcacagtggctcatgcctgtaatcctagcactttgggaggaggccaaggcaggaggattgcttgagtctaggagtttgagacctggttgggcaacatggtgaggacctgactacaaaaaaacttttaaaaattagctgggtgtggtggcatgcacctgtgtttctagctactcaggaggctaatacaggaggatcgcttgagcctgggaggttgaggctacagtgagctgtgatttgcaccactgcactccagcctgggtgacaagagcaagatcctgtctcaaaaaaaaaaaaaaaacaaaaaaacccaaatccccaaaccccaaagaacatagctgtgaggatgtcagaatgtagtttctattctagttcaagttgaatcctgaaagcccagtgcccattccgacaggcaggcaagcagggtgatttccctgttctcacagaacactgaccaactgcggctgctcatggccactggacctcagcctgtgccctcagtggttctcagttcagtgacagctctatgtcccaatcaagtggcttttcttcagtgttctgcagagccaggggaccaggtactaactcatgtgtccaatggatacatctgtgcttatccttgggcccactgatcaccagggtagttgagctctttgcaccatagagggtatgcctcgtggagggggacagatggccaacaggaaacaagaggaggtctgatgggacaggatgctctttagccacattggtcggggggcctcccttaggtgacactgaagctgtagcctgggaggcctgacactgccatgtgaagatcgtaggatgaccagccaaccagaggtcctgagaaggaaatgaactgaactacaggaacaagaaagcctatttggagaatatgggggtgtgatggttactactgagtgtcaacttgattggactgaaggatgcaaagtattgatcctgggtgtgtctgtgagggtgttgccaaaggagattaacatttgagtcagtgggctggggaagacagatccacccttaatctggtgggcacaatctaatcagctgccaggcagaaaaacgtgaaaaggcgagactggcctagcctcccagcctacgtctttctcccatgctggatgctccctgcccttgaacatcacgtccaagttcttcagttttgagacacggactgactctccttgctccttaagcttgcagacagcctattgtaggaccttgagatcacgtaagttaatacttaataaactcccctttatatctatctatatatctatctttatatctatctatcctcttagttctattcctctagggaaccctgactaatacagggggcaagagagtgggagaggaggtgggattgtggtgctgggcatggaacacattctaagggcgcccagagcagtgacatcattggatgagcatttggaggatcgcgccgagggcagttccttttgctgggctcagtaggggcagcaggtgggtctgcactgggcgctggctggtgaaagcccagtggctccatgacgtcggcttaccagcttcctccttcccttcttgctcttctcctgtcactgtgcctgagcaccatgtgtgcacaaaacacgacaagcgttctgaccatccagcagacaggcagtgaacacatagcaaagatgatcaggagactgtctgattaggcctcagaagcctaagctggctttgatgagctgagattctttttctctgagccatgactgccttttagattagtgcaaatgatttctaaaagcttcctgccaatttgtgtccaaagagagtcataggcaagtaaagacctgttaagaaggtgtttaatggccaggcatggcagctcacacctgtaatcccggcactttgggaggccaaggcaggcagatcacctgaggtcacgagtttgagaccagcctggctaacatggtgaaaccccatctctactaaaaatacaaaaaaacccccaaaaaacaaaaaaaaaaacacccacaaaaattagtcaggcatggtggtgcacacctgtggtcccagctactcaggagtctgaggcaggagaatcacttgaaccctggaggcgaaggttgcagtgagctgagattgctccactctactccagcctaggcaacagagtgagactccatctcaaaaaaaaaataaataaataaataaaaaaggaaaaattgttttaaaaaaaggtgtgtaaggcccattacaattggaactctggctttgttgtcatggtttatcccgttggagagcactcttggccatcacagtggtaaattgatggtctaataatttcattagatgacttccaggggagaaacaggtgttagtcaattcattatgctctgggactatttccaaaagatttcatcttgggactccctcctacttctttctttctttccttggctcaaacagtgagatcacaagtcatgttgggttgttgggagagtcaaagggagtggttgtcaagtggcac

SEQ ID NO: 95585 - DNA, 12524 bp, Homo sapiens
tacacattttcatttcttttggcaataaagccttttaaaaatgtactttttcaacatgtggccataaaactattgagtaggaccttataatctcaggaccaagaattttattaatagaacaaaaagggaattttaaccaatattacaaaactacagcagtcaagaagctgtttcctgaacaacataatagctaagccacgtgacctttgctgccatgtgaagagcaagaaattctctaaattaaatcagtcagaatggcaaacctgagaggcacctcctgactgagacctccagcaacagggcagagggcgaatctgggaaatcaagcagaattgaggttcccctgagacagcagttaagagttgaatcgggaggtgtttctaagtttgccaagtcctctcttgctgacagactgtggcttcccaattgagtatttcacttttgttttatgtttctgcttctgtgccatggccttgtaaataccacagtgtaattacggcaggtttctgttttctgaacctgtacctagaaggtaaaaactcccagctatgcatatgtgtcagaactaaaggcaaaataggctcattgcctcatgatactcagatgtacttcttttgaaatggggcatttgggctaagcaggagctgggcctcagatgtacgtggggagaaggggaggccactcctctctagccttgggactcagctattgtggaagctattcataaataatggtgttaaggggcaccttctcccacttgggttgtttaggattcagatgctaccaagaagtggagtaaggtaatgttctctcccctcattcgtccccacaacaagtatatatttgcatctctaatttattaaaatgctgacctgggatggatcaaatccaggaccaattacaagaaaggacataaggagccataagaggaaggtgactctggagtcagtgccacagcctcaggtgcaggggagaggtttagattgcaacctagccatctttgtggtatgagggtactttggggaagtggctctgagtatgatcagcgctcccacaggaaataatgggacactcaaacaaaaaaattggccaggcatggtggctcaggcctgagaggctgaggcgggaggattgtttgagcccaggggtttgaggttgcagtcagctatgatcatgccactggactccagtctgagtgacagagcaagaccttttcttaaaaagttggggagggggagaaattgaggagcatataatgaagagactatgaataaagctaacgattaaaaaatgataaagtattgagttggggaaacagataccagcccctaggcctaaagtgtgagaatgtgagctgtcaccagaacctgaagagactggcagctttatgggagctgtgggctttggtagagaaaccagcctatgccaacttgcatcctggcaggaaagaatcctgggaaataaactcccatcctctgctcttgagtctcctgccagagcctctcattggccaaactcaacagggatctggagggcaaaagagcctgctcatgtaatccatgaagaagccataaaggattgctcaaggctctcagcaggtggaatcctaatggtgaatttccagggacaaatggaaaatgcagggcatcattctccttacttctccaagatactggccaactggttccatgagagagtcttcaccaaagtcaacccaagtgactttattaggcatatctccaagggactgtcaaggcctgttctttatggcttgcagctccccataatgttgagaagtttctgggtctaccaatcgcaactaggatgttttccagcatggaagccagtacagaagagatagtgaaagctatggcctgaggccccaagcccagttggagtggatgatcctgttgcagtggcactgctgcaggatgcttgggggccatcactgtcagagcctggcctcattaaagatacatgcaaactcccagttcctcaacaagggactcctcggagccaggagcaggactgatatgtaaacactccagggaaatctcggacatgggaatacagctcagcaaactttttctataaagggccaagtagtaaatattttaggttttatgggctgtttgttctcggttgcaaatacttaattctgtcattgctgcatgaaaatagccagagacagcaagtcaacaaatgactgttgttgtgttccgataaaactttacagaaacaggtggtaggctggatttggccttccagcagcagttggctgacccctggtgtacagaattgaggtttagggtattcatctacttctgccctcatttgtacctgcaaatggagaggctggcaacattcgtgctgtgtgctgacattccagatttcttttagattgtaagccacatgaaaacagaagccatgtcttatttacctgggcatccttactacacacgattgcataaatgaatgaatcaatcaaacaataaaaaaattaggctaggcacagtggctcatgcctgtaatcctagcactttgggaggccgaggtgggtggatcacttgaggtcaggagttcgaaaccagcttggccaacaaggtgaaaccccgtctttactgaaaatacaaaaaaaattagccaggcatggtggcaggtgcctgtaatcccagatactcaggaggctgaggcaggagaatcatttgaatccaggaggtggaggttgtagtgagccaagatggcaccactgcactcctgcctgggcaatagagcaagactctatctcaaaaaaaaaaaaaaaaaaaaaaaaaaaaaaaaggaagaaaagaaaaggaaaaaaaaatccacaaggggaataatataatttatatttccatttgcagttcttgttaaccaaaattaaaccttatgccttgttcatatatttaaaatattgaatgatcagaagatgtacagagaaatgtaaaccctgtatgggtcctaaatttcttataaaaattaaaccaaattttcatgagctgactggtgctactttctaatgatggtagaataggctaggctagctcaaacaaacaattgttgtgagtagaaaagtaaacaggatcctaatcagcgtgtttgctaatgagactccctgaatgggtgtttaaccataacacatgaattaggtgtttgttcctaacatatattcaacttatggggttggatatttagtgctttatttattatatgtgagcttcaaaaactacagaaaaaaaatccttacaactctgttttttatgatcttgcacacattttttttctctatattcccccctgcaacccccagactgtctatagtacacctgctattattagtgatatcacagaagatgactttggaactgcctgtgagacaccagtctaaacacccaaccacaaatgcaataaggcaaagaattgaggaagagagtatctaatactacctaagttgtataaggttgaccatcacctccctttccaagtgaaaattgcaaagccagagttacaggtagctctgccttccacatagtctgattcttctttatgattcttctttgtgatgaatggagaacagtacatccaaaagtacagtcaactgaacagtgcgtcttctttttccttaagtaaacagcagtttgagtcatttgactataaaatattgaagtaaggagttcttagctttcccacagcagaaacaaacttttgggtatagtagagtttgggggcacaaagactactaaatgtgtttcagcataagcagctggaaatatctatgatcaagcatcaaggaagagatacaacctccatttctargtcgctgaatttattcaataaatatttattgagcattcagcaagtatccagcagagacaaatccaaatctggatgctgctagttcatccacttccttgttgagtgtacatacaaacaggatgcttgtatgtaggtgtgtattttatacttgctttataatcatgatggaatcagaagtcaagtctctggccactgacactcttctgtatgtgtttgtgccaccttttgccatgccctaccttgacttatctagtcaggaggatgtgcaaaaacaacaaacagttttgtagcttatcaacaggcagtagataaaataatattctttttgttttttattttaattttaatttttaagttctgaggtacatgtgcaggtttgttacataggtaaatgtatgccatggtggtttcctgcacctatccactcattaccaaggtattaagcccagcatgcattagttcttttccctaatattcttccctacccacaccctcctccaacaggccccaatttatgttgttcccatccctgtgtccatgtgttctcattgttcagttcttacttataaacgagaacatgcagtgtttggttttctgttcctatgttagtttgctgaaaataacggcttccagctccatctatgtccctgcaaaggacatgatctcattcctttttatggctacatagtatttcagggtgcatatgtaccacattttctttatccagtctatctttgatgagcattcgggttgattctatgtcattgctattgtgaatagtgctgcaatgaacatagacatccatgtatctttgtaatagaatgatttatattcctttgggcatatacccagtaatggggttgctgggtcaaatggtatttctggttctagatctttgaggaatcgccacaccatcttccacaatgtttaaactaatttacattccagccaaccatgtaaaagcattcctatttctccacaaccctgtcagcatctgttgtttcttgactttttaataatagctattctgactggcatgagatggtatctcattaccgttttcccagtgaaacagaatagaaaactcagaaatgagaccacacatctacaactgtctgatcttcaataaacctgaaaaaaaaaaacaagcaatggggaaaggattccctgcttaataaattgtgctgggagaactggctagccatatgcagaaaattgaaactggaccccttccttacaccttatacaaaaattaactcaagatggattaagaacttaaacataaaactcaagactataaaaaccttagaagaaaatgtatgcgataccattcaagacatgggcatgggcaaagatttcataacaaaatcaccaaaagcaattgcaacaaaagcaaacattgacaaatgggatctaattaaactaaggaggttctgcacagcaaaagaaactatcatcagagtgaacaggaatcctacagagtagaagaaaatttttgcaatctgtccatctggcaaaggcctaattccagcgtctacaaggaacttaaatttccaagaaaaaaacaaaaaccccattaaaaagtaggcaaaggacatgaacagacacttctcgaaagaagacattcatgtgccaacaaacatattaagaaaaagctcaacatcattgatcattagagaaacagtcttaatttttggtgaaaacaaaaaacaatatttagtttatttcaatctatgtaaaatgtgaatttcatctttcagtttttaaaagagcaatgtctatttcttcctaaaacctgttgttctagtatttctattctgataaattataaaatatctttctcttctgcctttttctgcagagacctgtctcttccccacatctcacctctgccctttcaacctctgacatgtgtttgttactcagagcaccaaatggaggtcaacaagttactggaaaacatcagacaaggagaaaaaaaatccttactgcttctcgacttatgttggcctgaaagcacagtgatttatatcacatcagaaggacaagttcttggtatgttggcctatgtatgggcagatggcctcttccccagtaaatgaattggattaatagaaatgttaaattctttaagtgcatatatgtttaaaattctatgaaaggcagacactttttagctcagggcctggtggctakgttggttctctcctttccaatcagagacctctgccgcaaacmtgctctgccagatcctcggtcaggccaagaagcatccgagcttgatccccctctttgtatttattggaactggagcttctggagcaacactgtatctcttgcatctggcattgttcaatccagatgtttgttgggacagaaataaccyagagccctggaacaaactgggtcccaatgatcaatacaagttctgctcagtgaatgtggattacagcaagctgaagaaggaatgtccagatttctaaatgaaatgtttcactataacactgctttagaatgaaggttttccagaagccacatcygcacaatttttcacttaaccaggaaatatttcttctctaaatgcatgaaatcatgttggagatctctattgtaatctctattggagattacactgattaaatcaataaataactgaaacttgaaaaataaaataaaataaaattctatgaaacaaaatagcacaatacttacacccccaaaacatcctgctaaaactatttcttgccctatgaacaacatgacatgagcacggatcgtgaaaaatactgacattttagaataaattattaatggaactggagttgataagaggcagatggttaaatacagaggaaaaaacttgaatcaatcacttttatgctctttctgaatttctcatttgcttttaaaaataattgtttagttctatagaaactatagacttatagtgaaagaagacatactcagctacggcccttgaaccttcagtggacagcactatcgtcacctttagccagtgaattaagagctctgttagaaaaatggtatattttcaattcagattgacactgttcaagatgcaggtataactgacatctctttaataatactgtattcaaatacatcacaggatctgagaaagtgtctgacgcttggagtaagcatgaagtcaaacactgggaaaaaacacatttcagactgtcacagatgttctcagcaaaaatgtgtaggatgttatagctgatgggaaatttaacatgtagagactgtttaatgagttaaatcctgttctttaaaaaaaaaaaaaaagagcttccagccaggtttctgcgtggtatgactctttgtttttaatttgctaataggaggtaagatataacgtcagtcctcattcagctattatattatattccagtgggtcatctttaagaaagtcatgtgggagaggaaggatttttagaaatgatttttaaactctctttgggggaaataatgcaatgtcctaaagctatggatttgaccaaaattgtttgggaataagaaaatctgatcgtgtgattgcatgagaccattctattaggttggtgcaaaagtaattgcaggttttgctattctgttaggttggtgcaaaagtaattgcagtttttgccattacatttaatggcaaaacactaaaatagagatcagcattcaagtgatcagccaagggcaaagaccgcactaaaaatctgagaacatgggaatatgactcctacttgccaaagaaaatttcaaaccactgaattggaaacattagacctaaaatgattggattagatctcacctccaacccttttaccctagctccattatttttcagataaggagaccaaaggcctaagagtaaaagtgatttatctggtcatattttttacttattcattaattcaataagcatttaatgaacaactctgatgaacccagtgcaaggctaaatggtagccaggggtggatctctatttgcagatccagaatcttatacaattttaagataaaaatgcataagtaggtcaaaaggtgaacacttttgtagaataatggaaaacacaaaaaatgttaaagccaataatcatcacaagcatcataaaatccagaaaaatagcataatatttatatgaagtaactgcctgtcacacacacctctatactgacatacctaatattactgtgctttgctttattgtgcttcacagacactgtgtatttttacaaattgaaggtttgtggcaaccctgagtcaagcaagtctatttccaacagcatgtgctcgcttcatgtctctgtgtcacattttggtaattcttgcaatatttatttcaaactttttcatcattattatgtctgttgtggtgatctgtggtcagtgatctttgatgcctctattgcaattgttttggagcactatgaagtatgaccaaataagatggcaaatcaatccataaatgtagtgtgcattccaactgctccactgactggtcattccctgtctctctttctcctcaagcctccctattccctgagacatgacaatattaaatttagaccaattaataccttacaatggcctctaagtgttcaagtgaaaggaagagccacgtgtctctcactttctataaaaagctagaaatgattaagcttagtgaggaaagcatgtcaaaagttagtcaaaagctagccctcttgcatgaaacagttagccaagctgtgaatgcagaggaagagttcttgaaggaaattagaagtgcaactccggtgaacacacaaatgatagaaaagctgaatagccttattgctgatatgaagaaagtttttagtagtctggataaaagatcaaatcaggcccaacatttccttaagccaaagcctaatgaagagcaaggctctatgtctcttcaattctatgaaggctgagagaggtaaggaagttgcagaagaaaagtttgaagctggcaaaaattggttaatagagtttaagaggccatttctgtaacataaaagtgcaaggtgaaacagctagtgctgatgtaaaagctgttgcaagtcacccagaagatctagctaagataattggtgaagatggctatgctacacaacagattttcgatgaagaccaaaatctttccgttggaacaagatgccacctaggatttcatagctagagaggagaagtcagtgcatggcttcaaagcttcaaaggacaggctgactctcttcctaaggtctaatgcagctcgtaacttaaaccaatgatcatttaccattctgaaaatcctagggtccttaagaatgaggctaaatctactctccctctataatctactctataaatgcaaaaacaaagtctggattacagtacctctgtttatagcatggttcactgaatattttaaactcaccactgagacatactgctaaaaaaaagattcctttcaaaatactattgctcattgataatacacctagtcacccaagagctctgatggagatatatgaagagatgaatgttgttttcatgcctgctaacacaacatccattctgcagcctatggatcaaggagtaatttcaatgttcaaggctcattattaaaataaaaacattttttaaggctataactgccatagataatgattcctctggtggatctgggaaaagtaaattgaaaaccttctggaaaagattcactattctacatcccattaagcacatttgtgattcatgagtgaagctcaaaatatcaacatttacaggagtttggaaaaagtttattccagccctcatggatacatttgaaggattcaagccttctgtgaaggaggtcattgcacatgtggtggaaatggtcagagaactagaattaggagcagagcctgaagatgtgactggattgttgcaatctcatgataaaacttgaatggaggaataaaaagaaattgggtaatgggtacaaacatacagttagataggacaaataaattctaactttccatagcaaggcaggttgactatagttaacaacaatgtattgtatatttcaaaatagctagaagagagaacttgaaatgttaccaacacatagtaatgataaatacttgaggtgatggacacctcaaatatcctgacttaattattacacagtctatgcatgtaagaaaatatcacatatatcccatacatacgtacaaatatttgtatcaataaaaataacttgaatggataagttacttcttacggatgaaaaaaagttgttcttgagatgaaatctactcccagtgaagatactgtgaacattgttgaagtgacaccaaaggacttagaatattacataaacttcatcgataaaacaaaagcagggtttgagaggattgattttaattttgaaagaagttctactgtaggtaaagtgctatcaaatagtatcacacacaacagagacatctgtcatgaaagatagagtgaatcaattcagcaaacttcattgtcatcttatgagatggtttggctgtgtccccacccaaatctcatcttgaattatagttctcataatccccacatgtcatgggagggacccggtgggaggtaattgaatcgtggggtccgtttcccccatgctattctcgtgatagtaagttttcatgagatctgatggttttataaggggcttccccctttgctcagccctcattcttctccttgctgccactatatgaagaaggacatgtttgcttccccttctgccatgattgtaagtttcctgaggcctccctaaccctgtggaactgtgagtcaattagacctctttcctttataaattacctagtcttaggtatttcttcatagcagcatgagaacagactaatacagtaaatcaataccagtagagtcagatgctgctataaggatacccaaaaatgtggaagcaactttggaaatggctaacaggcagaggttggaagagtttggaggggtgggtcggaagaagacaggaaaatgtgggaaagtttggaacctcctagagacttggagggctcagaacacaggaagatgtgggaaagtttggaacttcctagagactttttgaatgacttcaaccaaaatgccaatagtggtatgaacaatgaagtccaggctgaagtggtctcaggtggagatgagaacttgttgggactagagcaaaggtgactcttgttgtgttttagaaagacactggcaacattttgcccctgcaaagaggcaaagagatatgtagaactttgaacctgagagagatgatttaggataattggcagaagaaatatccaagcagccaagtgtttaagagtaaacagagcttaaaagtttgaaaaacttgcagcctgacaatgccataaaaaagaaaaaaccattttctggggagaaattcaagcctgttgcagaaatttgcataagtaacaaggagccaaaggctaatcgtcaagacaatggggaaaacgtctccagggcaagtcagagaccttcacagcagcgcctcccatcataggcccggaggcctaggagggaaaaatggtttcatgggcagggcccagggccccctgctgtgtgcagcctagggactttgtgccctgtgtatcagctactccagccatggctaaaagaagccaaggcagagcttggccacagcttcagagggtgcaagccccaagccttggcagcttccacatggtgttgagcctgcaggagcacagaagtcaagaattgaggtttgggaaccatccgccttcagatgatgtatggaaatacctggatgttcaggcaaaagtttgctgcaagggtggagccctcatgaagaacctttattaaggcagtggggaaggaaaatatggggttggagcccctacacaaagtccccactgggacactgcctagtggagctgtgagaaaaaggccacagtcctccagacccgagaatggtagatccaccatcagcttgcactgtgcacctggaaaagctgcaggcactcaatgccagcctgtgaaagcagccagagggggaactgtaacctgcagagccacagaggttgagctgcccaaggccatgggagcccatgtcttgcatcagcatgacctggatgtgagacatggagtcaaaggagattatttcagagctttaaattttaattactgccttattggatttcagacttgcacagggcctatagcccctttgttttggccagtttctctgacttggaactggtgtattttcccaatgtctataactccattgtatctaggatgtaactaacttgcttttgattttacaggttcataggtggaagggatatgccttgtctcagatgagagtttggacttggacttttgggccagtgctggaatgagctaaaactttgggggactgttggaaaggcataattgtgttttgaaatgtgaggacatgagatttgagtgtgtatttcattcagcttaatgagtggacatgaggagccatgggcagaatgatatggttaggctgtgtcctcacccaaatctcatcttgaattgtagttcccataatccccacatgtggtaggaaggacctagtgggaggtaatttaatcatatgagcagtttcccccatgctatgcttgtgatagtgagcaacttctcacaa

SEQ ID NO: 95586 - DNA, 79794 bp, Homo sapiens
agttttataacaagtctggccttcagttaatcacttggccaggttagaaagtactataaccaggtgataaaagatctcataaataattcaaattcagctttaacttaggtaaaacgtttgtttcttagtttaaaggacttctaagttcttccatcccatgatgtgagaagttagtaaatatgaatacagcacttacattttcctgatcaaaattgagtaaattaagtcaaaacatgaaacataattgccagactgacacctctaattatttggagtaaatgaacaaaaaacaatggttgagtgaaaaaaattaagaaatgaggcaaccattttgttaaagttatctcaatcactggttttgagaaaacagtactacactgggatctaactgaatgtttaactttgaagatatttagactgtgagctttaattccttttttgaaaaagtgaggttgattctatcagcaaaatatgatggttaattatacaagcagaaagatttccattatctgcgtactgtatcagacaattaaaatattttctcccttctctagaaaatgtctgtgtttgcttaatatttttatctttataagatggtaatttgtccactagaggacagggtaaagagcaaccttagaattagctagaactgggttttgtagctttggactggtgggcaagttatcaaattttttctaatgcttattttctcatttcacaaatgagtatgataattcttaccccagagtgttgctgcaatgtttaaatgcaataattaattgcttaattctatggaaaattggtagatcacttcaaaatcagttgttgattggctgattttagagatttggtagaaattgctttaatgttaacctgtctcaatgaaattttaatgaaagtcttgctgttttgattttaacatttaaaattataacaaatatcacatgtttggttaaaacagtttaggccatcaataaatattacttgcagcttaagtttttgaaattgtagctgttgcatgttaagagcaaataagccacacacaagtgaataacaacaatattttttgtcagccataaacagtcattaagtagctaaagtactaattacatgcaaccttgggagactcactgctctataattatctttacaactgagtatgtgccttttgaagtttctgtttaaccctctaaagttattttgctatttgctctggttcttttgttttgtttttaagcaaaagggtagattttataaagaacttgtctccatctcccaacctcatgtttggtccaaactcttcaaaaattctgaagtggaacagcccccaatcctaataaatattcttaggttcttttcgtttgttcatttgttttttaagacagagtcttgcactgttgcccaggctggagcacagtggtgagatctcacctcactgcaacctccacctccctggttcaagagattctcctgcctcagcttcctgaatagctgagattacaggcatgtgccaccatgactgtctaatttttgtatttgtaagaacttctaagttcttacatggggtttcacaatgttggccaagctggtctcgaactactgacctcaagtgatcctcctgcctcagcctcccaaagtgctgggattacaggtgtgagccaccaccatgcctggccttattgggtatcatttatagctgatttccctcaaagttccttcttttcctgtgccttttcctagttgatgagtctcagggacactcctaccttgtcatcaactacccagatgctcagtcacctgttgctttagcattgagttcctgtttctcttgtctcaggtgagaatcatagagcactcctattttcctctgttcttggtgaggaggcaaacacaattacctggtcttctcattcataagtgttaatatgcttaggttatcatgggatggtgtaggggggcagagagaagtacaaatattaatacatctttataatgtcattaaaaagctgaagttgcagttaattttctttttggaggacatgtgccatacatttatgatatgcgttatatgctagatgtattatttaataatagcaataaaagcaatattggttattaatgttgctcgtaacttgttgacgtaacaaacatgttaatagctaaagtaagttggtttgagtttggtactgagaagtaatcttgttaattattgcttgtttgatttttggtaactgttcttcctccccttttgtgcaatgaaagtacaatcagcctgtttggtcagactaatgtataactaccaaaaactgcaaaaatatctggattctatattaataatgtgttttgccactatttgttttgaatgtcacttatttaaatgttatgtacttattccattaattcaatttaaaagactgaaaactttccaggtaagtcacactttataagtcagaaaaatatttcaactgggttgagggaagaaagcttgacgtctgagtttgaatggagtgtatgtttagttgactccttcacaaagttgcaaagaggtagtcaaaataatgcaatgtacactaaggcttgagtcagtctgacatgctgatagaatcaagatccatgaagactttcttgagtaggttccttctcagaagcacatatgtagtgatactcaccatcactgaggcacagcaccatcatcagatctgactccactgcagtataaatttgatgagtgcttcatttccaccagaacaattccttcatagctcgcatattttggttactttttgtctcttaacttcttgggaaagttttaatgttagcagttctgtgaatcattaaatggtcctgggcgtggcccttcttttttgataatttttactgcctttcatacgggagtggatggtcgcaagggacaatattattaataataataacaggaacaacttacatttatggaataccttctttttgccaggtataaagacaacaaattactctctaagttctggggctggggcccatgaattgagctgacaaaagacagattaagaaaataaaagcatatacattatatttaatatttttactgcacattgaagcctttataagaaaaatgaaaagccaaagaagcaactcaggccaagggcttatatacgttttaaacaaagaaagctaaattgtggggaaatgataaaacaaaggaaaagagtttaagcttctagaggcagtaatttgtgggaaagtgactagaaaatacacagggaaatctaatggaagataaggaagattttagtagttttgtttgtaccgatccatttcagtattgacccccagtctccagtgataagaatgttctcttcctaaaacagggagagcctctttcacatggaaaattttatgtcatacctgaggcagaaagaggaaagtcagagagtccttcctgcctctgctgttgctcaatcaccttcagcctaaaataatcaacatgctgggctgggcacagtggctcacgcctgtaatcccagcactttgggaggcctaggcgggtggatcacctgaggtcaggagttcaagacaagcctggccaacatggcgaaaccccgtctctactaagaatacaaaatttagctgggtccagtggtgcctgcctgtaatcccagctacctgggagcttgaggcaggagaatcgcttgaatccaggacgtggaggttgtggtgagccaagattgcaccactgcactccagcctgcgcaataaagtaagactctgtctcaaaaaataaagtaaaataataaaaataatcaacatgccaaagtagcatattttggggtagcatattttgaattccttcatttcccccatctgaaactttaccataagtttctcataataaaatctgaattagtggctgtggagagaagaatcagtttagcagctgagtgatagatcttcaaaagaagaatatgtagatcagaatgagaataaataagcagaaaagtgcaaatctaagcacatttctccatatcccattaaaccaatctcccaactctgggaataggtcagtctaatcaaatggttgagcctcattatcttatggagaatattaatcttttttgttcaaaggtataaatcagataacgtttgtcccaactgattcacaaagaggcagcattttcatcaaccacacaagatagaatgaccagtgttgttcatgaacaaaaagtggaacctgtaattcccaagatctagtgtgttccacaacttttgttattggtcatattgatgtctccacaccttcattttcacgtgcctctgtcagtttgtagaagcagaaaatgttgtgaaacatttgacataggagaactgcaatctggctttggcagctaaaaggcttgattttgtcacctgaccaagttaatccagatttttgatctatttatatacaatttctggtgctaaggagcctaatcaggagagcagccgagctatcccacccaggttgtgcaagagtggcctatgaaccagccaacacatttggtgatttggcaaaagtttgtgctataaaaggtagttctagaatcacttattgtcaccggatagaaagtcctgactgtgagttttccaggttcttggagtgttgaacaaagaattgaacaaaacgcacaaacaaagcaacaaaagaacgaagcaacaaaagcacagatttattgaagtgaaagtagcctccacagagtaggagcaagcttgagcaagtggctcaagagcctgactgcaatgttcttcagggttttaaattaaactaaaagaatttggttaacacccctaggtaccctttagagacctccaattggttacaccctacgcaaatgaaggattgacctgtgaccaatcagacactgaagtggaggcttggtttgagaccaatcagaggctgaagtggaggcttggcctgtgaccaatcagaagctgaagtggaggttggcctgcaaccaatcagaggctgaagtggaggcttgggccacaaccagtcagaggcatttctcgttcgtgaggtaggggaggagggttttgtagaggtcaggaactctggtcccttttcacctgggcatggagaggtggggttttccttttggtccaattccaagaagtcagccaatttgtcctcaggctccctgtctcccaaccctattctcctgcctcattatgacctccatgatgggtttgaggatgtggtgtatggagtcaaactacagggtttgattgcaatattgtcttggattgttacttgggaagagatcagtaccatatttgtttttaattggaaaagtctttttcttccaatgtctttatttgagcaagggacaattcttgagcttacatagaggtttttccttgcccagtgaactcaccagaaggaaaagtagagtgacattgtttttctgaccatggataccatactctttcattcatttatcttccatagttggtccacctggtaccccatggacaggaataaaaactaattcaggtttgttcatgctatcagatgttgacataagcaataattatattgtttagctgacatgaccaaggtttgggaaactggtgcaagggtggtgtcaggtttgtgtttaacctatgaagaaaagagtgaggttaatatgaaagaggcagcatttgaaagaaagcccacagtggaggatcagagagagaataggatagattgagacaagtaatctccagtcagcttctcaataaatgggaggttttgttgaaaaagatcccccctctactcccctccccacaccagggaggaaagaaacttaaagggggaaaatagatgaaagcaaagttttttatctgtgatcttgaggaaagctgtttgctttgtggtgtcatcttgcttctagagccttggctctgaaatccttactatgaggtcacctgtagggatggtcttccagttgtcctgagagtgatgactggctccaccttgatgtggctcacataaattcagaaagtatgatagcagtgtaggtggttagcagcacctcataaggtccttcctagcaaggtaacagtacaagctttttctaaaaatcttgatgtatacctgatctcctggttgaaagagttggcttgatggattttttcctataagttctttttatgtctagatttttatgttccacttgacctgatgattgaggatggtatgaagtaagaagttttaatgagtaatccagagattttgtgagtgagtggtttatttctactaaaaaatgagttccttggtctgattcaatctataaagaaatgccaaaatgaggaataacctcagtcgttaatttctttaccactatcatggtgttgcatgaacctggcagatggyggttttagtgagccgagatcatgccactacactccatcctgggtgacagagtgagactctgtcacaaaaaaaaaaaaaggcattacaatggagggattggttaataagacctgtgtataggtggtctgctactgtgttgcgaggtgctgtgtcttattaagtcataagagaatggacacagaatgggagaatggggaacgtggaggtaaaggagggaacctaatgtaagaatactgaatttgccaattaaggcaccagctgtgactacttcatacaggaatggggacatgcctgatgccatagggtctaattgacttgagaatgtgaaaggaaaataaaaactcagaaccccaattcatcatgccaaaaggaaaaaaaaattaagctgaaatgtgagttgtgcaagaaactgccttttctcttgttcctaagcagatagctagagataaaatgttaactccacaggtagttactctgtgttcaccttatcttatgtaaagtgcagatttactgagcactggatgaatacataattgactattcccctacctacttcttttcccttgcaacatgtggattatcataccctccttctttccccgccggcctgcttttcccytttaaataccgaggccctcaaattcatttttagaaaaaggcacggaccacagactgtttctgtgactccatgtttatttgttctgggcttatccttaactttggcaaaataaacttctaaattgattgagacctgtctctgatactttttggtttaccagaaatatagtataggacatacctgttgatgaaaagagtcaaactctgtaaaatatttgaagagaattattctgagccaaatatgagtgattatggccccgtgacacagcccttaggaggtcctgagaacatgtgtccaaggtggtcggggtacagtttggttttatgtgttttaggaaggcatgagacattagtcaaatacgtttaagaaatacattggtttggtttagaaaggcgggacaactcagagtgggggcttctagcttatagataagtttaaagattttctggctgacaattggttgaggttgtctgaagacctgggatcgatagaaaggaatgttcaggttaaagataaaggattatggagaccaagttttattgtgcagaggaagctcttagataggagattttagagagaccaggttgtaaatagtttttttataggacttaaaagtgtgcctggctcttagttgattatcttctggatctgggaaggaaggaaagaaaacaaaggggaaggggattctctataggatgtggattcttcycatgagacactgcagggcaattttaaggtatggcaaggaaatagatcttggggttaaatatttttttccttgtctcataatattatgccagtcagattgaaaagtaagccacaatatgtagggtccaataaaacccatctgatgagaatttattgtttgtagggcatgactccctagacctcttaggtaggaatttgggtaagataaaaaatcagagcttagtcctcatatccaagaggcaagaggttgttttgaatacccaaaacaatcctattcttttcatggcaatataggtgaaaaggtttgccaaagttgggtaagccaagagctggctatgtgagaagtgctcattttaaggctttgcaggagttcaatggctccaagagctaggaaatgaactctgaagtagcatcggaaggagggcatctatagcgatttagcatgggcagcaaaagtaggaactcattgatgacaatagctagctgtccctaggaatttatgcagctgctttttggttttgggagaaagatgggcaaggctgattcaaagcattttgtgctgtttttagtgccctgagatatctcatgttcttagcaggtaacagtcgtttgcatccactgaygtttagatatgaaggatttaaggcctcattcagctagttcttttaggagaacgagggagtctataagagcaccctgtttagtttggttataaagaaagaggttattaatgtattgaacaagagtgaagccttgagtaaaagctacagggtcgaaattggttttacagacttagaaaaatattgaagggaacgcataatatctatgaggtatgcatctatgttgattgtcttcctctaaacataaatgcaaagataaattttgagtcccagagtaatggaattaaaaagaaagctgaccagaggttaattactataaaccagactgcatcagcaggaattgaggtcagaatagtggctggattaggaattatggggtgacggcgcattgtaagagttcatggctcttagaccttgtacagatctatggatttgattcccatctaaatcaaattttacttttattattggcaagattagggtattgcagggtaagaaggtataaaaaaaccctgctataaaatagtttattgtaggttcaattccttatttttcatcttgagagtactgcgctacttacaggaaaggctaattacttttccaggtaacgcccattgactgtgcactcagtagctatccaatctcatttatatgtgaggcccagatactaattgggatgtcttttaagactgcatcctcttcagaagattttagattgatatgggtttccattagggaaggtaggaagcttgaggtttggtctgaaggtaggaaaataaaaaacatctttataattatactctatggtggcattaaatttacataacaaacctctgcctaaaaggtttgccagtaagaagtcagaaactagaaaggcatgatggatgttaagagggcccacaaatattggggtggcctaagatgtaggcgacgaaacaggcttccctggaattccaacagctgaatagaattagagatgatagagatgaatactttgagccagaagtagagaaagtcacatcagtgtcaactgaaaaatccagttcttgatcttctattttaaggatggaggatatacttcctctctcacaaagaggaaaatgggtcctctgaggaagttggggtctggagagattgtttaagctttcctttctttcaagtgcaggacaattgtttttttcaatgtctaggtttgtatatagtgactgcaaacatcttgaaatgaataggggaggctttgtggttggtaagagaaatgggtgggatttgaattaaccctagagtcataggtgtgtttttataaagactaaatttgcaaagcaaggacaattgatgttaatttttccccctcctgttttcctgcgagccttttttcaaagaattgggtagaagcttcaatcataatgttgaagagactgtcctgcccagacaaaaaagctactttggatttgcttccgtattctagacaggatttccaataaaggtggaaataataagatttttatattctggggctttgaggttaatgcagcatgcctttggaaagtctgtatacagcattccacaaaaaccttggcatccccttctttctgagtgtacttttcaaccttagaccaattcaccttggtaggaaaggtctctactatcacttttatgaggccctaaatatcagctgccagctgagtcatttcctggtcatttgcaggaaggcctgggagaagttctggctacctgttttctttatgtgtgtttgttacctgggagaggtagttgttcctagggggttgtctggcttgtctggtaactacagtatcaccctgggtaggaagagccaatcaaaatcactatgaggggagttgtatattgtcactaacttttctaacttctctctaagtttaataggatcttctgaaaggtgtgtgttttgggggtggggtggggtgtaaaagggcttttttattttaaaagatctgctgytgtccagaggacatgaattctttgttgtgggtattaaggatacatccacaaaaggaatttcatgggaagacttgcagctgatggggtctgattatatcgaccaagaaagtagatggaattataagggacattgaaatgagccctgctgtgtatccctggggcctctgacaaagttattttctgactatcagcatttacataagtaacttgtattccttggcctggagattaggccagagtgctttctgccattcttgcagggaaaaagaatttaaagaaggaagctgggtgtttagggattttttttttttttttttttgaggagtcagaggagcttcagggattaaaggaatttgcttaggaggctgggctggatttcagggagagaaacgtaagtcagggtctggagattcaaaatatcttctggaaggtcagggatagtttggaattgagagtaaaggggaaagggacatgtacagtagaygtggatttttaacttttgttataagtctgatttctattcttaatcttgagggaatccctaagcctagccaaaatgctctttttttgtcctacttccaatttcatctccccataggtaccaaaaagccatttgttcaggatgagagttctctaaaaatcttttcaaatataaaagtttttccaaatccatggattcatcatttggccattgtaagtaggatctccaagcatatatccattctaacagtaactcaatccaataaatcttttcatgaaaaaacctggaggtaactttccaggcttagaatacatttttatcatgagttcaagaggtatcgccaaagaggtgcagaagatgcagctcccatgatccaaaaagccactcccaaaaatatcctaagaaagcaaagactctcattgtcacacatgaaaagactctcatttcacaaacattgtaagaataatgattgtgaaaattaatgtctctggtgtcatacacaagtgagatgcacccaattacagactctctaatctgtgatattggacaggtgaaactggatgggacttcccagcactggcaaagcaacaagggtagagaaaacaaagactccttatagactgggaccttgagagcaaatgagacataggatttactgggggaacttacatacaaggatggtctggtcgtggagaactggacgggagaactgctcccatttgtaaaaagcatgcagattagataacatttttacttagcacccaccacctagcaagctccatctaacccaaaacaaagggactcgatcccctctatggcctatattctaagggatgggtcaggggttcagatgtccttcgtagctaaggagtgaaactctgggttggccactcctggattcttacaccacagggtcattgtcagggtgttcttaagtcactactctcaactgcgtctgccatactgacccctcattaaaacaaactcccctgaaagctggcaaggttggacaatgaggatgctgcttgcacacttcatgttgttggggcctagaaagtaataccccataatgaaggcctcagaagcaaaagtttttatctgaccttcttctgccctcctgcctctcagtcccatttgcctccaaggctagccataaaaactagaatttcttttcccctgggcaggtcatagataccagaaccccttttttccaaaagtcagccataaaacctaaaaatattactctaactttccctctgcctttctatataaaaacaggccataaagaaattatgtgacctaccttgtttgactgtaggtcgtaagacccccattccagagaggttcctgtcccatacctagaaggaaggaatgcatgcacagagaggccaagaagaatttagacaggtaggcctgactggatttctttccctcaggctattagcattagatcctaccctttttgtccagtcatatttccatatggctcttcatactttgctgaactgaagcgtaaaaatagacaatttcccctctgtctttgggacttcattctgaaggctcctgtatatacacattgaatagacttgcatgcctttttttccaattagtctgcttttttccaattgatttttcagcataccctccaatgtctagtgttcctagccttatggtagccacttgatgcatccctgacaacctgtacccctcagctgacagaaatcaaagaacatatcctcactggttacaagccgagatctcagaacataaaaagcgatgaaaggagaatctcatcttttttaaaaaattgatgacccacagcaaagtttgtccaaactccagcccaatgaggacagtaaacccatcagtctataaagccagttttaacaacatgcctataggacatatgcctgtgtgctaccctgtgattcccttccatatgaaaaatgacacaaaagacagagacataggaaaacaatgaccatctctgggagagaaaggacgaattaaaaccaagagtacttcaaataaaaatcacaaggagtccaggttgaaaatggcagtggcagctgcattctgggttcctcggctgtggggtcagtccaatcccaaattggagcagccacgtcaagtggtatctatggctaggagggctcagctagtatgtggaagaccctcacctattttgttgtgcttcctcgggtgggagtgagcatgataattgttttcttgaagttgcatcgtggagagcacaggagacctgagttgattccttacccccatctctgcattagatccaaatcttttccttgaggagatggtaaccatactgtatttcataaccttcatgtgaatctgtttctaactgcctatgaagatgaataaagagaacgtgaaccattacaaatctactgggaaccacagagctggttgaaccattactctgcacatggaccagaaaaagtgtacaagaccctaatctcaccttctttacttgtataaaatgatgaacagtaaactgatttgccatctctttgcttgtggcaaaatgtagcttaaagaaattaaactctgattggtcatatgcaaaaaataatgagtatctatacccaaagaactcgttcacacaaatggtttctcctgctaatctgaatttgaaaagggaaagacaaggatagtctcttgccattttcatttgaccagatgctacaggcagagattaggaggttgatgtggtaaaaatgtttacctttggctaactttgctgggtgctcccaagatctcaatggtaacctctggagtgcgcagggtgtcccagccaatgatatcccaatctcattgccagaactgtagggaaagaaaagtaaccttcctctacttcctgaagttctgtggctgaggctcatgaattgaagtgacaaaaacatagattaacaggagaatagcaaacaatttttaaaatattatttattttattttttttttttwaaatttactttaagttccaggatacatgtgcagaatgtgtaggtttgttacataggtatacatgtgccatggcggtttgcttcacctatcaacctgttatctaggttttaagcctcgcgtgcattaggtatttgtcctattgctctccccctccttgcccccgacccctgacaggccctggtgtgtgatgttcccctccctgtgaccatgtgttctcattgttcaactcccacttataagcgagaacatggggtgttttgttttctgttcctgtgttattgagactagcaaacaatttttatttattatttttacatgcacattgaagccttcatagacaaaaatgaaaacccaaagaaacaattaggatagcaagcttacatacttttaaaacaaaaatgttaaattgtggagaagtgacaaaatgggaaaggggtttaaccttctaggagtagtaatttgtggaaaatgactaggaaatgtattggggaactaatggaagataagaattatttaataggattgtttgtacagatccatttgagcactgactcccagtcttcataagaatgttctcttcttatgagaaagggtttgcaaactattcacccaacaagggattaacatctggaatatacaaggaactcaaacaactcatcaatgaaaaataaatacatacatcatttgattaaaaagtgggcaaagaatctgaatagacatttctcaaaagaagacatacaaatggccaagaagtacagtcatactctgtataataatgttttggtcaatgatagaccatatatatatataccatggtggtcccatacgattatagtggagctgcaaaattcctatcatctaatgatgttatagtcattgtactgtcatagtgcaacacattacttcttttctatgtttaggtatgtttgtttagacacatgaatacctaccattgtgttacaattccctacagtattcagtacaataacatgttgtacagatgtataatctaggaacaataagttataccacatagtttaggtgtgtaataggctatatcatctaggtttgtataagtacactctatgatgttcccacaatgatgaaatwacctacaaatgcattttaaataacatatccttgttattaagggatgcataactgtatataaaaaatgctcaacattgctaatcatcaggaaagtgcaaatcaaaatcataattagatatcatctcactccagttagaatggccattatcaaaaagacacaaaataacaaatgctggtgaggatatggagaaaagagaactcacaccttgttgatgggaatataaattagtatagccattatggaaaacagtaggagtttcctcgaaaaactaaaaaatggaactatcatattacccagaactcccactactggttatatatccaaaggaaaggaaatcagtgtgttaaagagatatctgcactctcatgtttattgtgacactactcacaacagctaagatatggaattaagctaagcatccatcagtggatgaatggataaagaaaatatggtatataaacctaatggaatacaattcagccataaaaaggataaaatcctgtcatttgctacaacatggatgagcctggaggacattaagtgaaataagctaagcacagaaagataaatactacatgttctcacttatatgtggaagctggaaacgttgatcttatagaggcagagagtagaatagtgattactagaagctgggaagaggagggagggggaataggcagaggttggtaaatggatacaaaattacagcatgacaggaggaataagttccagtgttttatagcattataattaacaatttattgtgactatagttaacaataatttattgtatgctttcaaatagctagaagattttgattgttcataatatgaatgatgaattagatgacagatatgctaattacccttatttggttattatgcattgtataygtgtattgaaacacacaccgtaccctataaataggtaaaattattatttgtcaattaaagatttaaaaagagaatgttgtcttcttcctaatacagggagggtgcctgtacatgggaaattttatgtcttgttttcggcaggaaggaagaaagcagagtgcccttcttgcatcttcaatcactctcaactcaaaataactaatatgccaaagtggcatattttggggtagcatgtcctgaatcctttcataagcattgtgctaagtgttttatatacattatttcatcaaaatttcacaagggacctatgagatagttgctttattgcccatattttacagtttaaaatacaaacaaaactaaagcacagtgaagtgaaatagtttgggcaagatcacattgctactacattgagaaaccagattctaggcctgttgmtcctaatctagaaaactaaattacttagtccagtagtttaggtatttacagacattgcttaaggaattctcagacagataagaattctattcttgttgctgaagagattaaagagattaagtaacttactaaggctagttaattagaaagtggctgcccttaggatttaaaacccaagtgtgtcagcctccaaagtttttgggtattcaagtgatttaatccattccacagttaaaaaatacattttatgctgttactcagtagacatacacatacaaatatataactgatagaaaaggttcataaaacaatactcacccttattcatgcaatgacactctggtacttcttattctatcctaacctattttatcctatcctattctacactattatagtctattttatgggttttttttaaaggcttattacaagcaattaaatttactttatgactcactataggttgtgaccttcagtctggaaaaaaatgctaggtataggcttacttaatatcattttcttgtattactgtgttctcaactactctctgttgtgcttaaaatgaattggactacttaagtgaaatttagttgtggctttgttgtaagactaacaagttcatatgcctgctgcacagtaacagtgcaatgcactgagacagcagtgtttgcagcagagaaagagtttattgattgcagggcagccaggttaggggatgggaggagactctcaaatccatctcttcaaggattcctgggatgaggtttttaaggggattgtggaggacaacgggctggaagattagggttattgattggttggggtaagagggatgaagtcattaggatgtggaaattttattctttggtaaaaggagacgagttagctcctcatggggtccctcagaccagctggtatcagtagtttcactggtacacaggacttaaaaaacatctcaaagggaaaacttacatttagtaatrttcaagttgtcatgtagagcagttagggggaattgcaatcttatagcagtctacgtgattctgcagcaacagggaaacagtataaggaagtgggtcagagagcaagctaacctaatgtttaatgctgagtgtgctgcaggcttggtttatcttagttctccccctcccttcttccctgataaattctataaagtttatgggaatggtttcactctgtaatgctctttctaaatagattttagctagagatggtctcagagtggaggggctgactgaattctgctgcagaagtgttgttttagctctccaatttcccttttaatgagaagcatgtgatctctatggaggcaaaacaccagcagtgtctcagtttattggtggagataaagggacaattgtaaatacaacttgctctgagtttctacaatttgaaatgaattttgctatgtataactcttcctcctcccacctcacctttcttattaaccacattctttacagaagacttagattattgttattacccccaagcatctctgtattgtctaaatcagtatccatggcaaatatttctttaatgttcttaggctaggggtttacaatctctaaatttttatagagatacccctaatctaattgcatacattggcttttatggctcccaaaatgtcaaaaggaatcctctccacacctattacagttacctttctcatagttcggaataaattcaaatgagccataataagcaatatttaataatrttggtagtccaggggaaataactctacactttagagtcacatagcttcttaaaaaaacacttcaggccgggygcggtggctcacgcctgtaatcccagcattttgggaggccaaggcgggcggatcacaaagtcaggagatcgagaccatcctggataacatggtgaaatcccgtctctactaaaaatacaaaaaattagccgggcatggtggcgggcgcctgtagtcccagctactcgggaggctgaggcaggagaatggattgaacccgggaggcggagcttgcagtgagccgagatcgcgccactgcactccagcctgggcaacagagactccatctcaaaaaaaaaaaaaaaaaaaaagacgcttcataggtatcattttactcattatcccagcattcgtggaatttagatagatttaggaattactgatgtatttttaaagagttaagtgatgcttaaagattgaataatttggatcttccagctttggtataatagaactacaaatggaaataaagcctcaattcttttctggatctgagttccttagtctttttagacatgtgtttcatcagcttccacctcccatgggcagatggaagacagtaaggatagaaagtaaaaggtaaaaagtgaatgtgagaagacagaaaaaaagtcattgtcaagaaagacattaataaatgtttctagtgttgttttgtggcacaagtatattcaaatcttgtaccatatcacattagttagaaagaatggtggcagttggtgctgggaagatgtttgattgcctaagactttagttatagttttgctgtcacaaaatgtgctttttttttttttttccttaaagagatggagtctcactgtgttgcccaggctagagtacagtggctgttcacaggcatgatatgggcacagtgcagtctcaaactcctggcctcaagtgattctctggcttcagctttccaagcaactgggactacagacacataccaccatgcctggctgtagaaaatgtgtattcttaaggtagacttcaagacatagctttttaggaagataaataataagccacttaccactctgataagatttttaaacaagtcacctatcctaaggaaaaattcagtctgcatcctaagtgctccatttagaggcttgatatctctataggcatcagatgccttaaatagataagaggaaacatacttgttgcattatcttttgaaggtgagctaatatatatttattggcatttatcttcagcattggttaatgtgcttagttacaattgatgtgattgggtccctattgcctttggacaaaggtgttttctgtttgtgtttgactgtagtggctatttggatctttaatacaatcccatatgtagaagatttagtaactatgactttggcaaatcatagaaataaaacccaaaagtcatctgactggtcgagagaagagaaacactggttattgctaatagacggttaattgcaaacccatagccctcattatggttattatacttttgtgaacttcattacgtaatgcaccagtaataataaaggtgtttgtcattcttcttaaacttcagcctaacttggtactgagccctttgccttagtgctaggcagctgaaccactgtaatcgcagaaccgggattggtcctaggtttttttttatagtgggatgttggattgactgaaaatcaattatcactgatctcagcctggggtttaaaaagagacatttgaagagagcatcctcagcaaagctattatgtttttaattagcatctcgcatttagatgatcttcaagtctttttttttttttttttgagacagggtcttgctctgtcgcccaggctggagtgcagtggtgcgatctcggctcactgcaagctccgcctcccgggttcacgccattctcctgcctcagcctcccgagtacctgggactacaggcgcccgccatcatgcccggctaattttttgtatttttagtagagacggggtttcaccatgttagccaggatggtctccaactcctgacctcgtgatctgcccgcctcggccttccaaaagtgctcggattacaggcgtgagccactgtgtccggcctcaagtctttattcaattacttcatttcaatcatatctgggtgcgtcagccttacgcttgcctacgaaagacatactagtcttctgaataatgcttgtgttctgtggcttctggatgacatgcttggtttttctttgaatattttgactttaagtttcatcatcagccataattttgagtttacttaaactcaaaggacatcaaattcgtttagttaattaactaattaactaatttagcatgcacaagaggagagacaaagattttctgctaatcaaactctaatcaggctcatttgtgcattatttttgtctaagtttcagactctgggcttgggtgtccttcctttcagagtccagttctagcaagaacctgcaagtcagtttagcaagaattccccatcttctatttcagattactcttgggggttcctcatcctccgtcaccccccaggagatgtctgatcaccccggccagccttcagtaagagtactgttaggttgttttcaccagaacctgccttacctgagatctttcctcttagtaattttctatcctgctgatccccaccctgcckttggctacaaattatcacttttccttgttgtttttggaattgagcccagtattatactgaggttttgtttcccctattgcaattgtttttttctgaattaaatctgttttcactgctgtaattactgcttacttcttttttttttgactgcactgtggcttctgattggtggatttagtttgtgtttgaacatcttcattttaaagtgtcaccattggtcataattttgagtttagtgaaatttaaagtatatcaagttcatttatataatttactaattaactcacttagcatgcatcaattgggtaccaattgatgagtggctytgaaaattgaacaataaactaatcctaaaattaaaggtgtattatatgcattctttaataagctctgagacctacaaagatattttggacataaaatgttattcacatttttttccccaaaggaattatcttccaagaataagatgaattattttcttatttttaatacaacataattagtattgacttaccatgcttttttttttttttaattttaagagatggggcctcactttgtcatccgggctggggtgtggtggtgcagtcacagctcactgcagctttaaattcctggcttagaatgattctccaaccataacctccccagtagctggtactacaagctcataccaccatgcccagctaacttttttattttctatttttttaaacatgggggtcttcctatgttgcccagactggcctcaaactcctggcctcaagtgatccttccacgttggcatctcaaatctctggaattacagccatgagctatggtggtgcttgaacctataatgcatttttaaaatgtgaaagtactaatatttcttataacacatcaatgtaaatattgagtcaatgctgaagaattcaatatttccaattcatgttaaatattgagtcaatgctgaaggattcaatatttccaattcatgtttaatgattgtgattttctagtctcttacatatattaattcctaattacaccattacaataggacaagtttactgtacaaattggacatgtgtgagttatatctctatgtttcaaaagagtaattaaataaaattttattttgggaactgctcttgaaggatttcattatttatttggctcttctttttctccctcctctctctcttcccatcttaaaaagcaggattcygtaaaccaaaaggtatctgagacaggtctcaaaacatttagaaaatttattttgctaaggctatggacacacctgtgacacagcctcaggaggtcctgacaatgtgttcccaagttggtcggggtgcagcttgcttttatacattttaaggagatgtgagacattaatcaatatgtgtaagatgtacattggtttggtgtggcagggcgggacaacttgaggtgggagctaccaggtcataagtagataagagacaaaaggtggcattcttctgagtccttgatcagctttccattgaatatacaatttagtctggctcagtaaatctgcatttttacataaacaataggacagaggaagcaatcagatatgcatgtctcaggtgagcctcagtgggctgactttgagttctgtctgtcctttgttcacaaggaattcccttgtgggcaaattgtgcgggaggtatgtagctttttacctttgtatctagctcatttaggaataaaatgggaagcaggtttgcctgacatagttcccaggttgactttttccttggcttagtgatttgggcgtcmtaaggtttatttttctttcacattctccccttttcttttaaaagtctttcaggaaaagcattttagaagaaaatgggtccctggtgtcaggttttgtctcatcccttgtggctagggcagtttattcctagacaggtaggtcccacattattagtaaagctcatttttagcaggttgtgaaatctcacattctacagaaagaaaatagggagaggaagggagaaaaacaacaacaaacgaagaagtgagcaatactggaaaattgatataggcactattactctgaagtctatgaatcagtaggctggtatgaaagtggtttatgtatgtaaataggttgctgttattttcttctaaagtttaagttgtctagcttcagtttgcaggactttaaaaaagcacagcttaatttttagtgatttcaaatcaggaaaaatggggaaaaagaggaatagaagaaaaaatttaatagattattttgtagactggtagtcaggaaaaattttagaattcagtccaaactrtaagttcagtccaaataataaaaattgaaaaatattcggcaagactagaatctaacaacaggtgtactacagttatttactgcctcagagaccttttttctaaactgtagcttaaaacaaaggtctctgagatagtttgaaacacattttttctttctccagtcctattttcactaaagacaagtcaaaggacaaattcagctgcaaaataagttttagtcttattatacttggccatagtatatgcataaaatcagcaagaataattgtttcttttttaaaaaattggctttgctgaaactttattccataaggattctcagatttgactttaatgccttaagcccagcctgtgcctgcagatacctgtattaatggagtgaattcctcacctcaaggtcccaaggaaccttggggctcctgggactgtcagaaagtgacattctttacttaccacaggtcagcaacctgtgcagggactgtgtagacaagatataagatcagctttctgaaggggcttttattgcctctttaattcaactttgattccttaaaggagtctgtatctgaaagaattccattccagtaaaaaaccttggtaaaataactagtgtctacaattatgtcctgttacaaaagaaaacaaattcttattacacttatgcaaataactatattgctataagttaagcatacttgcaactagtttccaaattttggagaaatcatgtagagagaaatatgctccaaattttgtttgtaggagtatactttactcaattattaaaagctgtaaatatttcaaaagaaaagtttttcttacctctgataaacaaaggatcagcaacattttaagcaaaaagtaataaaaggatttatttcagtcttccatgcggtttagtctatgcagttaactcctgttctgcttgatattcatgaacatttcagctctctttaagaatcttggaagttttccctctattctagtgtcacaatctccaaagttatcagaaacctgccttcaagtgcacccgtcagaatcctatgctggttataatgccaccttttgaaaaggataaaaataaaactgcagatgacaaaagtcttagaacagtcatagttaaatacacaatttacaagaaaattggttacttctgtggcatacaacaatttcacataataatcataattattactgataacatatgctaagatgtattagaagcacaggaatttcatacaattttggaacacaaactaattacacatttatgtaaatataattcaaagaaggttaaacattttttcatatttgacaatacttcctgtatgattttattatatcaaataaaccaaatatctcttataaactttagggaactaatatcaataaatttatgaggaccaaaattagaatttgattttggaaagtgtttcaaatataaaatgtttagaacccttgatatcacaaaataggattacagtcattgtaaagtaagtcatttatttagccaaagtgataactcaaagattaaaaaaacgaaagcagaaacctttatctttgagagaggagaccaaacaataagccttaataaagacagaatgaagtcagttaaatatgtctctcaaatcttataaactgcctgtaaaactttaattatcttgaccataagatatamtttccataagcctttttataacctttataaccttttattaagaagtgggttaattctccaagaaaaccttgttaatctaacacaggagtccatattctggtcttgcttcagcgtgccttcaacattaatggttaatttatagagaaactgaacttattttttctcaaaatcagcccttatgatctcacatgcctagctcttctgctatagtccctgggccttgaattgaatagttttagtttctggccctgtatctcatgaacacagtttattttgattggcatcttctactgggtctgaaaatgaggctttaactgctgtcggtttttaagatttagcaagatttggggtcctttttagactcagaagtcaaagccctgtactcaatgacacaaggactgtaaaagcacctgcagaaagttacacggatgtaataaccttaattaaataaaaatttaatctcagtttttttcctaagcaaacccaaacttagtaataatgacacagaaattattttgataaaatgtaaaatctgtttgttaggcccagttaccaaaaggcaaaagaaaagaacttctgcaatgtgactgctgctccctgtgggaagttcatttagataatcctcacgtcagacctaatgagaatggcacttgaattaattagccataggaggtgcttcctgagcaatttaaagccaagagcacagaatattatgttggaagaaaacatttcctttagrccttcaagataaaacattattagcatcaggccaaaacaattatgacccaragaaaaaacttacagtagctgaaaatgaattgaaggacagagctataatttcagtccttttaaaaggggagagaaacctgaaaacaatgagacacagtaaaagttgaactttgcataaaaaaattataaagtcctgtaattttattaagagtaaagcaataccttaagaaaatctcattattctaaccaattatttagtgtataagtggggttttaaaaatattaaatatagacaacttgatcatataaaatttttttttcttttcataaaccttcttattatgacttacacagacattgggcatggttgtcctgaacatccctctttctttaacaaccagtcattttattttaggacaaaaatttaccatataagattcttttgcatgtaaaattatttttctttaagctttcttaccaaaaatacctctttatttctataactttctttacatctctcttatttccaggttactcttaccttgttttatacataacctttaaaaaagtttgaattagacaaaaagtattcttcttttaacattttgggaggttaattttgggaggaaaggcaatgaagaagattcttcagaatgcacctctgaattagaattaggatactaaacaacagcttcctaggaggaaaaaaaaaagtgaagaacacttccagtaactgtcctcagccagctttaactttgttagtttttgtccaccattacacatgccaaggtcaaatcctctctcagtacaaggtaatctttggtaccctctaaagccaaagaggtcaggttatgcaaatacaggagagcagacctttagacctaagaagaatctgcccatcactcttgaaactctacaaagaaaacagaacaccccaaaaaggggcaagaggtgcctgtgttctgagttctttagggggtttgagtcattagaagcctctttagattttccctggtattgaagatggtgaaaggggaggaaggaatagggtgaagaaaagtaaatgaaagaacagttgttttttaagacagaaagcaaacacagaaaccaagcccctgttttttttttcccctttcttttgtagctatgaggaatttcagctaattcagacagaccttgttccccataatttgtaattctyattcagatttgaccaagtcaggtagagttggtcaactctgggaccagagagaaagaccagaacaaacaacaaaaaaccccaacagtatgattactgaacactctaatggtaaggagaattaagaccagctgactgttaatcacaactttatccaagacaaaatcccaattcagctacttaccaaggagtgggtctcaggctgaagacagctctctaccatcctagaagcaggaaaaaattcaaactggaattccctgttggaagtgagctcaaattacagagaggatttacctgccttccattgtcatgaaagcagaaaaacttgccttccttgttggaagcaagtaaaactcagaaaaagagttgcacagcaaaataaacgttagatctcaaccaaattttgggtgattggggattctctggagggagggaagcttccaggcctcagcaaatcgtcctgttggtttgggccatagaagctcaagctggtaccaagcccagttggagatctgtcaaaggtccaggagctacctccatgcagagtcccttccattggtcaccaaattgtaaaccaaaaggtatctgagatatgtcttaatacatttagaaagtttattttgccaaggttaaggacgtgcctgtgacacagcttcatgaggtcctgacaaatgtcctcaagtaggttagggtacagcttgcttttatgcatttgagagagacatgagacatcagtcagtatgtgtaagatatacattggtttggtccagcagggcaggacaacttgaggtggggggcttccaaattataagtagataagagacaaaaggttgccttcttttgagtccttgatcagccttccactgcatacaaaatttagtctggttcagtgaatctgcatttttatataaacaataaggtagaggaagcaatcagatacgcatgtctcaggtgagcctcagtgggatgactttgagttctgtctgtcctttgtccaggaggcatttccttgtgggcaaattgtttggtaggtgtgtagcttttttgaatttgtagctagcttatttaggaataaaatgggaagcaggtttgcctgacatagtttctaggttgacgtttcccttggcttagtgattttgtggtctcaagatttattttcctttgaaaactcataaaagtagtatttttctatcataaaaaatatccaacctgttttatcattttgaaaatgttaattttaatttgttttgttaatttttaaaggagaaattatttttcttttataataaatgctgtattttcttgaaaactgttccatgaagtatatgcttcatttgtattacactagagaaatatgttattaatttaaccaaatgctgagcaataagtccaggtgcatggctcaagcctgtaatcccagcagtttgggaggtcgacgtggcgagatcacttcagcccaggagttccagaccagcctggatgtcataacaaaaccccatctctataaaaaattttaaaaattatccaggtttggtggtgtgcgcctgtagtcccaactacttgggaggctgaagtgggaggatcacttgagcttgggagttggaggttgtagtgagctaagatggtgccactgcactccagcctaggcaacagactgagattgtgtctcaaagattgaatttgctgagattaaaacrccacacacacacacacacacacacacacacacacacacagacaggttcacacactaacatttcaaaagattaaatcttcctttaattgactgggcaaagggctgtcttttctcacccaacaggttaaatactgcagagctaatagattggagtgacttctgacctagtcacatcttaaaggaaaacttttcagtttttactttaaaagtaagttgcctttgttctttctactgcatagcttagtaggaaaaagcaggtactgttttgtaaaaaaagataaaaagttctgtaatgtgccacattttgagcagtttcttcagcctcaagaatctctggcttgttcaaaacatatctgggtgacactgggaaagttaagacgaggctggaaagaaccaaaggagaggaataatttkacaataataataaaggggaaggaaaaaagagttgatgaaatttcacctaaaatgggattaacttatcttgttgaatcaagttatctatttctggtcaatatatttataaaaaacaatagtttaagaagtttcttagaaaaaaaatcttacacaaaagctcctttcattcgtgaaaatacttgtaaatatttttgctttaggagaaaatatgtgctttcagggatattacgctggtctcttaaaagtttccttaaaattcttagcttggagtcactgttacttgtaactggaggtattagtcagcctttgggttggacttatgaactatgtaccttggaaatgccacacaacctaccaaatgtgatgaggatacgagggcaatcaacttggggcctmccgctcatgtggaaatttgcttttcatttttcatgttaaagaatgattcccacattatgtacagaagtaatttagaacactaaaattatctcagtatcctgaggcttcctgaggctggaggccattttcagtattgtaacaaagtttagtagttttgagtgaggtctgtagagaaatggagactgaggaggtgccttgtgaatgacttagatttgggactccctttggtcctccccctttggtaatgttatggtttgctttcaccaaagttatagtcttgcctttttcaatatttgtccatatttctgaatttttaaaaatatttatgataataatttatattcaaaatctataacaattttaatggtaagaggattgtatctaaattcagttcttaattccattgagataatatatacataaactcacaggaaatgggaattccaaaaggtagattctgaaggcagtgtcttgactgacttctatatctgttatgattctctagagagaaagcatttatcatggaaataaagcgtttgttgtggaaaagaagagctgaggactaagccaagaaatttggctctttttttttttttttcctgtctgatactctcctctccttacctcaaaaatcctaatcttcccataacatcatgttgtataccttaaatatactcagtaaaatttatttgaaaaaaaatttctcaatcatcaactcctcttccttgtacaagaacaagaatcccctgtacaagcatcctggtagataatgtgtggagaggtttatggttatttgtctttcctcactgaagggaagctgagattcaagtttgttctggcaaactattttctaacattaaaattgtatttgtttccactttttatttgagaaacagtatgatagttggatgaaagaaaattagaagatcagaaatacataatggacactcagaaaatacaaatattctttcatatttttgaatatttttaattccttaagcatgcacttacatgtttttgtatacttcaactgtgtgtatttttgtattttatttcactttgtattttaggcaaacttatttacatgttgcatcattatctttgtaactagttctgatatctgcatacattctttcaggatgaaataccgtatttaagcatttcttatcattggtattgcttatcaattgggtattgaatttgctttttattttttttcatttcatagatgctacaatacatagtggtgaatactacacatgtgaatatctacacgtagctacataatttttattacaaaatcattttgaacttatccttagacaagggattcctagttcaaaggatttagctagcatgtgttccagtgataaaacgcctttacaacaggaataagagcttaagtagaattttagatatattcagaattttaagtttctaaatctattttgagagaaaataatcttttttttttttcaaagggatgctaatgactagccaatgctctaggaagacattgagaccagccaacttcttgccttgataactactgaagagacattgggtggctggattttgaaagcagacttctgggtaagtgtcattgtttgggtttgggggatagcaaagacttagcagaagtgctttaagaaggaattatctgcacaatgagcaaggaagacacttaaaaatgcaactttaataggtgtaaattgaatatagagcttaggaatactagtggagagataaggtcaggcattattacctggggttaaattagttaagattttccgggaggataaggttctctattagggtacctatgtatttattttttattttgtaatagtatctttttcattaaaagacatttaaatttaattttattttagattaagggttacatgttcaagtgtgtaacatgaatatattgcataatggtagggtttgggcttctagtgtacccatcacccagattgtgaccaatgtacccaataggtaatttttcaatcctcatccccctcccaacctgctccctttcagagtgcccagtgtctactgcttccatctttatgtccatgagtactcattgtttagttctcatttaaaagtgagaacatgcagtatttttctgtgtctgagttagttcatttaggataatgacctccagctctatccatgttgcttcaaagggcatgattttattatttttttatggctgcatagtattccatagtgtatatataccaaattttctttttccaatccaccaatgaggaacacttaggttgattccatgactttgctcttgtgaatagtgctacaatgaagatttgagtgaagctgtcttttttatataacgatttcttttcctttgagtagatagccaatagtgggattgcgaggatgattggtagttctatttttagtcctttgggaaatctccatgctgttttccctagaggttgtactaatttacatttccaccagaagtgtataagtgtgtccttttttctgcatccatgacaacattttttttgactttttaataatagccattctgactggtgtaagatgatatctcattgcagtttagacttgcatttctctggtagttagtgatgttgagcattttctcatacatttattggcctcttgtatgtcttcttttgaaaaatgcctgttagtgtcctttgcccactttttaattgggttgtttgttttcttcttcaatttcgtttgagttcctcatagattctgggtattaatcctttgtcataggcacaattagcaaacattttgtcccattctgtaggttgtctgtttactctgttgatgatctcttttgctgtgcagatgctttttagtttaataaagtccagtttgttccatttttgtttttgttgcatttgcttttggggtcttagtcataaattagtctgtctaataacttagtctgtctaggcaaatgtcagcttttctctgtaaacaggtaaagttctctattagatacttcaaacaaaaagaagacgttattcttgatgctaacttctaggtctaatcctcaattttgtgccaattctctgttccaaggctttgcattagatttatgctgaggaaaaatatttcattgagtaaaatttcaagcatagaagtgtccattcttttttgaagacttctatgggtagagacgttctcaataggctcattctgccccatgtttttctttttctttttcctttctttcttgagacagagtctcattctgtcaccaaggctgaagtacagtggtgctatctcagctccctgcaacctctgcctcccaggttcaagtgattctcctgcctcaggctcctgagtagctgggattacagaagcctaccaccatgcttggctaatttttgtatttctagtggagatgaggtttcaccacgttggtcaggctggtctcaaactcctgacctcaggtgatccacctgccttggccttccaaagtgctcggattacaggcatgagccatcatgcccagctccccatctttttcttacataaaatgaacacgtggaaatagatttaaatgttaatttcaataaggttagcttactccttccctgagatacagggaaagctaatcctttattccatttccttttccctgtccctgccattcaggcattagtattgatggttggtatttaaaagcaattagtttttccccctaatattattttaggtgaagattatctaggtcctgaataaagaagtttataaatatttaaactacaagaatatttagctactttatatgttctaaacatgagggaaaattcattatcttcaaaacatgagactataatagtccttatgattttattttattctgactatggtgatctctttagagtcatttatttttcagcaatgggaatgactggataatttgctatggtaaggacacatgttcctgggaagaatagtataattcttgttataatttcatatagcagtgtactactaatctaattaaaaagaaagtttccaattccctcctagaatcacagaacatttaactatatcttcttgcaggtaatttttgcaaatactaaatgctgagtatatacataatttaatttcttgacctttgcccagaccattttattgtaccacttttgtggtttaatacagctaaagtatgtgctacaacacttcactttgtcacaatcagaatcacaacacaatcttacttatcaaatgctataaaaagatgaaaatctacatattgcttttcttaagttaggctagaactgatccttttagtagaaaatacaaagtagtaaaatgttttattaactttaggcatgggagtacattattgtaagatgtgatcgagcagcgtaccaaggagcctttcagcttgtttggtagaagtttttggttgattcaataaattcaaccaaactgttgatttactacttctggcagaagtgagtttgctcccctttgaaaaaaaaaaaaaaagtgaaaaaagagaaaaaaagaaagaaagagaaaaatgaaatttcacaattctatgaaaggttgttttagtatatggcagaccgctagaaagtggtctttcaagaagcaagaaacagaatgagargatcaacttggaatttattttccttcaatgggattttgctaaggcattgcttggtacagcattctgtacaaccagaaaggcaaaaggaaaatagctacattctcctctctgtaggcccagtagtgatttgggaagatgagaaaaatgttaactagtatagagtttgtatcatayatgagaggaaataatttcatagattcaaacacaggagtagatcctccatcttctaaaatgaaattaaaccccctgcacttaaagttgagaacttggtgaagcttacattctttattatgaaatgcatcataacaatgtattctgtatttctttttcagttataggtgatgcaacttgaaaaacaatcctgaaacatgaaacaagaataataatatttaaatgtaacttaatcattatacctctttatccatcaaagtgaattcattccattccctttcatctgtgctcatactttgcatcagatattgggtaaaccaaagtgtgtaggaagaaataaatgttttcatagtcattactctttacaatgggagtrctaaaattcaagcacatctttttcagaagctttgttaaatcaagtggagtatcccagatagttttcaccttccttctgattccatgttgcttgactctgaatttcagagcacctcctgttattccaaatgygcctttcctctgggcctggaatgccccaagtgaattttgtcttggaaaatttgatgagccactagatatgagcctcttctctttcataggaagcccccgaataaacgccaccgggcaaggtgttacaatattttatgttgatagacttggctactatccttacatagattcaatcacaggagtaactgtgaatggaggaatcccccagaagatttccttacaagaccatctggacaaagctaagaaagacattacattttatatgccagtagacaatttgggaatggctgttattgactgggaagaatggagacccacttgggcaagaaactggaaacctaaagatgtttacaagaataggtctattgaattggttcagcaacaaaatgtacaacttagtctcacagaggccactgagaaagcaaaacaagaatttgaaaargcagggaaggatttcctggtagagactataaaattgggaaaattacttcggccaaatcacttgtggggttattatctttttccggattgttacaaccatcactataagaaacccggttacaatggaagttgcttcaatgtagaaataaaaagaaatgatgatctcagctggttgtggaatgaaagcactgctctttacccatccatttatttgaacactcagcagtctcctgtagctgctacactctatgtgcgcaatcgagttcgggaagccatcagagtttccaaaatacctgatgcaaaaagtccacttccggtttttgcatatacccgcatagtttttactgatcaagttttgaaattcctttctcaagtaagtaaatcagggtatgagggctaggaaatgaaattcacaaaagatgttgattgaaayttaatattatttttgaagggagtgaaatctagcttttaatattagtcaggaatgtgtacacaagtagatcaacattattatatgaaygcaaaacaagaatacgcttaatctttaatgtaatctctttatctcttagtaagccgggagaattaggtagtatagacagtgtatgaactcagtttcttttttttttctttcttaggcctcgtctcttttcaatagaagtgattgaaacaataatagtatcttatttgttttatagtaaggcaatggctgtgtaagagatagaaatagtggggaaatattaaaattattattattgggtcagcatgcttagcttttgcgttgctgtcctatgtatagcactttcatttcatttttatctgctaactctttctgtcacattttccaggatgaacttgtgtatacatttggcgaaactgttgcyctgggtgcttctggaattgtaatatggggaaccctcartataatgcgaagtatggtaagttgaattggtagaaaataggtgaaaatatttctatgtttaatgtttttggggattgttttggtattaaataagaaaataagtagtactatgcttggcatgtagtaataggtgctcaattaatactggctgaatcaaaatacatttgtgtggtggttgtaaggcagaaaatagtatacccattttccagtggggaaatagaaatttagtgaataattgaatttctctaggctacatgactattaagaagcaaaaacaggactacaatctcaattttatggcatggtgttttgtgtcagaagataggtccttgttcctttactcttgtttaattctctatatcagatctttatcccccacctcatcaaccttgttgactcaataggaaagctgttgtatggacattgctgagttgaagctgaattttttcttctctggtggttgtggaaataccaatgatgaacatgccatgaagaatgccagatgaagctcatggcccaagggtcctatctcaggacctcagcgaatagtctatactctagtagtctaagaaagcctttgagaagcattatattcatctcttattctttggatagaatagacatgacatagtctttatttaaaaatactcaacagcagttacatttatgagaattttttaaggtaatctgagcccatctgcctattttgcataactcttttgtctttaatttgatctctaatataaagaaataacaaaaaatataagttcagaagaaggtatatggcccttggtaaagtattttatgtgtcagaaaatcattgtaaaatgataattttctttagtaaattcttaatttttattagttgtttccccaaatccataaactcccttctcaaatgtcctattatttaaaaacttataaatatttataaattctccatactattttcttttctttttaaaaaaactgaaagctccactcttactctgaggaggagtgaatcaggcattcctcaatgaataggttgacatgacayactatttaagtgtcatgcttgttttttaatggcactttaagcttagattcaaattctactactatgtctctcaaatcatcttcagtattatccataccagagacagtccttcaacttttatatgattattttctccttaatggcattgtcccaaaattgttccctatagactctgttgtatatatttctgctatctttctcaacttctgatcattttaaataatagatctatcattacttccccttttttctatgccatttgtaatcaatagtcatggattacatgttatgttttctctgattcattgacaacttaagaaaccgataattgcaagtttacttgcagttactggaactgacataaaacaaatgcaaatgagccatttcttttcgttccattttattatatctggtggtgtgacagagccagccctactgctcccagctgagacctaattgttaaatattcagggattttgtgaaccagttgttaatcactgccattattaaaaattaaatgataaaaacttacaataaaaaattatgttaaaaacaggtgacacatttcaatataccaattattttacctcattttaccatgatccatgctcttgagattatttacatcttttgcatctttataaatggaaatactatgtaataatgtgctacttcacaccatggtaccataatgtgtaatggtggtgtacttgattcccagatctgcattcagtaatgtttgggaggtagcttgaaattggccatggcaggagtatttacactatggatatatatacaaatgataagaaccaggtcttacctattagagagccaattttaatgtatttccatagactacaaagtatgcaggttaatgattctcaagccattctcatccttttactactctttgtgtaacccttgtctctgtggagttgagaaagcaactgcaatgttatttgaacttggtataaattctcatgtcccttatattgggaacatagtgttgaagaatattgacaaagtctatgtactcttggaacttatgagtacttaaaaagtacacaagtaagagacatatttgatatggtaagtgctatacagagaatttaaacagagatatggagagtttaacaaggaagttatcagagaagggcattgtctaatttaaagctgccatcagaatgacaagatgaagtcaattgtgttaaaaattagaggaaagaccattccaagcagtgggaacagtaaatgcagtttgaaatgaacctgccgtgctagtgaaatagctactatatctaaggtagaatggatgtgggaaggttgtacaagaggaagcaagggttatacaatgtcacactgtgcacaagtcaagagaagaagttgaatttcattcaaaacaccattcaaaaatattggattgttacgaagatggatggtgtattagttttctattgctttcataaaaattacaacagacttagtgggttaaaaaaacagaagaaatttgttatcttgtagttctcagatcagaagaagtccaatatgggtttcaatggaataaaatcaaagtgacagcagggctgaattcctttctaggagaagatactttctcatttgggttgttggcagattcactttcttgtgcttatagcaatgagatccccattatctggctggctactggcaaatggctatttccagcttttagaggccagtacattccttagctcatggccctcttctttcttaaagtcagccaaggtgggttgaatctctcttacactttgaatctctccttccttcagtttatctttctaaccctgcttgaaaagtttctatactttcaaggactcatgtaattacattgagtccatcttgataattcaggataatctccccttctgaagatccattccttaatcacatctgcaaagtctcttttgtcacgtaagttcacattgtcacaggttccagggaattaggatgcagacatttttgggtatcagttattctgccaacaatagatggcatcatctcaaggaagatgaaaagaaatatattcagatggaagctgccaagattccttcacatgcctgcatatctaccactgccacttcctttggcctgataaagtattagcacaaccacctcactcaatggaactgttgattatgaaaaaaagtgatcaacttcaatatttctcaaaggacagtgtccagggtttagaacataccagtctcaagatgaagatgaatcattttagttagtcatcgctcatactctgccaaatttgtaaaagagttgtcattatttacccataacttgactatatataayatttaatagaaagtatagtcagttgaacccgtttaatgtattcgagccagcaatttataagccatccttttccatgctatttaaacttgtctggcaggtgaggcatggtggatcatgcctgtaatcccaacactgtggaaggatggggtgggaggattgcttgagcccaagagttcaagaccagcctgggcaacatagtaagacctcacttctaccacaaaagaaaaccaaaattagacagatctcgtggcatgtgcctatagttccagctactcagggggccaaggcaggaggattgcttgaacccaggagatcaaaggtgcagtgagccaagactgcaccactgtactccagcctgggcaacagagtaagactttgtctcaggaaaaaaaaaaaaattgtctgacaaatgtggtgcttcttacatttatttataatttattgagggtcaactgaagatatggtaggcccctgtgttaagcacatttatatgtatttttcttttttatctatttttataacaactttatgaggtaggcatcataattatccttattttccagatggtaaagctgaagcataatcaagttaatcaatttgcccaaagtcacccagataggaaactaagacttagaaagcttaagaaattcccaagttcctacagctagtcaccaatggaactgggactccaatcagggcaaatgtcctagagaacatactctaacacactttaacagctgtagcattctatcccctgattatgttatgaattacagaggacgagcaagggtaaggaatactaagcctcaattagtcaattattcagtggaatgaagtggcatgtgaaacttataagtcttacaaaaagcagttggaataatcttgttggttaaggtaaaaaagaaattatcttctacttcttgctatctctggttttcattcttctgtaaaaaaattgcttaatacactaaattaattckcatttgaactaacttgtcctttgatattctgactgtcttataataattttacagaaatcttgcttgctcctagacaattacatggagactatactgaatccttacataatcaacgtcacactagcagccaaaatgtgtagccaagtgctttgccaggagcaaggagtgtgtataaggaaaaactggaattcaagtgactatcttcacctcaacccagataattttgctattcaacttgagaaaggtggaaagttcacagtacgtggaaaaccgacacttgaagacctggagcaattttctgaaaaattttattgcagctgttatagcaccttgagttgtaaggagaaagctratgtaaaagacactgatgctgttgatgtgtgtattgctgatggtgtctgtatagatgcttttctaaaacctcccatggagacagaagaacctcaaattttctacaatgcttcaccctccacactatctgccacaatgttcattgttagtattttgtttcttatcatttcttctgtagcgagtttgtaattgcgcaggttagctgaaatgaacaatatgtccatcttaaagtgtgctttttcgactaattaaatctttgaaaagaacagctcttgttgaaagatcatttttggaaagttctttctgaataactatacctaggaaatgacgattttctttgaacttgacaaacactgctatattgtatgaattctcaaccatgagttcagggatttgtattccaggagtcaatagcttatgtaaattctgcagtttagagtacagaaactcatattatctgtttcacttgcaaaactgccaggattgttttaacactatcattctgcacaagatactgacattttgataaaataaaacttgatatagaatgtttaagaactcgaaagtgaaaaccctttcaatacaagccatcagtaacatgtagagtgcttggatatttctatttctcctctgctcagaatcaagagagagagggagaaggaaaaagtttgggtggaaaagaagaaaacaaaaggagggaagagataagggaaaagaattagtattttttgctttctctggtgccactgaagactctaatttgcacaggatcgaaaggaatactttcagtgtatacaattaaccttcgactctcttttaaagcgcagagcagttgtacctaaattccttacctagtctgacctgtacaaatattactaccgcctccttcctttccccatacccccctagaaacaaaaagagatgaaaccacatattccaaatccattcggctaggtactctcaaattatggcacaagtcattaggatcttaatttttttgcggcattacattttccgtgaaaaaaaaggaaaatgttttacttgttacagatctcatttctttatgtttaagctttgtttaatatctgaaatgagactgagctctaaaaagcaataaaaataattcaaattattattatgcattttttaaaaattaaaaaaattattatacatttttaaggttgaagtttttaaaattgaaccacttgtatagtcttttacattatgttatcttaaaatcttttttatttttttctcttttaattttagttgacatgtactaattgtacatatttatggggtagagagtaatattttgatacatgcatacaatgtgtaatgatcatggtaataaggataaccagtacctcaaacatttctttgtgttgggaacatgtaagattctctcttctagctttttgaacatatgcaatgttattgctaattatagtcaccccccagtgctatagaacactaggatttattcctcccctttagctgtattgtacccattatctggcctctccctatccttctctcctcccatccttcctactctctawtaatcataacaataattcctctctctgtgatttcaatttttttagctctcacatatgagtgagaacatgagatgcttgtctttctgtgcttgccttatttcccataagataatggcctctagttccatccatgttgttgcaacaaacaaaatgactccatttttcttatgactgagtagtattccgttgtgtatatacaccacatttttttaatccattcatctgttgatggacatttagactgactccataccttggccattgtgaatagtgctgcaataaacacgggatgcagatatctctttgatatatactgatttttttcctttgctgtatcctatatgtattgctgtatcctatgtgtattagtccattttcacgctgctgattaagacatatccaagactaggtaatttataaaggaaaagaagtttaatggattcttagttccgcatggctggggaggtctcacaatcatggtgaaaggcgaaagccacttcttacatggtagcagcaagagacaatgagagacaagggaaaggggaaaccccttatgaaatcatcagrtcttgagagacttattcactaccacgagaacagtasgggggaaatctgtcaccgtgattcaattatctcccactsgatccctcccacaacacgtgggaattatgggagctacaaatcaagatgagatttgagtgggctcacagccaaagcatatcactatggtagttctatttttagttttctaagaaacctccatactgtttttcataatggctggactaatwtacattctcaccaagagttcccttttcccacatccttgccagtgcttgctgttttttgtcttttgataacagcaattctaactggggtgaaggatatcttattgtggttttgatttgcgtttccctgatgattagtaaagaygagtatttttttcatagaccccttggtcacttgtatgttttgacagctgtctactcagatccttcagcaattttttgattaggttgttttttgctgttgaattgtttgagttccttgtatattttatatattaatcaattgtcagatgcatagtttccaaatattttctccyatyctacagatttttgctttactctgttcattgcttttcctttgccatgcagaagctttttagtttgttatagtcccatttgcctatttttgtttttgttacctgtactttcatagttttacccataaaatctttgccttgaccaatgtcctgtaatgttttctcaatattttcttccagtagttttatagcttcaggtcttaacatttaagtctttgatcaattttgagttgtaaaatttttttttattctataaagtcattgctgctcattatgaaataatactaagtggaaaactagaagtttccttgtgtcttccttctacaagtggcaacttctggtttcagtttttttgtacataattctgtaaatttgctaataatatggaagcaaatgtgtgtgtatatatacacaaataacacattgggctctggtgccataatttttgataacttgctttccatatagcaatatattttgggtgtttgtccatatcagtacatttttgtactgaccacatcatgccatgataccactatatgacaattttaaaggaaagttcttgttagtgaatatttattttatggaaacttttttctcgaccaaaaattttatagttaatatcatgtacatatataccttggcatacttttgccaggatgaaatggaattgctgatgtgaagggtatatacattttaatttagatagatattgcaaaattatctttcaaaaaattttgttccaattaatgatctcactaatagagatgaacaacactggtctttatacaattctgcagtcattgttcacctgataggtgaaaatgacatcttgttttaacttggtttctaatcagtaatgttgacatttttttcatagtttattatgggtatcttttatttttttttcagagtaaactttgttttctcatttatacttaaattcrattttagtagactgttgccatttctaaaatttaagatatggctttttagataccaatagattatagtgtgaaaagaggaaccaaagattagcattaaaaaggatattttttatctctttatattttatatgtggcatttgtctatgataatcatcattatatttttaaagtacatcagttacaaggaattacaaattcatctatctgctgactctcattgcttttataagggcataaggctatacaaagttttggcaaattacttttttataagaaatatcatttaaataaaattcaaaagttcatgagcccaattcaaaagtttttcatgggaagcccaattcttggtagcaggatatagggagaagagcaagctaatcccagtttagcaatttgtaagctgctgactttgggaaacttacttaacctctctgagtttatttcctcaaatagaaggtcaattgtttagaagactagagaaagtaaacaaaagttagctagtacagtgcttgttataagaatggtaggtgctcaatacatagcaatgattatttatttggagaatgtatctattttccaaaatttttcctctattaaatgatttaaggtttatatttgaaatataaaattgacttaatatttttattttataagtatttacattattaagtaaaatgtatttataacatctttaatttgactgaaaactacaaattatctaatttaagcactatgtgccattttttaaaaatactatattagatgtacatgtcaattatcagaaaaatattgggacctccatgaaggtctttatattatcactgatgcattacatctgtaattagactctataaatgtttaaaacattatgctaatataactttgctcatttatttggtttctaatcatttcaatacaggatatatttaataataaacctcaaagtagtaggtggaatacataatttttattatgtatcacatatcacttcttttattctaatttgctaatcctagataatagatataaggaaaaggataaatatacaattatgtaatttttagactatatcattataaataattttatttttctctgctaggttttaaatttttgactttttaaaaatttttagtttttaagagacaaggtatcttgccatttgactctgttgcttaggctgggatgcactagcatggtgatagctcattgtaaccttaaactcctgagttcaactgatcctcccacctcagcctccttagtagctgaaagtgcaggtgtgaccacaggtgtgacccaccacatgcggcactactaggttttaattaaagactggaggtaaagacatttctgggtttaatatactgtgcttatcactttgtaaaagcaggaaaaactgttaaaactgtaatatgtattatacaaatgtttttaagggctgagcagccaaaaataaatatataatttttgtatcctgtaggaaaccttaatccttgaatagttagagttgactttagtgacaaatacttttagtgatgttctgtttccacatgatgctgacaattagtctgactgaaattgttaatcaccacttcacaattcttcataaataagaagagcttctgtttattatacaacaatcatatgctttacatacaacttctgatttaattattttttttccagttgaaataactacaccttagataagtgacttgccctgggtcagacagctaataagtcctagaggctgaaagaagatcggagtgggtggctttgactcccaagcctgtgtattccaccattatacaatactgctcctgcaaggatgtgaagtcaagtaacattataacacaagggaactagttcctattccttttcactccaggcttcagaatagcttctgaccatgggtatccatccatcatgaagaatttttcttttgttgcaatcgcttttggcattttcgtcatgatatctttgcccttgcctatgccctgaatggtattgtctagattttcttctagggtttttatagttttgggttttacatgtaagtctttaattcatcttaagttaatttttgtataaagtataaggaagggggtccagtttcarttttctgcatatggctacccagttctcccagtaccatttatgaaatagggaatcctttccccattgctaatttttgtcaggtttgttgaagatcagatggytgcagatgcgtggtcttatttctgagttctctattccgttccattgatctatgtgtttattttgtaccagtgcaatgcyattttggttactgtagccttgttgtatagtttgaaatcagatagggtattgcctccagcttcgctctttttgtttaggattgtcttgcctgtttgggctctttttccattccttgtgaattttaaaatagttttttctaattctgtgacaaatgtcaatgatagtttaatgggaataacattgcatctataaattactttgggcgatatggccattttaacaatattgacaagtgcgatctaattaaactaaagagcttctgaacagcaaaagaaactatcatcaaaggaacaacctagcagaatgggagaaaagttttgtaatctgaccatctgacaaagatctaatatcygtagtctacaaggaacttacacaaatacacaagaaaaaaacaaacaaccccattaagaagtgggcaaaggatatgaacagatatttcttgaaagaagacattcatgtggccaacaaacaaatgaaaaaaagctcaacatcactgatcattagagaaacgaaaatcaaaaccacaatgagataccagctcacaccagtcagaatggcaattattaaaaagtcaagaaacaacagatgctggtgaggttgcagagaaaaaggaacatgtttacactgttggggagtgtgcaaattagttcaaccactgcgaaagacaatgtggctattcctcaaagatctagaaacagaaataatatttgacccagcaatcccattactgggtatatatccaaaggaatataaatcattctattataaagacacatgcacatgtacgttcattgcagccttattcacaatagcaaagacgtaatcaacctaaatgcctatcaatgatagactagataaagaaaatgtggtacatatacaccayggaatactatgaagctataaaaaagaatgagattatgtcctttgcagggacatggatggagctggaagctgttatcctcagcaaactaacacagtaacagaaaaccaaacaccacatgttcttcttacaaatgggagctgaacaatgagaacacatggacacactgggaaaaacaacacacactgggcctgtatagggggagagcattaagaagaatagctaatggatkctggacttaatacccaggtgatggattgatctgtgcagcaaacaaccatggcacacatctacctatgtaacaaaactgcacatcctgcacatataccctggaactggaaggttgaagcaaaaaaaatacaatttttttctgagtgctatatcgtagggaataggttatcaagggccgtctgttaattatttatatactttcaatatggcttttatggattaaaggagacactggcaattgagaaaagaggaagcttaggttattagaagtttgcatcactttagaatttcctgggcctcgtttrtaacatacaataatggcagcagggggcagtaagataatggcatcaagtcccctgtgcttcttcaacagtaacatttctgtgtccttgaagcctttttgtttcagcaaacagaaataayagctagtcacagtgctagtcacagtacgtatcctgaaggaaatcagtcagcttatatttcagataaatctggtattacaatgctaaaatcactatatgcataatgttgctgttttgtgattgtctgcaagttcttctgtgtccttgaaagataattttaaaaatgtacttataaaactgatttaaactttttttctacaagtaaattaattttgtggttattttgtcagtgagggaaatggtagggtaggaaattaagtgattagatattccctgtgattgttttatatattcttagtaggtatgctgataattttaaaaagtagactccaatatagtatttgtgaaacagcatggtgtatgtgcgtgtgtgtgtgcatgtgtgcacatgtgtgggtgtatgcatgtgtgtgtgagagagatggggagagtgtgagagcctctggagactgctaaaatgcaagaaggaagggggatgtggtgggagatgggatttggggctggaaaggtaggtgtcagatatgaagtgtcttctgggtgatgttagtgaaacagcagttaatcctttagcctggattgaaatggtcagatttgtattttaaatctgcagagaaagtacattgtggagaaattgggtctttgagtctggaggcaggaaaactagttagaaggctattgccattatctaggccagggaggataaagtcttgaattaggaaagtattagggatagagagaaaaggatagaattagaaatcaatacttggatgattggatgtgggagggtcaagggaaagcaaggaacctaattttttgcagggaagataagccccaaaattggggcttagcctaggaaggttcttggctttgctcaggaaagaattcaagagtgacccagaggcagaagaaaatagctttactgaggtggcagtgttagagcttcatgactgctgctgcagagcagggcttgagagtagctgctgaggggcagttctgcagtcatatatacacccacttataattatacgcaaactgagagcaggttattcagaaatttctagaaaaggggtggtaacttctgagctattggcatggaaagagaaggcaacttccaggtgttgccatggcaattgaaaactgtcatgacgctggcaggcgtgtcttatggagaattgcytttggtgcctctttcatgtttcagccaatcttcagtctggtctggagtaaagtcttgcctcctaacctcaatctgacactaagttccttgttaggacaatgtcatcgagtcttgagaaaggagcacaggtggagaagcaggtttgggggattaggttttgagcatgttgtatttgaggtgcctgtagggtatcttgacaattttttttttcaaagccatgttatttcaaagctcaagaaaaagataagggcagtgtctttaacaatggataataatagagagagatagtatgtctaatagtttgaaaatatggtttctagagccagactacctgagtttgacttctaggcccatcattcattggctgtgtaagcttgagcaggttacataacttgtccgtgcctttgtttcctcatctgtgtgagaatgaaatgaattcatatgtgtaagctctttgatcagtacttggtacatagtaagcaccatatgctaacattgttgttatttttatttcagctcatattttttgattacttgctctgggccaggcctgtgttaagaaattataggcattttctcatttaatctccataataccctgtgatggtgacactgttattatctgaagaaactgagaccttactctgaccaactttcccaaagtaaaccactagaaaacaaaggctagggtcaagatgcaaaccaaggttggagtgcccatttttaaaatgggattatttggttttttactgttgagttgtttgagttccttatatattctggatattagtccctagccagatgaactgtttacaaatattttctctcactcagcaggttatctcttcactctgttggttgttgactttgctgtacagaagmctttcatttaacgtagtcccatttgtctatttttggttttgttgcttgtgtttttgaggtcttagccataaattctgtacccaggccaatgtagtgaagcatttcccctatgttttatgctagtatttttatagtttggggtcttatgtttgagtctttaatatatcttgagttgatttttgtatatgttgagagataggggtacattctcgttcttctgcatatgggtatccagttctcccagcaccatttattgaaaagggtgtcttttccccaatatatgttcttggcacctttgtcaaaaatcagttggccatagaaacatggatttatttctgggttctctgtcctgttttgttggtctatgtgtctgtttttataccaataccatgctctctcttttggttactataaccttgtagtgtattttgaagtcaggtagtgtgatgcctccagctttgttccttttgctcaggattgttttggctatttgggctcttttttttttttgactcacccagattttaagattttttcttctacttatgtgaaaaatgacattggtattttgatagggattgcatcaaatctgtagattgttttggatagtatatctaatagctttgatgtatggtgaaggcactgaaaacttggaacctcagagctagctctgtattttaagasaggtttctctttttcctagagtggtggtcktrggaattaataaattatatcttcttctrtgccccagcttagtgtttccttaagtcctttagtccgggttcactttctttacatggagtctcctggtatttattctgtatatctccattagtttgctagtgatgctataacaaagtgccacagactaggtggcttaaacaacagaaattaattttcttatggttttcttacagtggaggctggaagtctgggatcaaggtattagcagaattggtttcttctgagagtcatgagggaaaaatgtgtttcaggcctcttcccttggcttataggtgactatcttctccttgtgtcttccatatgtttctgtctgtgaccttgtttcttccccttataaggacaccagtcatgttggattggagaatactctaaagacctcattttcacttaattacctcttaaagatcctgtcttcaaataaggtcacattctaagatactagagtttaaggctgggtgcagtggctaatgcttgttatcccagagtttgggaggacaagacaggaggattgctcaagaccaggagtttaaggccagcctggacaacacagtgagatcccatctctacaaataataataataataataataataataatwattattattattattatagtaaggcactagggtttaagaacttcaacatatgaattttgaaagaacacagttcagtccataacaaaatcagtacccttagaatgtttattttaattaataaagactttaacttagatgaatccagtatatgaatgcatgcattacaagtaaagaaacatattctattccataattttgtggtagcaaacaaaggaaatacatttttgttctaygtcctcccagtctggtattccttttccaattcataagatattaaataaagaggttttcttccttcactttttaaggaatacagttttgaactcagttttaaaattaaaatccatatatgtttctgtttactcagctaactctgtctcatgatcaatatcctttaggaaatgaaaaaaccatgactatcatcaccaacatccttgggtattaagtgcagtcactctcctagatgctgtggggagaaggcaagttacaaagatagaccttccctcaagataatcagattttcatggtattatccttaacctttttgacatcatggaggctttgggaatctgatgaagcctatcaattttcttccagaagatatttatataagattataagaaaaattatgtacacagcttattttattgcattggatcaaaatgccatttataaagaattatgccttttccatcaattttagcatggaaaaataatttcaggcaatatgcttaaaaattgggggaagacaaaagaaatccatatcgwgtaaataaaaataaattttggttttgctcaaaaataaatttcaatgggaaagcatctcttccttatctttttttttcttcttttttttggagatggagtttcactcttgttgaccaggctggagtgcaatggcatgatcttggctcactgcaacctctgtctcctagattcaagcaattctcctgccttagcaccccaagtagctgggattaggggcgtgcaccaccamgcccagctaatttttgtatttttagtagatatggggcttcaccatgttgtccaggctggtcctgaactcctgaccttaagtgatccacccgccttggcctcccaaagtgctgggattacaggtatgagccaccacacccagcctcttccttattttgaatgaaatctgaaattggagaatggtttttgacatggcagtatgttcactttcctgtagactttctgttttgatggtaacattctaaaaagctgtgctcacaacagcatgttgtagcaaatagaatcagttcaagctcacagatgagacaatgggcttgtgacaagggaacaacaaaatatttcaagactatcattggcttcacatcactgagtttcatcttcagcaaggggaggttgttgatgtcagcaaagtaaggattaagagcccatgtttcaatttaagggttgtctgagcagaagtactttaaaaagagttatgctgagggttgtctgcatatttctatatcacggatttgttaaaaaaaaagttcatattctgctttcattttctgtgaaaacatattcaaaaggcaatgattcaaggtcctagcattagttgacactttgctatagacaagcaggaccatagaaagcagtgagtcagatcacactgcataaagacacttcrtcctctaaaactgtgaaactccaagatgtgctactctgcaccacaggtgttttgtttgttcacaaagtgtccagtgaggcttatatgtaacagaaacttatcaacattccaaagatattgatggattttaaatttcaaaaaggacttgctaaataggaaatcatctttgaaggcatcagctggctgcataaaggatcttctaattccttcatcacatgtctcaaaatactaattttaaaaagccaatcatcatggaattattttattttgtttattttttgagatagggtctcaatctttacccaggctggagtgtagtggcatgatctcggctcactgcaacctctgcctcctgagctcaaaggatcttcccacctcagcctatgtggaggagctgagaccacaagcacgtgccaccatacccaggtaactctttgtatgtttggtagagatatgttgcccaggctcktctcgaactcctaacctcaagtgacccttgtgcctcggcctcccaaagtatcgtgattatagaagtgagccaccatgcttggccgataatttcattttatataagcactacttttacctgcttcttctgcttcaaaccacacactaaattatttctggggtacatggcttttaccaattaacttgtttctattttgacagtatgctgctgcctagtgtcaagtcagatcaaattttggcaacgttttgccttttcaactccagccttcccttcttaaaacagatctatgctaatatatttttggaacaaaaagtatgagatgccacttcagcatttttggcttaatactcttctcattagcaagaatgttgtcataaacaaagcacatgggctttggtattctatcacacatagtagaaagaaaagccaaaggatatttgatattttttgttaggttttttttttgcttgtgacatttttataacttaagccagttctaaagtaaagatagatgctcattatcatcatcgcaggacacagattcactaattcctaccagtgggaagctgttctgacatatcatgacaacactgatgagtatacagtgcttgtctacaggagcagcccataatagacatgaaaataatgtgtacagcaagacgatttgggtaaataaaataaaaatcactgctgcatatccgtgtgcatttctgtttgtgagtgtatgtgtgcatcaggtacatatccacatgcctgattcacagacctccctttgatccccttccgcagacatcaggctaagatccctgctgtaaaggagtggacagccccttcaactgaaccccaaattcaatgtgatgacaaagatccatgtgagcccaatgaaaggagaaacctcctttcctggtggccttagaaaaggcttcacaaggacccagtagataacacttgagctgcagcttcaaggtkgagtagaagtttattaagtcgagaagaggagaaaggatattccaggcagaaactaaaaagggagatgtcataatctgggaaatgtcggggagtgtgggtgacactaagaaactaaagagttacstgggaaatgtttagctatcgagacagagctaactgctcaggcttgaattttaactctactatttatttctttgatcctggacaaattatttaatctctttttgcctctgttttctcatttttaatatgggagagcagtcggggtcaacatgtgctaggcatctttcgtttacccacttaagattactttaatccctctttgccacgctaaatacacgaatgccctctaaatatggatacagccactccctcttcgttaagggtgagtaacaataacaataatagtagtaattctagtagatgaaatataaggaacctctactttatgtcaagtattctaataagtgctttgcatgcaccctcacatttgttcctcataatacttgagatagaagctgtcattatgtccatgatgaggaaattgaggcttagatatgctaagtgacatagccacgatgacacagatagcagtaagagagttgggactgaaatcagattttttcctctctgctgtgttttaaatttcccctggtgactgattttcaattgtattcggtgaacttcatgctctgcccctcaggttgatgcctcccgtggatgatctgctcacatcccattggcttctttccatgaagctgcttctcagatcatcctgccctgctggctgcacacacctcagtctgagtgcaagtaatacatgcctccacttgacctggaattgaggaaacagcttcagctagagcccaggggtgtaggaccctgcttgtctgggagaaggaatttgagggactagtgagttattgtcaggcctgagtaaaatacttttggccattaaaagtaatggccaaaaccacagtaacttttgcaccaactcagtagtacccctgatacatctgtgtggcatgaaagtgtattgtaacygccttgagtttcacttgtatgatcaggaaacgaaacacagagaggagagaaagaaaaagaacaccaaataataaaacaaattcttttaaaagacgctgatagcrtcggggcatggttcttttctggggtcyatacaaacacgtgctgttccttttctgaggaatcctgtcaggctacaaccaatggaggagcctgttccgcctgggggaaatgactgcagctggatcgagcttgatttatctgttgtttatatttttgaatttcctccttcatatcttttcctgtaaaattatccatctggcttaaggttatagaaagggagtgttgatttctgccatttttatttatttaggttgattctgtgaagtagcatggtagagtaaattgggacagagcagaaaatggggcttgcccaccactccactactctcaggaagattagggctaaggatgctattgtccacagccctgtaaatcccctggactcctttctgattctgattctaaaacactgtctgaggcttcctgccacagtggtggcagaactatcttcctgcttaagatagttacattgaaagtcacacagatggactttctgggtggcatcatctgctttttttagtatccctcacccacattttgattatactatatattttgagctagattgttgtcacttcaaaggcatatttgtagatataaattagcaagggatttcattcagccaagtaacagaagagacactttggcctgaaacctttctccaagattactttctttaccataaaaaagtattactacatactcttgcatgtagtaaccattgggtctcccacatgaaagcctctaaatgaggaaatcagaataaagaaaatatttatatctgaatcactttgaacacaaaaaggggtgctatacaaatggatacttgcattagggttgcatttgaattgatggctggtcacactgcagtttcattttagtccattcctagcttgaggaagttgcacctaaaacccagacatgtttataaggaacctgtgcagccaggctgtcaagaacttaagtttcctaagaacgaagcaagttctcaaaatacctcaggagcttttaattagtcctcacaactctcccatgaagtaggacattttttatctgcctccaagcaagtggtaaaacatctatttgacttaaggtcacagagagagagggggagtgccagagaagaccaaaacaagaactgagcttgatgtgaagccaagccctgttagctcaacaaagtcaaggagatgagcacagggggacttggcagtgcagtcggtgtttttcacagtgatgataatacagttcagcagacaaggatgctaaatgtatgccttgtgcctttccttagactgaagaggctcagataatggggtgggatgaggatgggccagtgtaggtgaagaggaaaaagcagagatcaaaagccatgtgtcaagataagcagcaggtagagagagagactgaggctgaatgtagaagtgatgaggatggggagagtgggatagaaaaatccatcagaaatagatctagaaagatggaggaggagatttgattggcctaggagtcaaggtaggaaggtcgaagtgggtaggtatgtggcttaagatcatacagactatgatgcttagagactaccatgccaagggtaagagtgggaagttattcgccaaagacttggactcacattctttccctgatgtagatgtgatctatccctcatgagggttttactattttgtctgtagaaatatttgctggctttcttgggggtataatggagtttataattctcagtgtggagaaattatagaaagattctatcttcagcctacaaaagctaccaggttaccccttctcaaatctgatttaattctgtagtgctaatttgatcttctctttagttgggtctagatcttgcttgtgaaatcctttccattctacctgtgttctcctcattctaaccatcattcccagagctgtccatgactgactgacttgcttctactccctaagtcttccttcccctcttgtccttggagcatctatcttgaagtgcttttctcctccttctctgtcttttatcttaaactccagtcccaaaattgtattgcctttgtgtgtgaatcgttaaatgagtttcccgcttcttcatatggaaaccaggtcaaccaccatcttgctcgttgccaatggatttggtatctggggtatgtggggatggaagaagtggatatgctcccaaaccattctttattacactctccccactagtgttataaaacagttgcaacaagtctcacatctctaggaagattatttacagtgtgaccacatagcaaaagttttcaattcctttttgagttaagataataataacagtaacaacaataacaaaaaaaccagctaatctttattaaacatttaccaagccccagacattgttctaaatgttgcacatacagtcatgagtcactcaacaacaggaatacattttgagaaatgcatcattaggagattttgtcatggtgtgaacctcataggatgtacttacacaaacctagatggtatgtatatttgcttttacttatttagagacaaggtcttgctatgtcacccaggttggtgtgcagtggcacaatcatagctcactgaagtgttgaactcctgggctcaagcaatcctcctgccttagcctcccaagtagctaggaatacaggtgtgtgccatcactcctggctaattgttctttacttttttgtagagacagggacttgctcttttgcccagacaggtcttaaactcctggcctcaagggattttttgcctccaccttccaaagctctaagattacaggtatgagcctttgcacccagctcatatttgtatttacatgtttttttaatataaaaaaccaaatgttccaatgccacttctgaatatcagtcttttccacaccttggtctgcaatgccaatatccagtgccatatatcaggtttctatatatgctccattataattttatggaaccttcttgtatatgcagtctttcattgactgaaatgcagtggtgtgacatatgaatatgtttaacttatttaatcctcacaaccatcctatgaggttggtactattatcagctgcaatttaaagatgaggaaaccaggcctagagggcattaagtaacttgtccataatggctaaaatacaaaatgatggtgaaagtatagaacaaccagaactctcacactctgttggtgggaatttaaaatgttaccaccactttagaaacctggcagtttcttatgaagttaaacatatatttaccatacaatccagcctttccactcctaggcatttaccgaggaaaaagtcaaaaaacatgtccccacaaagacttgttgtgaatgttcatattaatttatgttatgttatgctttatgcataacagcaaacaactctaaacaacccagatgtcccttaactgatgaacgtataagcaagttgtggtacgtccacacaagggaatactcttcagccaataagaaagaacaaacttctgatacatataataatatgggtaaatatccaaagcattatggcaatcaaaggaaggcagacacaaaaaattatagaatatgggattgtatttatatgaaattctagaaaagacatatctctagtgacagaaagtggatgagtggtttccaggtgctgggagtcaggaggggagattgactatagagggtaagaaggagctgttttgtttcttaattgtggtgatggtcacacagccatacacatttaacaaaactcattgaattatacatttagaatggatgaattttattacatataaaataaaacttaataaatctgcttttaaggagaaaaataatgcacagctcacttaaaaaataaatctaactgttctagttccagagatggaagcaacatgctctcagactctaggcaaatcacctcaatatttatggcaacaattttcttctctaacatgagattgctaataaaagtctaacacatgtaattattgtaaggacaagttaagataatgaataatagatgagaaaataagaatgaaagaatgtcactttctggaataggacctcaaggtctcccagaaagtccctctcctctaccctattctgtcatgaggaggctctgctcaagataaagcagccctttggtagctatcacatgatactggaaaagtgaccccgccaactcaaattaatgctttctattttaagatgtgtttatggaaactcctaagtccgtccaatgaagatatatatcaaaatgaagcaatatgagaagaagagatagagacatacctaattctaaattgttaaacttattcttgcagtataactagctagcatggtttgtggaatcagacagatgtagatttaagatctggatgcacgcttctgagctgtgaacccatctctaaggttttttcatctgtaaaatcaggaaattgtgatgaagtttacatgagataaagcataagagaacttagtgtgatgccttgcatagaagaagtatttcataataataatgataaattactaattactgaatttattattattactgggaatattgcaactgataatttccaatttagtttatgtataacttctgctttatcattgctaagaattttttcaaatcaaatgtcctgtgtctagcttgctattctcatttgataaacaataagtgttttaagattaaagatgtgtttattctaggattagtaggatacctggaaattactattgactattattagataagatactcattctccttaggcctcagtctccagagggtagaaaaagttgcaacccgccttctaaattttgataaggatgtcatccgtatttaggaagctgctatccacattctaacccctgagaaaattactccacaggaggaacagtcttgatgacagatgtgtttcttcctcagtgatcatttctaatttgataatttattagttgatctcctctttggtctgagatcaatagagcattccacaaagctaggttccttgtaggcttcctggagccctgatgtcctgatcctccttctattcccatactttttctccccacatagttgatggcaactcctctgattgctcaggcctgagtccttgaagtcactcctgacatctctctgacaccacatgttcaatttatcagaaatcctgttggctctgccttcaaatatgtccagaatctgaccacttctcaccacctccactgctgctaagctagtgtgagtcactatgctctctggcctggctgactgccacagcctccaacctggtctccatgcctctagtacttctattttgaagatttttgctttctttctttgtctgtcaaaatcaagtagatatagtagtgctgttttggtctattcaggctgctctaacaacataccataaattgggatagcttttaaacaacagaaatttatgtctcagttttggaggctgggaagtccaagatcaaggtgctttgagatttgggtggagacacaacccaaccatatcactatgctatcctggagagggtcctcttttggttcatagacagcaccttctagttgtgtcctcacatggaagaagggggcaaggcagctctctgggagctcttttataaagacattcattctgttcatgagagaagtgccccaaaagcccactttcaccttagggattaggatttcaacatatgaattttgcgaggacagaaatacatagaccatagcaagtatgtattctctagaaaaatgagattaaaaggttccatagtctgttaaacatatgaactactgaattttttatccttakgatcagagaaaactacagaatgtaatttctattgaaagactaatattagagaattaaccaggaaaaaagcaactctgaagaaaatttgcaattcatcaaattgctccagattaatttatgttatagaagcaaactaaataaaaataagaatgataggccaggtgcagtggctcatacctgcaataccagcactttgggaggccaaggtaggaggatcacttaagcccagaagtttgagactagcctgggcaacatggcaagactcaaactttagaaaaaataaaaaaaattggccaggtatggtggcacacacttgtcattccaactactcaggaggctgaggtgggaggatcacttgagcctgggaggtcaaggttgcagtgatccatgattgcaccactgcactccagcctgggtgacagaatgagaccctatctcaaaaaagaaaaataataataataaatttaaaaaattaaaattaccacctgataaacttattacttcaaaataaaacaaattttatctagaataagattaatatactaataaatatcctctgtaaccagaaatgtgtagagtcaccttcagtaattgttttagctaaaatttattgattattttggatcatttccagttcacaactctattaattcacaattagttctataattcatgattattactataatgttttttattttattctttttataacaatagtcttattgaagtatagcatacataaagtatacagattacacatctgcagtttcaagcatttttacattgaaatctttttgtattctttcccagttaccaccctccccatcaaaggtaattactgtctgacttctattaccctagattttttgttttataaatttatataaacaaaatcataatagtatacacccttttgtgcctgcctttccccctgcaacattatttttgtgaggttcattcatgctgttttgatggtagtttgttcatcttcattgctgtttaatatttggttgcatacaaacmcacacacacacacacacacacacatatatatgatttatataataaaccactcctaggttatacctaagagaaatgtatagaatgcgcaccaaagaagaggttcaagaatgcccatagcaacactagtccaacttaaatgtctagtcaacattttctcccattctggcagcttgactttttatctcttaatagtctatgttaaagaacaaaagttctgccatatgcagtggtacatggttgtattccagttacttggggtctaaggcaggaggatgacttaaggccaggagtttaagatcagccgaggcaacataggaagatcccccttttttttcctaaaaagaaaggaagacaagttcttaatgtcagtgttgcctgatttaacagcgtttttctgtaagactagtatatttatgtcctgcttaagaaatctttgtttaaaccaaagccattaatactatctaggggataactatgtgtattagtccattttcatgtttctggtaaagacatacctgagactgggcaatttacaaaagaaagagatttaatggatttacagttccacatggctgaggaggcctcacaatcatggtggaaggcaaggaggwgcaagtcatgacttacatggctggcagcaggcaaagagagagagagagcttatgcagggaaactcctccttataaaaccatcagatctcactgtgacttcttcactaccacaagaacagcacaggaaagacctgcycccatgactcaattacctcccaccaggtcccttccacaaaacatgggaattcaagatgagatttgggtggggacacaggcaaaccatatcactatgctattctcaagaagacttattgttttacctctcatgtttacacctggaatacacctagaatttttttttatcatggaagatagggtcaaaattaatttattttcctatatagatatccaatttaaccagtgccacttactgataagaccattgttcttcagtatcatcttaatcaactggttttaaataacactaaccacaggaagtaaaagctgagaaaaatgttctttttcatcacttatactgtatctttttgcttatgtaagtatctgaaatctatggtaaaagatttctctaaagtttttattttctgctaatgcagactaaccagtcttaaattttaatgattcttaaascaaggcgacagcaaggtctgactatggtcttgagaaagtgacttttattgatttttgttttgcttttgtttctttttgaataattgtcaagaaataaaatggataaatgcttagggtcaaatatttttcccaagataaagcatatttttgttgaaaaaatctggacttctatataaacaaaaaagaagcagcctagtcactgaaatgtagttagcatcatatatctggaagatacgtaagtttcataaattattgaaataatgtaaacatttttaaaagtgttgacttctaaggttcatggaaattgtacactctgcttagatgtcaagaaatgtaacataatgtgaagaacactggacttagagccatgctcctgggttcctcttcctgctctgccactaaacagctttgcaactcttcttcattttcttcttttttacaattaactgggccagatcggtagtcctgaattcttttcctgctatgactatgtcacacatggttcatcgtgcagcctacccctatgtgctggcatggatcacagtctgacccctatttattagtttcatttccagttttacctccacctcaaggaagctttcctgaaagcaagaaaataaaaggctcctgggtagcaatgcagtgtcattctctctaattgattaataatatttttttgagatggtgtcttcctctgtcacccaggctggagtgccgtggtgcgatctcggctcactgctacctctgccttccagtttcaagtgattctcctgcctcagcctcccaagtagctgggattaaaggtgcccaccaccacacccagctaatttttttatttttagtagagacggggtttcaccatgttggccaggcttgtctcgaactcctgaccttgtgatccgcctgcctcagcctcccaaagtgctgagattacaggcgagttattactcctaaaagctttctcttggccacattaagctgagagcttagaattgcctataactcctaataagtcttcttttttttcccctcaatttttgttaccaaaaagacctagatattattggcttttcttgcaacacaaagatgattgctgatttttccagcagtcctaaggaaatgtgtagtttctcctatgcattctcaactaattccaccttgtgacaaaaggcatgtatttatctgccaygtgattaaaggttaaagataagtttgtgactataagatatagtgaaattaattgacaacttgtaccaaccatatgtcattgaatcaaatacgccatcaactgtaagatgaaccatcattttaagcacagcaaaagaagatgctgtcaattaaactgttaacattaccaattgtaaaatatgtccccatttagaaaatattaaaatgcattamaagtgtcttggaatctatgaaatacagtaataattatttctctatcaaaataatttgttccatcatatccaagaaaagattatagatatgagcatggtagtccccaaacctggctcttaaacagaactacctggggatttctagtttcctcttacctgttgtgtcagaatactggggaatgggcccaaggaatgtatatgaaaataagccagccaacaattaaaaaaaaacactccccacttagttctgatggtcactcatatttgaaaactattggaacagaggaagcccatctctgataattggccttacatctctattattctgcttctgttgcctaatacctagaaccagcaaaaggggaagttaatggaagagatacctggtatgttgctgtttttttttttttatctttcataaggagaaaatggattgatggaataatgcttttcatattttttgaaaattggaaatgtgaattctattaatgctggcatagattcttggcaaaaagtataaaacaagtattaagcagatagtttggtattttaaaaaagaataagttgattacaagaaccataagatagacttgataacagctaaattaaccaattatttgtttttattttgcaagtaaaatcactaggttatccagggatgatataaatatagtgtattttaagtgctgcaaggcatttgacaagcctcctgtgatayccttgagtacctgatgatgaaatatgtactagttaatagtaagcaaattcaagtttcaaggctgggcaaataaataaagcaaggttatatccttggccttatctattaataacacgtttgtccaacttgaatatggccaaggctgggagggctcactagtactaaaacaattcaaacggagtttgactatatgatcttggcatgccgggatattagggcaaaaacaaaccttctgtaattgaaaactgtgaagtctcatatttagtttaaaaatataattcaaggttgggtgcagtggctcacgcctgttatcccagcactttgggaggccaaggcgggcggatcacgaggtcaggagatccagaccttcctggctaacacggtgaaaccccgtctctactaaaaatacaaaaaattagccgggcgtggtggcgggcgcctgtagtcccagctactccggaggctgaggcaggagaatggcgtgaacccgggaggcggagcttgcagtgagccgagatcgcgccactgcactccagcctgggcgacaaagcgagactccctctcaaaaaaaaaaaaaaawatatatatatacatatatatatataaaaatatatatatatacatatatatatttcgaaaagtatggtatatgtacagttaagatatctgaaaaagtcttgagcattttagttgatttaaagtttactgtaattataaggtgtaatgtgattgttgaaaagctaaaagtattagcatgctacaaggaaacttgccagctcccttaatagaataattttccaattctccaggcttggtcatggacagagagtctccagatagggaggggcagctggacctcacagctcttgtcttaccttttaagaaacttcatgggcaccaacaaattgcaccctgtatattcttattctggcacagccataatttaagcagattggatagtcttatgactataatttaactaaagccttcaggaaaatggagagaatttctatataagaagcatcatatacaattggcttctgggaatggcttttcttaataacagaaccctagctgtcctctgggtccactgtgggtgtgacccctgcccagtgagagggttatatctccttgttaactacctggtctgcctccttgtgcagtgtctattttccccatcaccccagagccctccaaacacttctgaagactcagagtagagtgaagaacatgattctttttttttttttctcattgtagactctcttccaagttataattcgattcccaggatttatctttttcatggataactggcactgggagtgactacttcattacagtgagacctcaatttctactcatgtggttggcattacaatacactgtggcctcattaggacaactgtgtcataatgcaatagtccaacattagtatgagatacacacatgtgggcaaaacagggatatcttctccttcaaaccatattattaccatattataatttaattacattatatatcacatataatataatatctctcattctgtggtatacaaatttcatactaaaatgttatattcaattctgcatatcaaaactcaagagaaactttgacaaactgctgtggttcccaaagtacatcttaaatgtggttcccaatctggttcccaaagagccagattgaaaaaattagaaaagagagcggctggtcacagtggctcacgcctgtaattccagcactttgggaggccgagatgggtgtatcacgaggtcaggagttcgagaccagcctggccagcatggtgaaaccctgtctctactaaaaatacaaaaaattagtcaggcatggtggcgcatgcctgtaatcccagctacttgggaggctgaggcaggagaattgcttgaacctggcaggcagaggttgcagtgagccaagatcgtgccactgcactctagcctgggtgacagagtgagactctgtctcaaaaaaaaaaaaaaaaattagaaaaaagaaacttgggaaatagtacaggaatagtacaagagatatgatagctctcctcaaattccatttagatgaggaagcacttgatatttggacaatgtaactgttaaggttttttttcaactcattgtctaccgattctctgacttgttatattttttctagatggaggtactaagaccacttggtataaattacagggaagcagactttgactcaatatgattaaaaccaaaagccatcaaatacctagaactacccctataaaatagactctattatgatttcagtccattgtttaaactctctaaaaattaccctggaatgagtgctggtaggtgagtggttaatagtactgtatctgcttggttcaaaccttcgctccaccactgcggagttgtgaccttggttatggtttacaaactgtgtttctcagtttctttaactgtaaaactagataacaataaggtttttagggacaaaataacttataatttaaaaattcttagaacaatgaatggtaaatactaaacacttaataattactgagtgttgttagttctttccaaacactaatgttttgcgattctaatcttagctattttgctaagaatgcatctggcattcttcgtagataagaaagagtctattaatacaaaactcagataagggaaagattgaattgttgggcttctctggttgtgtgctatggcttaaaattttatttagtagaaatatggagtagatattaaaacacataagtttatgctgttataaaaacaatttaccatttggtgcttgtatatgactaatttaaatttgatttaacattagtttaaaaattaagtataaaaatagtagatactgaaacaaatgtaagcagggtggaagtacataagtaaattaaaaaattcttttggactacattttaagcatataaataaacatatataattttatttagttcaccaaaaatagagtaatatttacaaattgctttgcagtttcctttggtacactgttacattttaaaggaaaaattcctttgaggacgcagatttttaaaaattctgtaaagattcttgatatgcttatatcatgtaaagttgtagggactgtttgcttcaatggagccttgctccttggggtccatggcttcagtccaatcatgcctacatatcacagatcaattcaacttaaaaaaaaataagttacccgcagtctttctagaacaattgtttataacacttctccaggaatgtatttatttatttatttcattatgaataatttatttattaacaattctttattgaccgtttaggttgttccttttttttttttttgagacagggtctcactgtgtcacccaggctggaatgcaatggcatggtctcagctcactgcagcctccatcttttggttcaagcaattctcatgcctcagcctcctgagtagctgggattacaggcacgtgccaccacgtcctctaagttttgtatttttggagagacaggtttttgccatgttgcccaggcttttctcaaactcatggcctcaagggatctgctcaccttggcctcccaaagtgctgggattacaagtgtgagccaccacaactggccttgtttcattttttatagttaaaaacaacacttcatagagtgtttaaaaagtcagaaacataggactaatttattttcaaacaatgtattagtaacattttgatacgatatgctcaatatattttccttcaacttccacataccatctcaggtaagtgtctctaaagcaataaatccaatagttaatctaaagtatgatattaaaaatacaccatattctctgtgtttccagactttttttggacaagatttggggtatttttacaattacttattatttccttgaataggcagatatttaagcatttagaaattgggaaaaaaattcagtggaaaataaatgcgtggcttccagatcttatgccctacatagaaagtaatacttggaaagtgatacattagctcagagccatgatcaaccttttcctgtgtagtttctggctttggtgttatgtttatttatttattttttagaattagccattttttatatattttttatttttccataagttattggggtacaggtgatatttggttacatgagtaagttctttagtgattatttgtgagattttggtgcatccatcacctgagcagtatagaatgcacaatatttgtagtcttatccctcacccccactgccattcttccctccaagtctgcaaagtccattgtatcattcttatgcctttgcgtcctcatagcttagctcccacatatcagtgagaacatatgatgtttggttttccattcctgagttacttcacttagaataatagtctctaatctcatccaggtcatcacaaatgctgttaattcattcctttttatggctgagtagtattccatcatgtatatataccacagtttctttatccactcatttgttaatgggcttttgggttggttccacaattttgcaattgtgaattgtgctgctataaacatgtgtgtggaagtatcttttttgaataatgacttcttttcctctggatagatacccagtagtgggattgctggatcaaatggtagttctacttttagttctttaaggaatctccacactgttttccatagtggctgtactagtttacattcccaccagcagtgtagaagtgtttcctgatgactgcatccatgccaacatmtactattttttgattttttgattatggccattcttgcaggagtcaggtggtatcacattgtggttttgatttgcatttccctgatcattagtgatgttgattattttttcatatgtttgtcggccacttgtatatcttcttttgagaattgtctgttcatgcccttagcccacttttyaatgggattgtttgtttttttcttcccratttgtttgagttaaaccatccctgcatccctggtatgaaacccacttgatgatggtggattatctttttgatatgttgttggattcggtcagctagtattttgttaaggattttagcatctatgttcatcaaggatctcagtctgtagttttcttttttggttgtctcctttcctggttttggtattaggktgatgctggcttcatagaatgaattagggaggattccttctttctctgtcttgtggaatagcgtcaaaaggattggtaccaattcttctttgaatgtctggtagaattctgctgtgaatccgtctggtcctggactttttttttgttggtaatttttaaattaccgtttcaatcttgctgcttgtttttggtctgttcagggtatctaattcttcctgatttaagctaggagggttgtatttttccaggaatttatccatctcatctagattttctagtttatgtcactgaaggtgttcatagtagccttaaatgatcttttgcatttcagtggtgtcagttgtaacatctcctgtttcgtttcttagtgaggttatttggattttctctcttcttttcttggttaatcttgctaatggtctccgcatgcagctctgtctggagcttcaatccagttctgcctcccatctgccatgatcccgaaattgaagtagcataaacactttttattttaagaattgtgtatatattttaaattattaaatttatattataactaggtctcatgaaatgtaggatattgaccaagaaagaaaggaatcctgacatctggaaagtgatatctggaaatgtttggaagatttggagaaagctaaaccttaaaacttagaatcactcacttttactccatgtcttgaggaagtaatccctgcctctgactttcctgaaaacagttgaacatttctctttaagaaagtgctgcttttaatcagttatcagaatgcaaatttataagttctgagggataacatgcagatttatattatgaaaacaaaatgttacaaccagaattggctaattgatatatatatatatatatatatatatatatattttaaaatttcagtattgcatttacttattcactgtaataaatatttattagtggctatgatggcaaggtattgtgttagtttctgatccttagacttcaaggagaaaatgatatagcaaggcagtcagaaaataattcaataattttccagccaatataaaacggcatttgtgacaagtgcttccaaggactggcctgctgatccatgagcagctataataggaggtttgacttattgggggaaggtttccctgatgggttacagttaaagtcgtctcttgatattcataaatgatcagttccaagactcccaaggacaccaaaatctgtggatgctcaagtcccgtatataaaatggcataatatttgtatgtaagcaacgcacaccccctcgtatactttaaaacatctctagattacttaaaataccaatacaatgcctacacatcacttcattcctgtgtattcgatgtagtacttggtgtgcagcacattcaagttttgcttatggaactttgtgggattttgttttccaaatatttttgatctgtggttacttgaatctgtggatccagaattcagagataaagggtcaagtgtaatcaggttaaaaggcaggccgggcacaatggctcaggccggtaatcccagcactttgggaggccgaggtgggcagatcatgaggtcaggagatcgagaccatcctggctaacacggtgacaccccatctctactaaaagtacaaaaaattatcagggcttggtggcaggcgcctgtaatcccagctactcaggaggctgaggcaggagaatggtgtgaacctgggaggcggagcttgcagtgagcggagatcctgtctctgcactccagcctgggtgacagagcgagacttcatctcaaaaaaaagaaaaaaaaaaaaggcaaagacagcattccagataggcaggatagcgtgtacgcacgtgctatggtggtgttactggaaaggggtcctgattcagactccaagagatggttcctgaacctcgcacaagaaagatttcggggcaagttgataaagtaaagtaaaagcaagtttattagagaaataaagaaacaaaagaatggttactccataggcaaatcagtggtatgggctgcttgactgagtacactgtgaaaggaaaatacatcttggggcccccaaatcactaagctaaagggaaaagtcaagctgggaactgcataggataaacctgactcccattctgttcaaagtcatccctcggctcactgagataaatgcatatctgattgtctcttttggagaggctaatcagaaactcaaaaagaacgcaaccatttgtctcttaactacctgtgacttggaaggcctcttccagcttcgagttgtcccacatttctggaccaaaccagtgttcatcttacatatgttgattgatgtctcatgtctccctaaaatgtataaaaccaagttgtgctttggccaccttgggcacctgtcgtcaggaactctagaggctgtcaccggcctgccttctcaaccttagcaaaacaaacctctaaattaactgagacctgtctcaggtattcaaggttcacaacacttatagttattccttggttatatgctaaaaaaggggtggattattcatgagttttccaagaaagggaagaggatttcctggaactgagggttccttctccttttagattatatagagtaatttccggacttagctatggcctttataaactgtcgtggtgctggtgggagtatttttgagaaggctaatgcattataattagcatataatgagtagtgaggatgaccagcagtcacttgcataggcatcttggttttgatgaattttggctagcttctttacatcatcctgttttatcagcaggatctttgtgacctgtatcttgtgccaacctcctatctcatcctgtgactaagaatgcttaacctcctgggagggcagctcaggaggtgtcagcctcattttacccagccctattcaagatggagtcactctggttccaatgcttctgacagcagtagagataacacagrtaggagggatttaaagaacgtcaccgtagctaagatacagagaacagcataggggttaagcaaggtccaatatgggactagctttgttaagcagctttgcttgaagtgataaatcttatttcttcttcaaaaattcttttgaggaattttgtttaatacctaacagaaaaatcaataattaaaaaattatggtagatatcttcaagtcaactttatattaaaaagtgttccttctttgaaaggaaacacccttttcaacacccttggctttttaaaatttcatttttatacttatcagagttttaagagtcagatagatagttctagaagactgaaaatacggtaacttgctagacttctcaactgctgcctcctaattcccactttcagagtcaatcattttaaattatttcagaagtttcttcaggtatttacctctgtttttctattataatatgcttatagtgctatttcttattttttcattttagaaaccattcattttctagtattttgtataccataaaagatgaggatttagctctctcatatgctgtgtatcatctctatactttcctactcccatcctcccaatatggttctatcatattataatataagcacttaatattcttctgtaatattgttctataataattatattatataagtatattaatattatattataaaattattctataattatattgtaagcattaatatcttcaaattttaattagcattttaattgtgtggtttctttttatgcagtttttaaacctatctttttattaaaagtaaactagcttatgttttatattaataattatattttttattttaaaatgcatttaaaaatagagtgaacttaaattttgtaataaataagattacatatgttcgtagatttggcaaaaaccatgaaagtgttatggatataatgcaagtctaagaaacagtatgtccggccagtgtttggcaaattatggaccttgggccaaatccaactggctcctgcttttgaagtaacatattattgtaacatccattcaaactattttctgtgactactttctcctacaatggcagagtgaagtagttgagacagagtctgtatggctcccagagcctaaaatatttaccatttggccctttacagaaagtttgctgatctctctcccaggctatactatgaaagcatttaaaaaaaaccttaatcatcagtataatcatgactctataaggcaaagatatatttaacaaatttgtcctacattgtcccttttctacattcaagatggtttagtgcctttctacagatctggagcattccaggacacctaaggctggaggccatgtgacaacactgggctattatgagagtttctttgtttactgtttgacaggacagattctgtcttctcaaattctgtttgatcagaaatgctgtagcataataaagggagcagatgaatgactgaagccctacagctccactaaagattagagtaaaatctgcacttcaaaagatcctggtaaagcagggaaggtccttagctttccattttaagtgggaatgagacaaggggatggggatgaaagaactgggagccatcattgccagatgcatgtttgcagagcagtgtggggatcacctcatctgtccttcaaggttctgcaatgctctgccttcattttccttctcaagttaacagatatattctgactctgtctttcatgctcagtattcttgcaagagaacagagctcctgatcacctgtgtgcgtcctttgagtggatggcagctgcatctctgcattacagctagttagaatgatgagtccttgctatgcctcaagcactgtttcgagtgtttgatgtctattatctcacttcatcctcaccaggaccccatccgaggtaagttctattattgctattttacaaaagaggacactaacacacagagagatttagtaacttgccccaaatcacatagttgttacttggcagagtaaagatttgaatccaggatttcactccataacctgttttaaaattattatatgaatttacctcttttccaatctggatgccctgatgaaaggagagtgtaaagccacactccggtgcttaggggatggaatctcccttgaaagggataaacatggttaatgttaatccctaaagagaacagggtttacgcaggaaactgggactagaaagactggccttggtcaggctggagaaggaatttctggcccccacacttggccttttcctctctaggctagccttttagggaagcaaagatttagactttagttcttgaatgtgggctaccagtcagcccctttacatggaaataaagccttgagctcaaagagcatgtggtatcctgtatttcaaattaaatagtttcaagttacttcgtggattaatttcccttttgttactccctggcaaagtcttatttaaatatcctggcctcatttcacttgtgttaaggggtatcaaagggaagagacgatggtgcatactgaaccagaatatctaaagggagaactatatgccctgactctgaaactaacatgtggatggcaacagtgagcagagaactctaaggggaaatgggactttccagacataagttgaagttacaagccagaaactcctcccacagaaaagcccaatcgctagcattagatgatgaaattgtgagatgcaaaatgcaataatgatgataatgatgatgttgttcccatttggggacatgttcactatctcctagagaaacaaatatgaatctatccatcaaatagtcacacacaatatatgttaaccacaatacaatgcggtgtttcataatatcagtataaacaaagagggtaggggaggggtgctgtgagttatgccatagtggggaggggcaggcaagctggatgaagtgggataaaagttgccgaagtggctaccttgtccggggtatgtaccctgggattcattgtcgtgtgctaggaaacttcaggacacggacacacatgaggagtttaggggcagaggtttaataggtagaagaaaagagaaagagaaatagttctctctatagaggaaggggtctccgagtggaaaggtccggccggtggcaaatgcaccgaattttatagcccactttgaagaggcggtgtctgatttatgtagggctcacagattggttctatcaggtatgacatttacacagtgctcagggaaggctggttgccccaccctaatcttattatgcaaatgggctttccagttgatcggtgccatcttgtctgctttgtatggtacaagtggctggcagggaagaaacggggagccgccatcttggaaagtctagtccatagttcctctcggcatttgtccctgaaagctcccagcttgtaggctgctctttgttagaaaatgatttggggctgcttttcattaaaaagaaaagccttaccgaggacccccatacacttgcttctgcctaagtgatttcttcttaactcctatatcattactttgcacagagacaacagaagacatacagcccagactgatcttgtaggacttggtaagaaatttttaagtgaacaaaaaaaaaaaaaaaaaaaaaagaaggcgttattgccaaagttttagtaaaggagtaatatgtgtgctttaaaaagaaaaaaagggggccgggcgcggtggctcacgcctgtaatcccagcactttgggaggccgaggctggtggatcatgaggtcaggagatcgagaccatcctggctaacaaggtgaaaccccgtctctactaaaaatacaaaaaattagccgggcgcggtggcgggcgcctgtagtcccagctactcgggaggctgaggcaggagaatggcgtgaacccgggaagcggagcttgcagtgagccgagattgcgccactgcagtccgcagtctggcctgggcgacagagcgagactccgtctcaaaaaaaaaaaaaaaaaaaaaaaaaaaaaaaagaaaaaaaaaacctggaagatcttctaggacacattggaaagaaagttgcagtcaagtacaaactgttgcaaatctgcaaaaaggaggaacaggagagcacagtgctgagtgccgctgctggccctgttgcagggtcagggaagatgagactgattgaccactgatttggcaactggaggtcacttgtggcagtgaaaagaaaaatttccttgagtggtagagacaaaacttttcttcaagagaaaaagaacaatgaggaagtaaagactgcatatgtgggaatctttttcagagagttttgctatgaaggctagcagagaaacaaaagctgtaggagatttgtgaaggcagggaagttttgttttgtgtgtgtgtgtgtgtgtgtgtgtgtgtgtgtgtgtgtgtgtgtgttttagaagggagggagctattaaagtacatttgttggctgataagaatgatccaatggagaaggaaatttgatgatgcaggcagtagtgagattaatgtaggtacaaaatcctttagtatgtaagaagtgattggatgcagtgtgcaaggagaggttgggcttatattggaaccctgatgtttactctttaaataggagaaaagccagaatacatgaatttgtattcatgatgcagtgaggttgaaagtttggtggtaggtagatgagacgtcttctactgtcattcttctatttactataagcatctaattgcttctattttctcagttcataagaagtaggtcttcatttgatgtgagaaggggctagcagtatcagaaatctgagggaaaaagagaaactgtgaaatagtaagagaactacttgactagggaaaattatttgtattgcctgtcagcgttgaggcccagtctggttttaaacttaatataaggcctctgagctccattctatctctcattagctgctcgaatgaaggcatgaaataagcagacagtggatttctccacgtttgaaattttggaaatgatgtataacaagagggagagacaagtaagagtggtgagggaatgcatacaaggcactaattatgatgatggatcgtgtcatccaagctgagtagaatggagtgaggacaagaattaggttggaggagtgaggtgcaaaaataagaggtgatacctctcatgctcacatgtatcaggaccagtcacctaatttgtggggcttagtgcaaaagaaaaatttagggccactcattcaaacattattaggaatttcaagagctgggcatgttggagtatgcctgtgatctcagttacttaggaggctgaggcagaaggattacttgaggccaggagtttgagtctgtagtgtgttgtgattatgcttatgaatagccattgcattctaggtggagcaacatagtgagaccccatctctaaaaagaaaaagaaatgaaataaaataatttcaagacagtaacaactgagcattaaatgaagcatagagactgtgtaaacatgggactgtgattgctgcagaggccatagacccatgtagctggccccacatatgagcatatccatatataaaagtctgtttttgaagacccatttttattttttaggccccaataataaatgatcaattattagtagttaaagaaaaaaagaagaaaagaggtggtaactagagagaggggatgatgaaaattagtttgggagagactagctggtctaagatgtaatcatgttagcaagaggacaggattactgacattaaaaggccaaaagacagagaggtgaggatcttggttgtattagttacggggctgttataaccactaggatttgcgacttgagtagcattg

SEQ ID NO: 95587 - DNA, 60883 bp, Homo sapiens
gcacacagattagttgccctttcacagtattagagaaacaagtatgtcgcctcacttagggttacctaagaaggtccggccagacacaggaaaaacaatgaagtgctggggaacaacgagtttgaggacggaagggaaagggaaaagagaaggggagaggatacgaggaagaaggaaaggagtagggaagaaaggagggtcggtgacggtaaagagggaaggagcgaaaaggcccttccaagaggacccgtgtgaagagacagatggggatctctgcaaagagtcccaatgttaggaggtgggggtggagagggggtagggaaatggagagaaacttctgtcccttcaaaaaatctcggcttaaggagcaaagcctgtgggcgcagagaatgtaaagagacggagacagtcgctttcttctggagtgggagggccagaggctaggcacagagcggagataaattcccgtcaggggagggcgctatttggatggactggagaggggcaaacgagcagcctttggggatgggagagcgaaagcagccacagcactgaagctgagggtcgcaagctgcagcagacctcacggtgggcggtatgctccaagcagggccgcaggcgtggagtgaggagccgcgggacgcgctccccaaggcgggggcggggcgggcacggccgcgggcttccttggcggcgggctctaagccggatcgtctggccgagcctggagcgccggccccgctcggcccaccctctcgctagctcctacctgtccacgccacctctcggtcctcttagtcgctggctcggcctcccggcgcctgcccgcaggttgtcaagcgtccatgatcaccccggcgtccggcgcttttctgtctccgccgacccgtcgcccgtgcagctcccccggaagcctcccaccgctgcactcgcgttccgcccacacaaggttccacccgccgcgtttacagccttcgacctccggtggggaagtgggagcgagggggcggggaagagtctgcagcccgggaaccaggcggggagggggtggctaggggcccaaggagaggaatgcggcctagacggtactgcagcccaaccgtcgccatcgccatcccgggccccaaatcctccccttaggctgtgctttctctctcaggagctccccatggctactgcgctacccctgggcaccgagatacattaagcctactaactaccacttattgagcgttttaccatgtgccaggtgctgtacatgcattatctcgttgaattctcataactgtggcttgtattattgttcccatttttcaggtgagttaactaagtccaaaagtcagaaagtgacaaagcttgctatctttgtcaaacccaggctatctgaggccgaagacgatgttcttgacctctattcagaaaatgttttaaaataagcaagagatgggttaagccaacaatggttctatgaccaaaatgtcattgatagagttgcatctggtgcttaccaactcccctgggaagatggctaagaaatgccacataattgaacacttaaactgattcctgtatacaccacagtctttcaggtcttgaaaatgagagagaaaaacagccctatttgcctatcgtgcgttagaatgcagaaatgagacaggacaaatgcaaaggagcctagcatcaaccaactcattcatttattcaaaaacatttctttagcacctattatgtcctgaaaagttatatgaagataaaacaaagctcttaccctcaaaagctccaatgtgttaaatgctatggggaagatatgacaacactttggaagcacagaagaggttggggaagaaaaaaacagacaaaaaggggaaaaaaggggggtagtgcccattgtcacagaggctcgcactgtgcagcatatactgatgtcaaaaagaaacccagagtggtttgaccccagggttttcaagagtgagaaatgaggggtacagagctggagtcaggtcatcaaaggtcttggaatccacatgccaggtactggggaattacttaggctttttaagctaaggagaggtatgaataattgccttgttagagtgatcatgctaggtgctataggagtggattggatgtggagagaattggaggcagggaaaacctccggtgaggtgaccgatttattctagataagagattgtgttgccgggcgcggtggctcacgcctgtaatcccagcactttgggaggccaaggtgggcagatcacctgaggtcaggagttcgagaccggcctgggccacatggcaaaactctgtctctactaaaaatacaaaaattagctgggcatggtgatgcactactaatctcarmtactctggaggctgaggcatgagaatcgcttgaacccaggaggtggaggttgcagtgagccgaaattgcgccactgcattccagcctgggcaacagactgagactgcatctcaaaaatacaaacaaaaacaaaggtagtggcaattggggatgaaaaagaagggacactgttggagacatttagactatagaatctataagacttggtgaccagttgaatataaggagagggagggagcataacacccaggattctgcgctgggaggccagagctgtctagagctagtgttaagtgaacagggctatggaagaggagggacaaatatgagagtgagaggaagacaagtgagtttagtgtgacttcatagaaattccagcaatgcctctacttcctctagaacaatgtccagactccatggctgcaatttggatttagtattttggtttttttttcccttaagagacagagtcttactctgtcaccgcggctggagtgcagtggcactatcatagctcacctcagccttgaacttctgggctcaagggatcctaccacctccacctcccaagtagctaggactagaggtgcgtgccaccacacccggcaaatttattcctttttttttttttaaagatggggtctcactatgttgctcaagctggtcttccctgatctcaagtgatcctcccaccttggctcccagagtgctgagattacaggcgtgagccaccacgcccaggcagtggctgcactgaaagcccttcaaagtgtgcctccctcctaactccagctttgtcgcaccccaccccctcccccttctcagtccaaactcccatgcccggcacaacttacaccctccctctcagacaccacacctatgctcaagcttgctcttttttggaatgctcttctatcagcctgtaaaaaacctgccaactctaaaagcaaagatttctgaaatccaatgcaaaaaacactaaccataataaaaagcacggaactattgcactgtgttaaaattaagaatttctgcttgtcagatgcagtggagtacacctatagtcttactatagctacttgcgaggcagaggcaggaggatcacttgatcccaggagttcgaggttgcagtgggcaatgctggtgcctgtgaatagccactgcattccagcctgggcaacacagcagagaccccatccctcaaaaatataatttgtttcaaaagacaccagtaagagagtgaaaagacaagccatgccttggaaaagatatctgcaaagcatatatcaaagaactccatatccagactgtaaagaactacaaatcaataagaagacagcccaatttttaaaagttgggaaaagaacaggcacttcacgaaagaggacgttcaactagccaacaagcacattgaaaggtgctcaacatcaggaaaaatgcaaataaataccttaatgagataccacattcagccagaacggctacaattaagaagactgacaacaaaactcttgtgttgacaaggataagaggcacctagaactctctcatattgctggcaaaggcgtaaattggtacaatcattttgaaaaactggcaatgtctactatcactgatcatgtgcataccctccctacacactagcaattcctctcctagaaatgtgtgcaagtgtctacaaaaagaaacatgtaagaatgctcactacgrctttgctaataatagtccaaaaaataacaacccaaatgcccgccaacagtggaaaagataaattgtggtataaacatacaacagaatactattcagcaattaaaaggctacacacaacatggatgaatttcacaaaaatactgataaagtaaaaaagccagacacatactgtacatactgtattattatatttaactggaattcaagaacagagaaaactgatctatggtgatacagtcagaagagtgattatctcaatatgtaaggatgtaatactgattgggagggagcactaagtgtgctagaaatgttctatatcttgatttgggtagtggcgacaggggtgtatacctatgtgaaaattgttcccatactgtatgttacacctcattaacaaaaaaaaaacttttttaacatggaaaaaaaattcaagttcaaatgccaccttgtccattaaagttttgccagctgcaatgaaccttttcatcagggcctccttagcattctgatgtcatttctttatgccattttatcacactccatcttgaatctcagtggagtctccttatttccctaaatatatgttcatcttcctggtggcagtgaccatgtccttcaccttttacccactcagtgcctgacaaataacaggctgaaaagatatttgttgaattacatggaagaaaaaattgggtgagttcccagatgggtgaaagtggggacaggcagaggaaggaaggccaagagaaggacagaggaggtttccaaggaaaccgtggctcacactgtaattttacctacttcctgaaatcacattaaatgtcaccttgagtggcaaaaaacaaaacaccaaatcctacctaggctgaaaataaataaatatcacactccctcactcgcaagaaatccaccaaataaatgctacctaattctgggtgtttcaacagtggataggaaaaccgttcaaggagaataattcacattgccatgctgctaaaaatatcacctccttagtgtggtgcaaagagtccagactgcaagtcagccgacttagggctgaattctaactctgcccgaacttgctgtgatctgtggccaatcccttcgcctctctgggcctcaatttcctcatacgtaacaacaggggatagattagcaaagtccctttatgttttgatattctgagtatacaatccatagctctcccggtgcaaaccaggaatacagcaaaaaaccctgaaatacatgtaaaaggcgcctcagaccaacaaacaagcacgatttgaagaagtcattttgttctctttcacggtttaatcagtgtttttgtttgttgtttgcagccttaccatgatttgcagatgtctgagttccatgtaaacagaagttaactctctgcgggctgtcatcttcttttgagggtgagaagggtcttcccgttgggtttcaagtctcgggattccgaaacgaccaactcagcgggcgggtttgtgaatttgcgcacactgcgcggcacactggagtctaagttacagaggaaccgagtgcaggggatgctgggatttgtagtccccgggcctctttgtggtgcgctgggatctgtggtccmccgagtgcgccgctggaatgctgggaaatgtagtctctgtcgcgtcgcacagtgcaactcagctgccgtctcagacggctagtgtgytcagtggctggagcaggtccctaaagsctctgcagatccgaagccaaccctccgctgggacaaactctaggcaacaacaccagatgaatattgtgtcctatgggacttcccggggagggcccttcccattgwcgttaacagtccccctgcgaagccgctgcgcgctcctactggctggttgagatgccaatcgccaaggctggctttccattggttccaggagggcactgcgaggctagggggaaggagaagggatcagaagcgggagctgaggggrgagagaggccggtcctggtctggccgctgcggctgctagcccgaggtctccaagccgggctgcggctccatcctcggctcctgggcaccgtctgcgaggctccgccgaccagagtgagaaagccgcgggcggcgaccgccgcatcatgtcagccaaggacgagcgggccagggagatcctgaggggcttcaaactgtatccgtccgggagcggggcggggccgggaggacttgggaggcggccgctcactgaggagactggccgggggcgggggccgcgccaggtgggccccacagaagaagggccgcgggaggggagaggaaaggaacagcgtgccgagcacccggcgggacccggcgcgagaggcgccccaaggggcgtcctgagggaggaaggggacgttgacgggagcgccggggggtggcgggtggagacgggggagcctgggggacggggctgcgagaggtgccgggcgtcggaaacgctgtcggagaagccggctgggttccgatccccggccgggacccagaggccgggatggggctgcggcccgcggagaagggctgagggggcgcggtgggctgatctcgaagcctagaagcctctttggctataagcctacccggggagcggggaacagtgacttggagcgggcgaccttgtgtgggacaaataccagtgcttttaaaactctctcaggtcccccaccgcaccgcaccgcaccccacccccgtctggtttccacaacttctcttccaaacttgtggcttcttccaggactggagtagttgggggaggtggggaaagagaagtccaagatcgacctcgtcttaacactcttggccttctcaggcattggtcactgcttccccctcagcgcctcagttttctttccagcaagatgaggaccataggcttaggtgtggggtgcctcgcgctgggactcctagccgaggtgtctttgctcgctcctgtcggtgcggttatgcctagctgtggtggagctgtccagcaatggtgtgatgtcgctggggccacggtaggatagagtggggtagagaaatcattgcctcgggcctgttgtggtgccccttttgcatcctctccgtaaggaagctttgtgttttcgtggagtgtgttagtctgtcaccatatgatgcagatgaaaaaatgcaaacttggatattcaaattttccattctcctgccaactttaatctcttcatgcatcctatctgtaatctatagtacgaacgttcttaaattgctccctcagtgaaaaggtagtcaccacttcagggctcctcccttggaggtttagtaaagcactgttttcttggtattctgttgcgttttcacaatgtccatgtcacgcttgcaaatttaattgctttgctataatcagaaaccaagttggtaatacattttagaccacagtgcaaaaaggaagttttggatgtacaagtgagatttttcgaatggaaattgatctatgctttttaaaaaaactaaaggctgtatcacctttgcatactaccatctgtgataaactttcagtactttcatgttttggtttagtagcagcctcttttatagctccatgtgcctttctgtgtttctctccataatggatcaaataggtatatagggatgactgaagtgctggaaaagctatgacatggattttatttttccctcaaataatttatactattaacatctaacaatgtaataatattgctacttaacatgctttgtagacagtaaaccggaaactggagaattgagagatttcagaagcaacgttttcatctgattggaaataccgtattgctgaaaagaagaaaggcctttttaatggcttttgaacaaagcagaaaagtttgagcttctcaccttcagtcttagctcttgaacctgttgagaaagaggataagagacaaatacggaaaagagtttcagaaagcagaatctgtgtcagcccactggaaggaaaagcgaatcaaccgattcagtgatgttagtgcatccagaaacaggcttttgggaaaagcttgacctgagctgattaaatcctgaagcacaarggaagcagccacatcaaaaagttagcatgagagcagtggcgtgctcatcctctggtagcctttactgggcatttgtggagtaagagagaaaagaaaagcaggaatgttaagatatgctactaccttcaggaaaaagtaaaattaatgttttagtaagaaactgactattgtccaccttttattgggtaaatagattttctgaactttctttcagagtatctgtttctgtaagaatagtttatcactgcaaaaagagcaccattatgttctcccaccagcagtgttgatagtactcagttttccacgttgactaggtcagtcttttttatttgccagtttggataacaaatgatacattgttttaattggtattcttctggatccctagatccatgaaaaggtaatgtagcatagtggttaagagctatactggactatgtctctatactgcctgcattggaattccagccctgcgctcctagttgtgtgtccctgagcaactgctttaacctcacctcaattttcttatctgtaagatggggaaaataatagtacctatctcatggggctgtaagagtaaatgagttgatatctaaagcatttagaaaagcacctgatccacagtgagcattatgctttagccagtgttattcttgttattattagagaagttgcacatctcttctatttggccatttctttttcttctgtaaattgtttgttaattttgtttttgcccattttactattgtttatttttcttatttgtagatgttctttacatattgtaatatcaatcctttgcctattatgtattttgcaaatattttctttcaatgtattgtctccttttttgttgaacagaatttttaaattgtcatttcaaatttattttatttcatttgtttgagacggagtcttggtctgttgcccaagttggaatgcagtggcgcaatcttggctcactgcaacctccgcctcccaggttcaagcaattctcctgcctcagcctcctgagtagctgggattacaggtgcatgccaccatgcccagctaatttttgtatttttaatagagatggggtttcaccatgttggccaagctgttctcaaacacctgacctcatgatctgcctgcctctgcctcccaaagtgctgggattacaggcatgagccaccgtgcctggcctcaaatttattaatatttgccatctggcttttgcattttgtatcttgtttaaaaagatctttcttatcccaagattaactaaatatcctatcttttcttctcttttcaatgtttagctctttaatccacctggaacgtatttacacatttggtatgtggtagacatctaagtacttctgctgtttggatagccaatagttccagtactatttactaagtagttagtccatcttttcctcactgttttgaaatgccatccttgtcatatactaaattttcataagacataggtttttttttggattatttctgtttcattgatctatttgtctcttcttgtacctatacacatttgattgaattattatagctttataatatgatttagtatagtttacaatagaatggtctgtgactaacataatatgtgtgtttaaggtccctacaaatatgtgccccttttgttcacatggaagcttgcccatatgcccatagtagatagaaacatgaggacttggctgggcatggtgactcacacctgtaatcccagcactttgggaggcctaggtgggaggattgctcaaggccaggagttcaagaccaacctggccaacatagcgagacccccaactctaaaaaaaaaaaatttaaagatactgcataaaagtgaatactgtatgcataaattaggcatggtctgagtgaattcagtagaagctttgtatttgccatcagttgtttcaaaaacaaaatcttataagattttattcttgtatcaccttcaccccatctcaccctacctctttcagagtatctgtttttgtgagaagagtttatcactacaaaaagagcaccattatgatctcctgccaacagtgttgatagtactcagttttccacgttgactaggtcaatcttttttatttttgccagtttggacaacacattgtttcgatttgtattttcctggatccctagatccatacaaggtaatatagcatagtggttaagagctatactggactgtggcgctatactacctctcaagaaatgcaaggctctcatacacattaagaaccttgcatttctttcttgtttgttaaaagcataacatttcctaattgtaaattaatgttatgaatgaaatgttacttggggaacaatatgattctcctgcaaatattttggatttgattattttaagcagctgacatagagattgatgtttgtaaatcccacgtttcccatttcgttccttcaacaaaggtctgttgggtgactattatgtatagggcactctacacttgaaggatacaaaaatgaataacttacagtcccttctttccagaagcttaaccagctttatgtctgtttagaaggaatatcttcaaaagcaatgcattttttaaaattctatttaattttcctattacaaacgccagccacctagagtgacctttgtaaatattatttaatatagccttctaatgtagctaatgtttaatgtgttttttataaaaatggaattgtaaatatcactttgtaacttactttgttcacttaataatagatttaccatgtttatgatttccaaagatagttactttcagttgctttcactgacagatttgtcacagtactcttttttttttttttttttttttgagacggagtcttgctcttgtcaccccggctggagtgcagtgatgtgatctcaactcactgcaacctctacctccggagttcaagcgattctcctgcctcagcctcccaagtagctgggattacaggcacctgccaccacgcccggctaatttttgtatttttagtagagagggggtttcgccatgttggccaggctggtctcgaactcctgacctcaggcctcccaaagtgctgggattacaggcgtgagccactgcacctagcatttgtcacagtactcttatactagctttctagtatagtctgtatctactgttttgcctatttgaatagctttttcatcaacataaaaatataactttattaaattaacaagaaactgacagacttccataagaatgaattatgcttttatgatttcattatctttaatccatctgaattttctttggtataagatacagagtagtaatgtagcttttttttaatattggcttattgtctccatttatttatttaattcatttatacgtcagatattataatatccagaatataaatggctgcctacaaatcaataggataagcatttaactcaaagtggacaaaggatatgaacaagcagttcctagaagaaaaagcagatgaccaatgaataaatgaggacatgctcaaccttgttaaaataatagactatcttccgggtgcaggggctcatgcctgtaatcccagcactttgggaggccaaggtgggtggattgcttgagcctagaagtttgagaccagcctaggcaacatggcaagaccccgcctctacaaaaaaaaaaaaaaaacacacacaaaaattagccaggtgtggtggtgcatgcttgtggtcccagctactgggaggctgaggtgaggggatcacctgagcctgggaggtggaggtcgcagtgagccaagactgtgccccactgcattccaaccagggtaacagagtgagaccctgtcaataataataataatggactatctcttcccaattaattgacacagatttaaaagattgataatatatatgtatatcctgaaagtggcactgtacgaaaataaaattaaaaattaggccaggcacagtggttcacgcctgtaatcccaacactttgggagaccaaggtgggcagatcacttgaggccaagagtttgagaccagcctgcccaacatagcaaaactccctctctattaaaaatacaaaaaattagccaaacttggtggcacacgcctgtaatcccagctgctcaagaggcagaggcaggacaattgcttgaacccaggaggcagaggttgcagtgagctgagatcacaccactgcactccagcctgggctacagagtgagactctgtctcaaaaaaaataaaaataaaaatttattaaaaaaaaaaaagatgccaggcacagtggctcatgcctgtaatgccagcactttgggaggccaaggtgggcggattacttgaggtcagggattcgaggccagcctggccaacatggtgaaaccccgtctctactaaaaatacaaaaattagctgggcatggtgtggacagctgtaatcccagctattattagggtgcctgaggcagaagaatcacttgaacctgggaggccaaggttgcaatgagccgagattgcaccactgcactccagcctgggtgacagagagagactcagtctcaaaaaaaaaaaaagataatattcagtgttcacaacattgagggaaaggggcactctcatttggtttatgtgtgtgtgtgtagtgtctgtagaaagtaattggtatctatcaaatgtttacacattactgcagtagagtatatagcacagtggttgagagtatgggctcacttccaaggtttagacttactgcctctgctattgtgactctcaacagaacactcagactctgagcctcagcatctgtatctcatattatcagagggttgttttgagaattaaatgaaactgcataaaagatgtttggttcagggcctggcatatagtaatatctgctgccattcattttattaataattactaataataatgacaggccaggtatagtggttcatgcctgtaatcccagctctttgggaggccgaggtgggtggatcacctgagtttgggcattcaagaccagcctggccaacatggtgaaatcccgtctctactaaaaatacaaaattagtcaggcgtagtggtgtgcacctgtaatcccagctactcgggaggctgaggcaggagaattgcttgaacccaggaggtggaggttgcagtgagccgagatcacgccagtgcactccagcctgggtaacagagtgagactccatctcaataataataataataataatgacaatagtgttaatatgattgtaaagctacttatttctctgagatataactaatgccttcattctagttatattttcttactgaaaaactatcgtatttccattttgcctctgaataaatgattcaataagcattgatatatacctcatgtttatcttgtctagaaaatgaatctcattctaatttatggcaggttagcaaaaagagtttgggctcagaaggtttctgaaagcatctttcacttgttttcttacatttcttctcccatagtttggtcctggaatccctgtatcttctttctcatagtaccttaatccttgactttgcttccaatcaaaaaacagttggctttacatcttctatttactcacttagaataaagaataagaatagtagacatattaagaaaagtcgactgtagaacttctcttgaaagtcagtattccctggtacagttgccttggccaaatgttaaaaatgaatttgaggtttattatttcccataatataggttttgtctgacaacccaaagtcttggaaagcaaccagacataccactcataaagcccagtttcatgtagattgtgattggtagcttgtttcctcatgcatggactcttgagagtttgtattgttatcctgaatggattaaatgaatataatgtcctattgattatcttaggattctttttttcttttctgcgacagggtctcattgtcatccaggctggtgctatcatagcttactgcagccttgacctcccaggctcagatgatcctctgcctcaccctcctgagtgcctgggtgcacaggtgtgcaccactatacccagctaattttcgtattttttctttgtagagaaacggtttcactatgttgcccaggctggtcttgaacttctgggctcaagtgatttgcccaccttggcttcccaaagtgctaggattacagacgtgagccaccacgcccggccttacttaggattcttaaacaggcattcctgcttttgttttttggaaggaatttagtgtataattagatatttatagtcttctactgactttctaagtttcttgccagggttgtgtatatggtttataatgaaacattacagtaacttctggagaaatgggacagaacacggtaaaactgtcatggagaattccagttgtatcaccactacatttgataaaggactagcaatggttctgaggcttggaagctctaggttcttactagggttgacctcagttttgcctcccaggcctcacttgtcagcattctgcatccacaaatcctcgtgttatgagaggatttgacttatagacctatccctctctattcctgagctaaagcctagcatcataggaaggaattttaaggccatcttctccagcagcctgactattctaataattgcttgaatgcgtaaaactcaaattgtcaaagttctgagagcagcattcttttttgcttttgacctgcttataattttggagctgggaagaaaagcaaatatatttcttacagtccaatatccacaaagatttcaatggattggactaaagcttactgtttatggcaaagaaggcgatggtctcaccgtaggacacatgaaagcttgtttagtctactgcaaagggaggcaggggaaagtggagctggtataaaggtgggccacttgaaacatggcatacattcaataatgggggaactgaagggagtttaacctaaagatgaaaagagttggacaagagatatgagtattctcttctaaagttaaaaaaaaaaaacaactgttctaaagaggaagaattaaatgttgctgtgtagctctcagaggaagtacaagatttgcggggtagaaattacaggtgacagagtttaggccagtttctaacaattagtagaattacctgaaaaaagacattttccagaaagtgttttaagcagcagatagatgcctgtctgtcaagagtgttgcagagggaaattttgtatgtatcaaatgtgtattacagtagatgatctacagaaatactcaaatccttttccagcactacaattctttgatttggtgacagcctttcttacttaacaagtactttttttggcaaatgtttatattgagatatgttctacacctaaaatcggcaaaaagtttttttgtgacccaattgtttcctttttgtttctgacacaactctgagacactcagtattgaagtgtttggtttagtgcattgtggatacaactgattcagagtcaaggagagcaattattgcctctgaatttagataacatttagagaatgaaacataaatagctgtaatataaattagcactgtaaatatagccacaagaagaaacagcatggtctagtaatatctcataattctatactgcttttcggtttttaaagaactttgatatattactgcattatcacaacaaccctattcattgttatcctcactttatagactaaggaattgaggatcgacgaggcagtcacttagacgaaggcagaaccttaatttaagccttgttttgtctttttaaaagtccatgttttctacagtataccatgatgcctctctggagaatttattcttttgttgttgtattattaattttgagttttaaatttttctcagcttggctgagcaaggtggctcacgcctgtaatcccagcactttgggaggcctaagtgggcagatcacttgaggtcaggagttcgagaccagcctggccaacacgccaaaccccacagaagctatttgggaggctgaggcacaagaatcgcttgaacccgggaggcagaggttgctcaaaaaaaaaaaaaaatttctcagctcactgcagccttaacctcccaggctcaagtgatcctcccacctcagcctctcagataactgggactacaggtgcacaccatcatgcttggctaatttttgtgggtttttttttttttgaaatgaagtctcactcttgtcacccaggctggagtgcaatggcgcgatctcaactcactgcaacctctgcctcccaggttcaagcaattctcctgcctcagtctcccgagcagctgggattacaggcgcctgccaccacacccagctaatttttgtatttttagtagagacagggtttcaccacgttggccagacccgtctcaaactcctgacctcaggtgatccattcacctcagcttcccaaagtgctgggattacaggtgtgagccaccatacccggccaatttttgttatttttttagagaccagattttgccatgttgcccaggctggtcttgaactcttgggctcaagtgatctgactgccttggcctccccaagtgctggaattaacagacatgagccaccatgcccagcccttgtctcagtgtttaagtcacagccagatttatttttcacttgaaaattatcctcttctaatgtggtcatatctcctatattcttttttttccctcarttcaccagatacaggggccagggtttagcccaggataatgaattttttaacaattagagttaccagaggaaaaaaagacattttccagaaaatacttaagcagcaggtggatatattcttgttttcatatttttttcatcttaagcacagtcctcttaaacattgtcctctgtagtcaagagatggctactcataggggtctgattagcaacttcagtgatgatcaaacataggaggttgttactcaagtctgataagcacaagattgtgtccatatagttttgtccaataaagtaacacaaaatttatcccacaacgaagttgttttcagatgagcaattcagataatctcgttaatagggaaaaaaaggtgaaaaagtcttggatactagcatggataaacaaacatgtcctggctttgttcagaatacacaaggctaccttgtgaccagcttatttcagtttcattttgaaaccttttccttaaatgtctatgaaaaatatcaggtgaaagtatattgtgggtagcttatagaaccaactcgagggttcctgttacagagtgttattatgcatttagagtttgtttcaaaggccccttaagtatttatggattgagataagaatctaacagactatttccttttctgtgattctctgttaaaaaatgtggtcccatctgtggtctcagctattcaggaggctgaggcaggaggatcacttgagctcaggaattcgaggctacagtgagctatgattgtgcctcttcattccagcctgggcaacagagcaagaccccatctctagaaactgtgtgtttgtgtgtgtctgtgtgcatgtgtgtgtatatgtatatctgtgtgtgtatgtgtatatatatatatacatatctctgtgtgtgtgtgagagagagagagagagagagcaaattgtaggatagtcataattatgccatgtgtggcactgctacctaggtgactactctgtgtgaaaagtatggttttcaccaggtcactgctaaagattaagaaaaagggactaaatctgagattcagcattttcatgaaataggaagtgagaaatgtaactgtaagccttaattgcttttgagccatcttctgcctaaggagcaaagacaaaggaaccagaaaagctgcgttctggtcatagtgctgccactcactggccattcattcagacatttgttaacagaatctgtacgtggcatatcatctgctaaaccaaagagaaagaaaatgataaagcaggccaggcatggtggctcacgcctgtaatcccaacattttgggaggccaaggtgggcggatcacatgaggtcaggagttcgagaccagcctgaccagtatgatgaaaccccgtcaccactaaaaataccaaaatgagccgggcgtggtagcgtgtgcctgtaatcccagctactcgggaggctgagacaggagaatcgcttaaacccaggaggcggaggttgcagtgaggtgagatcgtgccattgcactccagcctgggcaacaagagcgaaactcccgctcaaaaaaaagaaaatgataaaccagtttccatgaccaaataacttgtattatataagggagagagaaagagaccataacaatcagaatgcaatgtgttacatgccgagtagtatcaagtactgtggaaactcagagaaagggtgactcctactaggggtgttgtgggagacttcaagaattatcacttgaggtcgggcgcggtggctcacgcccgtaatcccagaactttgggaggctgaggcgggtggatcacttgaagtcaggagttggagaccagcctggcccatggtttcaacatggtgaaaccctgtctctactaaaaatacaaaaattagctgggcgtggtggtgcatgcttgtaatcccagcaactcaagaggctgaggcaggagaatcgcctgaacctgggtggaggttgcagtgagccaagatcacgccaccgcactccagcatgtacgacagagggagactccatctcaacaacaacaacaacaaaaggattatcacttgaataggatcttaaaagatgaggtgttacccagtttaatctttatgacagtagggagtaacagaggaaggaaagtgtttcaagagtgagttggagtcaggaatgaggaaggatgaggaccaaacaaattcttggaattctttgaaattttattcattaatgatatttaagaatcagctgagagtcccatgataccttataggtcattgtgatctttttaagaataatagatagtggcagatacagtggctcacacctgtaatcccaacactttgggaggctaaggtgyatggatcccttgagctcaggagtttgagaccagcctgggaacatggtgaaaccctgcctctaccaaaaatacaaaaattagccaggcatggtagtgtgtgcctgtagtcccagctactcgggaggctgaggtaggagtatcacttgagcccaggaggcagagattgcagtgagccaagattgtgccactggctactgcactccactctgggccacagagcaagaacttgtctggaaaaaaaaaaaaaaaagaatagttaaagaaacaaagtataatctttcaagattagaaaatgaatacatgaggaaataaagtcagaaataatagattactctttcaagaaatctggtggcctaagaaagcagatattaggggagcagcttgagtgggtagatagaattcattaaataatggaaatcacttatttaagctgactttgtacaagtcacttaatatctgtaaaacaaggataaagtggttgggtgcggtggctcacaccgtaatcccagcactttgggaggccaaggcgggcagatcacaaggtcaggagattgagaccatcctggctaactcggtgaaaccctgtctgtgctaaaaacacaaaaaattagccaggcgtggtggcgggcgcctgtagtcccagctactcaggaagctgaggcaagagaagggcatgaacctgggaggcagagcttgcagtgagccaagatcgcaccactgcactccagccttggcaacggagactctgtctcaaaaaaaaaaaacaaggataatgcatgctgtttgatggagatgttatgaaatttgaacgaaataatacatgccaactcaatttaaaaaccatagctcttcaaatgcactatgcttgctattacattattacaatcattatttacctttgctttaaagtaggatatcagaaaagtcagagccttagtgattgttttttacttyagcttcgatacctgtgagccttttttcacatttctgggaattaattgtggctcttggagtgacaacagaagaaacccccagatgacactgaaaaaccagaatcatctttgacttagctttttttttttttttttttttttttgagacggagtctcgctctgtcacccaggctggagtgcagtggcgtgatctcagctccctgcaacctccgcctyccggattccagccatcccgagtagcctcagcctcccgagtagctgggattacaggcatgcrctaccatgcccaactgatttttgtatttttagtagagacagggtttcagttggccagactggtctcaaactccccctgacctcagatgatccacccttctcagccttccaaagtactgggataataggcatgagccaccatgccccgccagctttcatttttttaagagttataatttgaaggagttgagtttcttcccaatactatagcattttttaaaaactgggtgaaattcaggaatctgaatgtagattttgacaggattcaaggcaatatccctgtgcctccaaataacctgaaagaaacagtggcccttttgggaacatgcccttgggaaaaggccttgtattatttcttcytcagtcaggaggtgctgggaagcaaataaaagtgcaaagggagcctctaagaatctctttggatatgtctcttctagcttgtttctgaccagttccaggcacataactgtacatgtcagtaggataatgggctgactagaaaaaagaaaggtttgcgttattgtttgactttgctagggagaagactgtgttatgtttcaaatactgatctttttctcattactaaattacttgcctccactgtttcccaggccagtttgaattttgattgtatactttccaagcatagtaactttgccagcacaagagtattatttcacggggatatcaccactgattacaatgctgcatattatgtttcaaggatactgaaacctgggttctcagagatccatttatattttctcatcttatcccccataaatgggaaaatcactgggaaattattgggtggagaaatgcatttaaatgaccgtgaattagaattggtccttaagaaggaactaaaggcagaatgctctgtataaccaacactaaggcagaagcataagagggctctgacataagtggtatttaagaattaatgaagaaagtgggagtaagagaaggaaatgagttcagaaaggaaacaaggaggagagagtttgagaggggagagatcataaaggcaaagtgtgaaaagatagagaacaggaagaaaaaagccacaaccaaaaactatgaaaacagagtaaagacagacagccctgtaatgaaaatgctcaggataccaccaaatagaaactccctttgtttactgctagtcattgcagctgcttccaccccaaagtaatgagaagggagaggtttttctttatgcctgtgaccttggttttgaagctttgcctcatagtgctctggtctgccatagtagacattagcatatatcattatatgcttagtcagccattttgcctgaaaaatatacttacctggaaattactcagagccacatgcccatatataatttatgagtactctgtcaagtcatgaattcaaacttaatgcagaatgggcttttaaattctaatatattgttacttgcaattcagctgactgacttakgtgttgtccttagggagagtggaggttttttggttcgttggtgggttggtttttgctttttttttctttctgagttccaggtttaagttgcccccctcccacttttttattttttattttttttgagataggatcttgctttgccacccaggctgaagtgcagtggtaagatcctggctcattgcagccttgaaatcctgggctcaagcagtcctcctgcctcagctttytgagtagctgggactataggcacgcaccactgtatggctaatttgtctttttttttttttttcccttccgtggagatggaatctcactgtgttgcccaggctggtcttggattcctgggctcaagcagtcttcctgctttggcctcccaaagtgttggtattacagrcatgtgccactgcacccagcctgaattgccctttttacagtccactggaccctgaaagcatcgcttgtggttgctcagcctgaagagaattctaatgaactctccctctattgcttagtgtgattcaacacatatttgagtgtcagttacatgctgagcactgagaagagaaagataaataatatagtgtcagtagaatttgacttgcaaactaatatattcatggtactctccgataagtactgtgacacaggtataaacaagtggccaggataggaggtgatgctgtaacaaacaacactttggagaatggaatgtatggcagagactggactcagtgtcttcctccagtaagccttgatttgccatcttgacttcttcacctgaggcatatagcaatttgttacacatgctggcctcctggttgcctgttgatttcctgttctttatcaaactatcctttctgttgacagcctttcttatctcacccttctctgttgtccttttaacctattaatagctcattagaaaaaaattaatattccccataactatttacaaagcctaaactttctgtgttcctcagaaatgtgtatgaggatggaaggagtttttgttgtttttggagacagggtctcactctgttgcccaggctgtagtgcagtggtgcaatcttgccctcagcctcccaagtagctgggattaaaggcacacaccaccacatgtagctaatttgttgttgttgttgagacacagtctcactatattgcccaagctggtatcaaactcctgggttcaagtgatcctcctaccttggcctcccaaagtgctgggattacaagcttgagccactacatctggcaagattttttattgaacactcacacaagactagactaagaccttgtcaagagcaaaagtcttatcttattcttcctgtttcctagaacaatgctgcttaaactatggctggcaaaagaatcggggttttacttctaatccttcatagaccaatatttttgtaaaatacagtgagattaattattagaaaaataacataaagccaggcctggtggctcaagcttgtaatcccagcactttgggaggccagagtgggaggatcacttgagcccaggaattcaagaccggcctgagcaacatagactctgtctcaacagcaacaacaaaaattaaaaattatccaggcatggtggcacatgcctgtagtcccagctactcaggaggctgaagcaggaagatcacttgaacccaaaaatttggggttacagtgagctgtaatcataccactacaccccagcctgggcaacagagtgagaccctgtctctaaaaaaaaaaaaaagaaaaaaaaagtttttaaagaaaaatgacataaaagtttttttaaattattattgaaatcaacaaataaattattctgctgtattgttattaaaaattttaaacacatgtcacaggctggtagcaaatggattcacagaccaggaccagtctgtgggccacattctgagtggtacagctgtggaatccccaatatttgcacctgatacacagtacctcaatacatgtttgtgcagtaaatacatgaatgagacgattggaatgattatagtagtaggcaaggaaaaaaggagaatagaggctctctttggagaattggagggaaatgattaagtgagaaactcaagatgactgcaataatgctaccctccatgtaaaacaaactttttgtcatcattcactctgaatactgttcctttggctctctagcaagacagataaatactaataaatactctctctgaatttctgcaaaatatagttttgatcttgctgaatatgtagaacttgctctaaatgactgcacaaagatgtcaacctatttatttaaacttgctctcatgagcagatctatagtagctaggattgatttcaaatattaacaactgctcttagaaccagtgcatttttccatgttgcaatatggagcatacsaccaaatgctttctctggctgcaattttcttttcttttyttttttttttagtagagatggggtctcactatgttgcccagtctggtcttgaactcctgggctcagctgatcctcccggcttggcctcccaaagttctgggattacaggtgtgagccactgcacctaagatctctgtctgagattttcttgtttcctctgtgtcctctcaaaagattagctgaatagggtaagaaatatttttatgaaaaactttgaaacaaacaagccttctacgtccattaagataattttgcgttgcttacagcactacaagtcttcagttcttaaaaccaaattgttaggccaggcacggtggctcacacctgtaatcccagcactttgagagggcgaggcaggaggatcacttgaggtcaggagtttgagaccagcctggccaacagggtgaaaccttgtccttactaaaaatacaaacattagctgggcatggtggtgcccacctgtaatcccagctactcgggaggctgaggcaggagaatcacttgaacccaggaggcagaggttgcagtgagctgagatcgcactactgcactccagcctggtcgacagagcaagactgtgtctaaaaaaaaaaaaaaaaaaaaaaaagcgttagtccttgaatccacttcagatttaaaaaaaaaaatagtttcattcaagggatagaaaagaggaggtctactttttaatagccacacacatagctatactcaatggagatcattattttgaaatatttaagctcmcaatatttaagtgcaacttacaacagggaagttttgttatcataaatggaattttgttttcaatgtggatcagtacaaattcaataactcaatacatcatcttccttstctactaagcatatccccaagagaacattgttaggaagggcaaaagggccatttccatggtatatttgaggaagtctgcttgcctttctcaccctgtcatcagttccctcagctcttctagccctggaggaatgtcgtcacaaagatacccaggaccctgcagttccctggagcctttctgttcccaagggtatgtagtgtgaacagacctctgtctgaatgttagctctgttatttaccagctgtgagttcctgagaaagatatttgactgctgggagcaccagtattttatgtgggtatgagtattaaataagactgaaaaataaaaaagagggactgttagcacagcacgtgacatatatgttgaaagtaggtactcaaatattagctcttttmccctgactcttgtttctttgaggactacctttaaactatgaatatagctagatgccagataaggctagaaatattgttcaccttttccctggcctcatgctgtctgcagttaagttaaacaagactgttagaaagctagccctgagaaatgcaaaaatagttaagactttatctgtctgcattgataatgaaccacaggttaagaattattgattcataggccaggcctggtggctcacgcctgtaatcccagcactttgggaggccaaggcaggcggatcacgaggtcaggagattgagaccatcctggctaacatggtgaaaccccatctctactaaaaatacaaaaaaattagccgggcgtggtggcaggcaccttgtagtcccagctactcgggaggctgaggcaggagaatggcgtgaacctgggaagcggagcttgcagtgagccgagattgcgccactgcagtccaacctgggcgacagagtgagactacatctcaaaaaaraaaaaagaattattgatttatagccattgttgggccaatacaatcaatgggatttccgtttagcctttggagattttatagaaatggtctcagaagagagaccacaaccttagtcttagactcatttctgttgtctccattctaatgtattcatggaccaagttatcaggcaacacgctagtacttgaatatggaagagatcatccactcaactggtattagatctgttacctggacattgttagggctttatcacctttatatagactgatgtggttcagtaatttctggagagcttggctgagctagaaaatagtgtcactagccttgcagcgtgtcctttttataaatctgccttttacccattaaggttatataaaacttaaaaatcaagggctccaaaagtatatgggttttgacctgtggaatacactagcagcataatctgatctggcatcttgtatcctgtagcatttggaaatgtctttctaatctcatgtgctagaggaactacttgtcttgtaccatgagtttagggatcatgagttattcatcttatatccctcagtctctccctggtacaaactgggtatgcaggatagctgggggtgtcatataaagttaaaaatcacagatgttagaatcaggcagtcaaaaaccaacttgaccacttaactggctttgtgaccttttagcaatgaaatgaagcaaaaacttaccatcctcaaacctgtacagattcctcatccatgtaagagctataataataatgcctatttcatagggttatgtggattaatttatacatgaataatatctaaattattagcatactatctagtactcagtacatcttagccatcatcattatatagtaaatagatactgaatgtgaagactgtatacatttctgccaaagtttcatatacctaagcgatgtgtaacacaaatcatgtgacaacagaattctttccatatcttggtaaagtcttccccttactttcttctattgatttaaacagaaatttacttrgatgtgacccatttgataaggaccagctgataaagtataccagctgattcaaataattgctccagctaatttacatgaaggttttcctattttattgtttttagaaattattttggaggtataaaagtctggtagtgacttatgaatatctttacattaaatgtttaccttattgttctaaaaaatactaaacatttctcatttctatgggaaagccctcaggagaaaaacacttttttccctgttttgggggctatgtctctagcctgcctggaagtttagaaattcccagaaggatattgccaagaagccgcaaagggatgccatgtttgagtttcttgccattcttactgcttataaagagaagcatttgggcagtagttcactgtttgttgttagttcctaaagcactgccacgggagacttatactcctggggtctcttcatgtccccaagagggagttgatggaagatggttattaayctataccaacttcagtttattagcttttctgcttcccaaacatgtttttggcagagaaatagattccacagatccctttatagtgcttctctatccctttccagcactgtagccaagggtttattttttccataacaattttttagacatttgatctttttctctcactgcctgctcctcttctcccccatgcttgcttgccttcctttgtacacacgaataataagctccaatggctgtttttccccctgaaaaatgtgttattccaaacctttccaatctctaaaatcttatttcctagaaatacctttttcctttttttcctctttaaaattgctttatttatttattttgagacagggtctcactttgtcgcccaggctggagtgcaatggcatgaacacagctcactgcagccttgacatctgggctaaagcaatcctcccacctcggtttcccaagtagctgggactacaggcatgtgccatcacgcctggctaattttttttttttaatagagatgctgtctccctatgttacccaggctggtgtcgaactcctggcctcaagcagtcttcctgcctcagcctcccaaagtgctgggactacaagcgtgagccaccatgcctggcctagaaatgtcttttaattcccagcctcaaccctttgttcatccactgtggaccaccccttcctgtctggtggtatagagtatgggctttagtggctataatttttttcttttcactctttatgagagttttctttcctggtaccctaaagctactcaaagtatggtccctggggcagtagcattggcatcatcagggagctagttagaaatgcaaaatctcagatcccaccccaatctactgaaccagaatctgtattttaacaagatctccagatgactggtatgcatatgaaaatttaagaaatccctgttgtaaatcaccttttgctcaagggtcagggattaggagacactttgtcaagtcatggttccccaccctggcttcagtggaatgacttggggaactgtgaaaaatactgatgcctgggttccacctccagagattctaattggtctgaaaggtcaggtccaggaatcaggagttttagaagttccccaagtgattctaataggcagccaaggctgagaagcactgttgtacatgattcttataatttgccctagcttcttagaacacaaggtatatataagttgatgtggccagatgcagtggcttatgcctgtaatcccagcactttgggaggccaaggtaagggcatcactcgagcccaggagtttgagccagcctgggcaacatagtgagaccttgtctctacaaaaaaaaacaaaaaaaaaattagctgggggtgcctgtaatcctagctactcaggagtccaagccaggagaatcccttgagcccaacagtttgaagctgcagtaagccatgtgcaccactgcactatctatctacctatctgtctgtctatctaagatgccgttttagacagacagacagacaggtaggtaggtagatatataggcaaagctaatgactaaaaaaaacttttacaattacatttattggggagaagtatatgtgcatcaaaaattagaaatatatacatcaaaatattaaacccagtaatctgtgggttataagattacagttatttcttttttgtcctttgttttcttttttttttaaggggccatgctcatcttctctgtatcattccaattttagtatatgtgctgccgaagcaagcactgtcctctattttccaaactttctgtaacagccattcctttggtaaaggaaatatatgtgtaaatataatttttaataactgtgatcacattatacatgttttgtaaactgctttttaattaaaaaatactcttcctgttcacatatcaatacattatgaacattttctcattatcattaaacattattagataggcttttatattgtttaaagtgaatcctgacccaggataactgaatttttaccttaattttatttacatactgatatggggatttaagaaattgactgtttagccgagcgcagtggctcccgcctgtaaccccagtactttgggaggctgaggtgggcagatcacctgaggtcaggagactagcctggccaacatggtgaaaccctgtctctactaaaaatacaacaattagctgggcgtggtcgcacgctcctataatcccacctactggggaggctgaggcaggagaattgcttgaacctgggaggcrgaggttgcagtgagccgagatcgygccattgcactccagcctgggcaacaagagcaaaactcatctaaagaaaaaaaataaatcgtttaatwcttgaaacttttagtgtttggaaattgtcctggtccacaggaggggacatgtttaaaaggagatgtctgttgggaggctgaggcaggcaagttgcttgagcccaggagttcgaaaccagcctgggcaacatggcaaaaccctgtctctactaaatatataaaaaattagccaggtgtggtggcacacacctgtagccccacatactcaggaggctgaggtgggaggatcacctgagcccaggaagttgaggctgcagtgagctgtgatcgtaccactgcactccagcctgggcaacaggagtgagaacctgtctcaaaaaaagaaaagatatctggaagcgaggttagattagcccttctctaaggcttttacaacaatagtcaattgaatactatcttttttttttttttgagcacttaaacctaacacatagagcttgacttcactttctcagaagatgcttcaccacagggaattcttaatgatgtttggattgcaacctgtggctggagttatatttctaaactttctctttgaatctttggtttagggccaggtgtggtggctcatgcctataatctcaacactttgggaggccaaggtaggtggaacacttgaggccaggagatagagatcagcctagaacaacagagagagaccctgtctctcaaaaaaaaaaaaaaaaaaagccaggtttagtagtttgcacccatagtcctagctacccaagaagctgaggtgggaagaattgctggcacccaggagttcaaggctgcagtgagcttcagttgtgccattgcactccagcctaggcgacggagtgagaccctgtctttaacaaataaataaaccattgatttggttggaattgtgcttcaggacaaccaatatctcttacagtttgagtttcctctgcattaatatgtacattatgatgtggaaagctggaaaatccttagagcaacatcttgaaaacttcaatggtatatgatggccaagctatgttgtaatcaaagtcgaatatgtcttcttgcccaaacctttgggaataaatrccactccaacaacttcaacaaaagaaatggtctgcccccaaaacttctgttcttgccccagtctgcttgcattataggggaagagagtaattttgctaatggtctctttacaatgaaaagaaaagagaaatgttctgtaattagggaacttttataaagatgcacagtggattattctgcaagagaaaagctctgtcatcacatttttacctcttttaaccatttctctaccagaatctgtacataaaagtttcagaagtgcacagtttttattttcagagaaataggctttatatatataattttttttttttgagatggagttttgctcttgtcacccaggctggagtgcaatggcacgatctcagctcactgcaacctctgcctccgargttcaagtggttctcctgcctcagcctcctaagtagctgggattacgggcatgcgccaccacacccagctaattttgtatttttagtagagacggggtttctccatgttggtcaggctggtctggaactcctgacctcagttgatccgcccgcctcagcctcccaaagtgctgggattacaggcatgagccaccgtgcccagccaactttttttttagagatcttgtgtggtaggaaaataaatattgggcatcatgcctggctaacttttgtattttcatagagacagggtttcaccatgttgaccaggctgatcttgaactcctgacctcaagtgatcccgcccacctctgcctcccaaagtgctgggattacaggctcggcgtgaatcactttcataagcaatcagcttccccagaattgggagcctatgactgaaatcagaattgtcatcggtttgagcactttggtgcttatagaagtgcttaagacttagtttttctgggtctttttacaagtaagttgttctttatttcattatgaaaaaaagcactgtaattttaaaaatttatagtagagatatctgtcatttcgggctgctgtaacaaagtgccaaagactgggtggtttatatacaacagaaacatttctcatagctctggaggttggaagtctgagatcagcgtaccagcatgttcaggttttggtgagagccttcttccaggttgcagactactgttttctcgtatccttatgtggttcaaagagaggagaaagctctctagggtcccttttgtaggtcactgatcccattcatgaagattccaccctcatggcctcatcacctcccaaagcccacctcctaataccatcacattgggggttaggatttcaatgtatgaatttggaggggacataaacatttagttcattgtaagaaataagggtaaaatttagtctttggaagagaggataagaaaggtgatagcagagcaagaagaagattatccttttatcgttgctctgtaaccttggccagggcacttaaccagtctactttattacctttctcttagtctcatcacacaatgagaaactgccattctttggaataagttttgctgcatggcattaatggcattctcatacaaaaaaaaaaaagacaaaagaaggctgggcgtggtggctcacacctgtaatgccagcactttgggaggctgaggcaggtggatcatttgaggtcaggagttcaagaccagcctggccaacattgtgaaaccctgtctctactaaaaataccaaaaaaaaaaaaaaaaaaattagccaggcatggtggtgggcgcctgtaaccccagctactcaggaggctgaggcaggataatcacttgaacttgggaggtggaggttgcagtgagctgagatcgcaccactgcactccagcctgggcaacagagggagactccgtctcaaaaaaaaaaaaaaaaagacaaaagccattttcttctcacagcaatggaagtgaagactattgaratgatttgttttagagagattctcttggggtgatatggctggctttactctgcagttggtacatggtatggtacatctggggcacttgtagccagcctctgataacaataattgctgtctttgttactcccattttcctctgtcatggttacctccacagggatcctctaagttagggagaggtttattcctccctcctttatcatctttgtctgatgtggtcctatggtcatcataacacttaattgggtccctgaaaggccactcaactcttttgatgttgctgatgtttgaagtcttatgagaagcttcagacaagagtgtgcaagctcaccagagtgcatagaggggcatatgtgcatagtatattcactgtgcctggatgagaatgggtgtaggaaggagtgtaaaacagaaagggaagccagagagatctttgagccacaatgtaaactttcaatactaagctaagaagttagcacttttctctgaacagtgaaaacctattgaaggtttttgaagaggaggtaatgatatgatccagtttgtattttaggactggcactctggtcacaatgtattagattgtaaaagccagactagaggggttttttacattttttatttgttatttaatttatttccatgcaaaagctcatctatgtgaaagctagtggctttttatatttttatcttttattatttatttatttttatttgtttgtttatttatttttatttatttattttattttttttgagacagggtcttgctctgtcrcccaggctggactgcagtggcacgatctcggctcactgcaagctccgcctcccaggttcacgccrttctcccgcctcaccctccggagtagctgggactacaggcgcgtgccgccacgcccagctatgttttttgttttttgttttttggggttttttttgtattttttagtacagacggggtttcactgtgttagccaggatggtcttgatctcctgacctcgtgatccgcccacttcgacctcccaaagtgccgggattacaggcgtgagccaccgctcccggccgaaacagcatttttaacaaggtcatggaaccaccctttgagaaacaatggaccagagactggaggagaaaaatgagttgggaggctgttggaccagtaatataaaagagaaggccgggtgcggtggctcactcctgtaatcccagcactttgggaggccgaggcgggcggatcacgaggtcagaagattgagaccatcctggctaacacggtgaaaccccgtctctactaaaaatacaaaaaattagccgggcgtggtggcgggcgcctgtagtcccagctactcgagatgctgaggcaggagaacgggtgaactgggaggcgaagcttgcagtgagctgagattgcgccactgcactccagcctgggcgacagagtgagactccgtctcaaaaaaaaaaaaaaaaaaaactcaaatctctcaaatataatttctgctctgtatatatctatctaatatttaatatatatataatacaagtataaaagtagaattaggccttatctctaaaacaaaagaggatgagcaaagagatgaagattaatatatgagcagcacaaaagattgcagcaggttttccaggaattacaaggttttgagtgaataaaactcaagtcaaacattaattaatacaaataagctttcagttgtgttttcctttttgaagattttagagaaagaataagataataatatatgcttttattagagaatttgaagttgttcataaaaagtcacttccataatgtgcctccttcaatcctgaagaattatggcataataatgtcctacacttgcttatatcgtgttttataatctctaaaccatttttgtaggcatttcatataatcctggaacaactgtaaggccttcatattatctgttgtttacaaattaaatctcaggcaggttaaatgactgatctaagatcacagctgctacgtgatagaacttggactccacagcaggtgttctgctctaaaccaactgtattttcccctctctcagcttttccttctgactataaactaacataccctgtggtttctgtcttaccccataactcaaatgaattcctgagacatgtaagcatctcaaataaatatttctaagcagatttcttagtgttaaaatactttcatcttggtgataaaaatttaggtatcagagcacagtcatttgattaaaaaaagctggactgatataaatgattgaataaaacaaatggggagaagagataaatctccagtgtataattccaagtaattcatatagttatttatccctcaaggaagtagagcataattcaccaccccttaagttgtgccagatttagtaactcccttccaaaggggacagtgtagaaaggagaggaaaagagtamcttcacaatggaagaaactgacagagtaccctcaaccaggtgatgaaggttaacatcagcatcgatcggtcatgttgatagcatgtatccttgatattgatgtgataaaaatgatactatctctgtggtcttcctcccaaaaaacccataactccagtctaataataagaaaaacattaaataccagtttatggatatcctacaaaatacctgaccagttctcctcaaaactgtcaaggtcatcaaaaacaaggaaagtctgagaatctctcacatccaagaggagcaataacatcaatattggttccttagttgtgacaaatgtaagatgttaataatagagtaaactgggtgtgcaataaatgagaactctactattttgcaacttttctataaatctgaaactgttcttggctgggcatagtgctcacgcctgtaatctcagtactttgggaagccaaggtgggaggatcacttgagaccagcctggacaacatagtaaggccccatctctataaaaaatgtttttaaaaaattagccacacgaggtggtaagtgcctatagtccagctactcaggaggctgaagtgggaggatcaattgagcctggaagctcaaggctgcaatgagcagtgattgcaacactgcagtccagcctgggcaatgaagcaagaccctgtctcaaaaaaaagaaaaaaactattctaaaataaatgtttatttwwaaaaaaaaaagactagaatagaataacacctgataaaacaatttatttcttggtgaattgatatgaattgaaatgttttagattttccatccctagattggtaatgaggatttgggataatatcattagaggattatctcagtatcattaagaagtgtcaacttgcatatgagctattttgaaggagatgagtgaataagttatttggttctaactagaaggaacccataaaattatgagaataatgtccatatacaaggtaaccctgaatataatgcattctgtcatctttgcagtgaaaaaatatttttaaaaagtgatgtgaggccaggcatggtggctcactcctgtaattccagcactttggaagaccaaggtgggcagatcacttgagctcaggagttcgagaccagcctggccaacacagtgaaacccagtctatactaaaaaaaaaaaaaaaaaaaaaaaaaaattagatgagcatggtggcacacacctgtaatccctgctacttgggaggctgaggcagtagaatctctcgaacccgggaggaggttgcagtgagctgagatcgcactccagcctgggcaacaaagcgagtgagtgaaacagagtgagtgagactctgtctaaaaaaaaaaaaaaaaaaawgtgatatggatgaaatagacatatattttcacatatataactaagaccataaattttatcaaataatatatgaatttaaagatattgtccccctctataccacctgtcattttaaatgaaacatattgcccaaattttttagatgcaactttgacattaataccggtacatagtaggttgtattagtttgttttaacactgctgataaagacacacctgaaacgggggaaaaaggtttaattggacttacagttccacatggctggggtgacctcacaatcatggcgggaggcgaaaggctcttacatgacagcagcaagagaaaatgaggaagaagcaaaagcagaaacccctgataatcccatcaaatctcgtgagacttatcacaagaatagcacgagaatgaccagcccccatgattcaattacctcccccctaaatccctcccacaacacttgggaattctgggagatacaattcaagttgagattttggtggggacatagccaaaccatatcattctgccctggcctctccaaatctcgtgtcctcacacttcaaaaccagtcatgcctttccaacaatcccccaaagtcttaactcatttcaacattaacccaaaactccacagtccaaagtctcatctgaggcctggcacggtagctcacgcctgtaatcccagcactttgagaggccaaggcagctggatcacctgaggtcaggagttcaagaccagcctgcccaatatggcaaaaccccatctttactaaaaaatacaaaaaactagtcgggcatggtggcaagtgcctgtaatctcagctacttgagaggctgaggcagaagaatcacttgaacccgggaggcagagattgcagtgagctgagatcacaccactgcactccagcctgaacagagtgagactccatctcaaaaaaaataaaacagagtgagactccatctcaaaaaaaaaaaaaaaaaagtctcatctgagactttgccttgccttggcaagtcccatccgcctatgagcctgtaaaatcaaaagcaaactagttatttcctagatacggtgggggtacacgtattgagtaaatacagccattccaaatgggagaaattggccaaaacaaaggggttacagggcccatgcaagtccaaaatccagcggagcagtcaaattttaaggctccaaaatgagctcctttgactccaggtctcacaaacaggtcacggtgatgcaagaggcgggttctcatggtcttgggcagctccgccyctgtggctttgcagggtacagcctccctcctgcctgctttcaccagctggcgttaagtgtctgcggcttttccaggtgcacggtgcaagttggtggatctaccattctagggtctggaggagagtggacctcttctcgcagctccactaggcagtgccccagtagggactctgtgtgggggctccaaccccacatttcccttacttactgccctagctgaggcgctttatkagggccctgcctctgtagcaaacttttgtctgggcatccaggcatttccatacatctaaactccaggcggaggttcccaaacctcaattcttgacttctgtgcacccgcatgctcaacaccacatggaagctgctaaggcttgggtcctccaccctctgaagccacagcccragctgtacattggccccttttagccacggctggagcagctgggacatggcaccaagtggctgcacacagcatggggaacctgggcccagcccgtgaaaccactttttcctcctgggcctctgggtccttgatgggaggggctgcagggaagttctctgatgtggccttgtgacacattctccatggtcttggggattaacattaggctccttgctacttatgcaaatttctgcagctggcttgaatttctccccagaaaattggtttttcttttctatcacataggctgcaaattttccaaacttttatgctctgctttccttataaaactgaatgcctttaacagcacccaagttatctcttaaatgctttgctgcttggaaatttcttccaccagataccctaaatctctctcaagttcaaagttccagaaaactctagggcacgggcaaaatgccaccagtatctttgctaaaacataacaagagtcacctttgctccagtgccgaacaagttcctcatctccatctgaattttattgtccatattgctatcagcattttgggcaaagccattcaacaagtctctaggaagttccaaactttcccacattttcctgtcttcttctgagcccttcaaactgttccaacctctgcctgttacccagtttcaaagttgcttccacattttcaggtatcttttcagcaacgcccccaatctactggtaccaatttactgtattagtttgttttcatgctgctaataaagacatacccgaaactgggaacaacaaaaaaaaagctttaattggacttacagttccacatggttggagaggcctcagaatcatggcgggaggtgaaagcctcttcttacatggcggcggcaagagaaaatgaggaagaagcaatagtgcattcagaacccattgtggactcagtgttcccaagaacctctcaagggaggtgccactgacaccaggacctgaggctgtgaagaataaggttaagagtactcaggctgcttggtgcaggtgagaagaggtattagtgtattggagaaagagttaagaggcttttgtgcctagggcatagtgattgaggggccttgtasaccatggaaagaactcgatttktttaagtgcagaggaaagccagggattgacatctaacttacagttttaaaagaccctttccttctatgaagagaatggagaaggaggcaagaatagaagcggggaaaaccagtcagaatgctagatgggagacaataaagaattaattgtcattgataataataatagctaacacatggcttactaatgccaaggactgttgtagcacattttatgaaccagctcatttaaatgtgctcttcagttagcacactctttcattctttaaagtatcataggtcgggtgtggtggctcacgcctgtaatcccagcactctgggaggacgaggcaggcggatcacctgaggtcaggagttcaagaccagcctggccaacatggtgaaaccccgtctctactaaaaatacaaaaattagccaggtgtggtggcgcatgcctgtaatcccagctactcaggaggctaagacaggagaatcgcttgaacccgggaggcggaggttgcagtgagccgagatcgcaccactgcactccagcctgggcaacaaagagcgaaactccatctcaaaagaaaaaaagtatcatcgtttggatgataaattacacgaaactatgaaccagccaattaacattttcagaggagcttaacacttggaatacttagtcttcctcctgttctcatcaatttcaaactgtcttgtgaaactcactaacccagacagctatacagtattaaagtaggaagaaaactgtatgggatctatctccaaattttcggagactcttcctttttgttgccttctgtcctggctctgtctcttggttctgagttgtatgtgggcctttctgtgttttttctcagtctttttttccccttcactccgtccctgtgtctctcctgtgtgtgtcccccgtgtttcttttctctttctgctttttgtcttccccattccttctcactctctgttctcttaccctgatttctctttcttcctccttcaactggccggtgaggtacgggcatgtagtgtggatctgtttattatataaaaaatgatgttgactatttccatttaaaacgaatcaagtctctcagaaccagtgtactcattccaaaatactcatagwtgattgttacaaactactttaacaggagtgtccaatcttttggcttccctgggccacattggaagaagaattatcttggagcacatgtaaaatacaccaacgggccaggcacygtggctcatgcctgtaatcccagcactttgggagaccgaggcaggtggattgcttgaggtcaggggtttgagaccagcctgggcaacatagtgaaaccccgtctgtactaaaaatacaaaaaattagccggacatgggggcgggcacatgtaatcccagctactcaggatgctgaggcaggagaatcacttgaacctgggacgtggaggttgcagtgagccgagattgcaccactgcactccagcctggacaacagattgggactccgtctcaaaaataaaataaagtaaaatraaaattaaaaaataaaatacactgacgatagctgatgaactaaaaaataaataaaaaagttttaagaaagtttacaaatttgtgttgggccacatgcagcccagaggccatgggttggacaagcttggttcaaatcattttattatcctgttttctactttcacatctctcaaggaaatttacctagtaccccgttcatctaactgatctcttctgatccccaatccttcccttcccattctaccacccacctccttcactgccttctatacctcaagtctgcccccagctccagcaccagactgcacctaaatcacaccaggtcacaactattctgtaagacacaagaggatttgcgtaacctgtgttgagccaagtgtcacccattcttccataatatttatggaatatttacttccttttttacctttcctaacgcttaatactttgcaaactattggttttgttctgaagcttacttttaagatattcttattttacatacsaaagtgcttccttatgtttgcctggttccaaattagagggtaccagagcccgatctcctctaagcaggaggcttcccataggaaaggaatgttcctttgtgctcatccttcgtataaatcaccagggagcttttaaatgaacaaagacctggctgacccagagggtagaacttataaatagtactccagcccctcctttaaagcctgtccacctaatcctcctctcaagattggaagtgacttgacctttgagtcttaaaactcaggctctttttctctaaaaaatctggttagcagtaagctgttaaaacaaatatgtttttagccagatgatgaccaatcatcaaagcttgtctttcatttctagcatttttagccaaatgyttcctcggttttttttktktgtttttgtttttgttttggctcctcagaagtcaacttgaagtttcctcttttgaggaccagcttttctcrttgttattattttaagacatctaccttaataacttttatttctccttactaatagactattatggatttccattttataaagatgttcccaaattgctgcatttctaccatraactaagggcttccttttcacccctaaaattacagaacttagaggggccttcaatggcctcaatcccaacgtcgttggatggagctctctttgtatttctctaatgctgtattgaggataaaatcttacaaaacttgttaaggattaaaatgtgcaaggattataaaatgatgcacatgatatagatactggtagataattttccagattagggcacatgcaggaataactatgtatattgaactggctaaacatataaatatattttatagaatatatttttatgtgattcccaaaaagataagcaattagggccgggcacggtggctcaacgcctgtaatcccagcattttgggaggccgaggcaggcagatcacctcaggttgggagttcgagaccagcctgaccaacatggagaaaccccatcgctactaaaaatacaaaattagccgggcatggtggcgcatgcctgtaatcccaaatactcaggaggctgaggcaggagaatcacttgaacccgggaggcggaggttgtggtgagccgagatcgtgccattcactccagtcggggcaacaagagcgaaactctgtctccaaaaaaaaaaaaaaaagaaaagcaattaagtccttaacctggttatttacagagaaaagacattcatgttgtggaaatcaaccatgtatttttagctacttctctcccttgaaataaggggagcttaaatttactattcactaaatgccagatagaagactaatttaaaacatctttcttttttatcatttaatacatagattgaagagtaagtcctggccccaggctttgcttttctgacctctgccagtcacagtagtgctttttctggaagttcagtctgctccaactgcagctttgtgcagggaccctccgggacttttctagttttgctagaatgcctcatctgcctgtgagcctggaactgtagaagtcattttagttttgtttagtcttattgtttaatttaagaaagtctgatgtccatgttgccgtagtgggtacataggacactatcggctgtgaaagaatgaaaagcttgttcagagaaggtcgaatgaggactatgtcttcagaaaaccttgggcttagctgcctgggacagtttagatctgagctcagaggggattgatagagcagtagtatctgttgttttccttctgccgttgggaagctttctcttaacatatagagaccctgggatgtgtgagcatatttatagtaattataattgtgagacatgacctaaggaagtatgtgaacttgcttttgaatttagttgtttaaaaaaaaaaagtggagtttgaaaatatgaaccagaggaaggcagatcacacgggtggagaggaacggcactgtctggagatgtattgagcatagaaggagagtttgttaggaattgcacaccctgaggggagaatgacacarccaatgtgatctgaaagcgacagtacattcatgcagggatgcccacaagcaggttgagtgcacagaaagatagactcctcatcacattgcaggcactctgctgaataaccctttgttatattttgagacttttctttttttttttttttttttttgagrcggaatcttgctctgtcgccaggctggagtgcagtacatgatcttggctcactgctcactgcaacctccgcctcctctgttcaagcgattctcctgcctcagcctcctgattagctgggactacaggcgcacaccaccacgcccagctaattcttgtatttttagtagaaacggggtttcaccatgttggccaagatggtcttgatctcttgacctcgtgatccgcccgcctcggcctccaaaagtgctgcaattacaggcgtgagccacgacgcccagccgagrcttttctcgtatagcagcaaaacctagacagaatctctccagagggtaaaatatagtgttattacacacatgatgattccagtcagctgtgttgtttagggttcttcactgcaagctattcaaacaatgggaaagggtatctgaggcttttggagctgcctggaagttgaaggacagggtctgtagcaaagaccacacagtaggaaagggcaggttggcatgcccctgctgcccccaccctgaagaacttccaactccctcgaaagtcctgtagcttcaggaccccagaactgggtagcacgtgtccaaggctaggccttcttgtgctcacccctgattatgccagggctgggagaaaaggatctggcctttctagctgctgtagtgcaaagcrgtcactgccttccacaaggtagagactctcttstttgggaagagagtctgatcacaagatagcaaaaaaagaaaaccaaaaaaaagacacatgtaaactatatctatattatacatatatttatctgcagctcagtctcttcgcaaatattaacgatcttttgcagacagcctctgtgcttgcataatgttaattttcttttcctttaatggtttgtcaattgttttttaaaacaaaacaaaaaaaaccttagcactctcttcttaaagttagtctttatttttattaagttgtatgtgttcatcatttaaagaatcatagtcagccgggcaaggtggctcacacctgtaatcgcagcactttgggaggccaaggcaagcggatcacctgaggtcgggagtttgagaccagcctgaacaacatggagaaaccccatctccagttaaaaatacaaaaattagccgggcatggtggtgcatgcctgtaatcccagctactcaggaggctgaggcaggagaattgcttgaacccaggaggtggagattgcagtgagccaagatcatgccattgcactccagcctgggcaacaagagcgaaaccatctcaaaaaaaaaacaaaaaacacagtctatctagtttctaatgaagagcaccactccctgtccccctattttctactccccagagaaaactattttcaatcctttttagcttatttatttggtattcatcttggtatttctaaaaagcaaaatgtggctatgtcgtaatgtttccattttagcattatttatccactttccactacggaaaatgacagttttgttgtttctcaacatttcgtgcctgactatccagatatacatactcttgttcccccatcctcccaggtaaattatattgggtgttagcatgtgctttcattgttatgaccatatcagcactacttgcaatgaagccatgagttatactatgactacttttttcttccagtactacctttaatttttcttgatgtcagtacttggatttttgtcatttgcttagattttctgtgcttctcatgaatttgaccccaaaatctccctctaattgtataaatctcctttccatataaacacactaggtattctatgaattttatctttttaaaagaaaatctcttcctgagctttgtgacctgctctagcctggaccctggactagtcactctccagacctgttaaagagctattgtcttgggatcttccttcactgtcactcaggggactcccttcagctgtttcttgcttgctatatcccatgtcatcccctttcttggttttctctgtcattttgatgaagccatattttccttagtttcttaagaaagcaaatattttttagtttgtttcaggaattgtttccctgaaaattttaaaggccctgctaagttgtctcctaccctccagggttccttttgaatttgatttattctgattttttttcctattctgatttgaccctttgtataatgacttgtttaacctctggaagcttttcgcttttctttatctttgatattctgtaaatgcactaatgatgtgacttgggcatttgctacaccctttttttttttttttttttttttttgagacagggtttcgctcttgttgaggctggagtgcaatggcgcaatctcccgggttcaagtgattctcctgcctcagcctcctgagtagctgggattacaggcaggcaccaccacgtctggctaattttgtgttttcggtagagatggggtttctccatgttggtcaggctggtctcgaactcccgacttcaggtgatccgcccgcctcagcctcccaaagtgctgggattacaggtgagccatcgctcctggcctagacactttccatctacgaaattttcttgaattaatttattgatgccatcctcccctcwgttctctctgttctacctttctagaacttctattagttagacactagaactcttggactattcttggactataagtttttgtgcctttactctccyttttttttttttttttttttttgagacagggtctccctctgtcgcccaggctggagtgcagtcgcatgatctcggctcactgcagcattgattttgtggactcaggcaatcctctcacctcagcctccagagtagctgggaccacaggcatgcaccaccatgacttgttaattttgtatttttgtagagatggggtttcaccatgtttcccaggctaatctcaaactcctgagctcaaggaatccacccacctcagcctcccaaagtgctggaattacaggtgtgagccaccacactcagcctgctctcctgttttctatccttgcctttttcgttctgaaagctttcttcaattttgtctttgtgttgagttgtttggttctgctatcaaaatatatgtgtttctagagttcttttttgttctctgaatattcttttttaaattggtattattgactcatttaatgtatgaaacaatacagaaactagaaaatataaatacttatgttagaaggcattttctgacagagaacatcagttaaccagcttcataagttgtaacctcaaaccagagaaattcacctaaaatatacagaattttattatattaatttttagtgtctgtaraggttatgtcttatctctcttttttaatgctcctttttaaaacttatgtctttatctgtaagcctctttattcttctaagttacttttttcttttagtttgttttggtctgtctttcataataaatgctttcttaaatttctgttgatacttggctatcttctcatatttaaaaacagggcactcagaggctgaggcagacagatcacttgaggtcaggagttcgagaccagcctggccaacatggtgaaaccccatctctattaaaaatacaaaaataagctgggcttggtgacgtgctcctataattccagctactcaggaggctgaggcacaagaattgcttgaaccaaggagatgaaggttgtagtgagccgagattgtgccactgcattccagcctgtgtgacagagtgagactctgtttcaaaaaaaaaaaacagagggggccactacaaagcaatttgagagttctgtgcttgtgggtgaagtttatggactgtggcattcactatagagtgatcttcatgagttgtttccttggggtacatctgatatttgtttctttaggtattttatcttggttggtcagatcctgttggtaaattttaaattttgcactattcgttttctgtccctttcttgcagtctctaggtgtgtgcagtcttaggattctcatagataaaagtaacttctctaggtttctgcttcttcctttagatgtctttttgactctcctcacattcttatgtgcttccatggcaatgagcagtttgacaaactttttaaaaagtaaacaagagttggtgggagtaaacatgagacacctagaatacaaagtgggagtcactttcagtgccttatttttccttagtcatatttgatcagaaattggatgaaccttcgggatgctgagacagggaagatactctggcaaggaacagaagacctgtctgtccctggtgtggagcatgaaggtactttccaaccctttatctacacagggctgtgaccaatgccagactagcacctgagcataagagagctaagttaacacatacctaataggcgggtgagcccctgaagacacagcatgttaatccatgtgttgttgacagtttcagttactttcttttttttttttttttttttttttgagacacagtcttgctctatcacccaggctggatggaatgcagtggtgtgatcttggctcactgcaacctctgcttcccaggttccagcgattttcatgcctcagcctcccgagtagctgggactacaggcgtgcgccaccacatctggctaatttttgtattttgagtagagatggggtttcaccatgttggccatcctggtctcgaactccggacmtcaagtgatctgcccgcctcagcctcccaaagtgctgggattacaggtgtgagccaccacgcccagccagttactttcttaacagttctttctctcacttcccaaaacccattttgtgctgatattttaccattagaacatacccaaagatagaaactaagatctcaactttttctccaaaagaaaatttgcatttttatctccctgaagtaaagaagaaggaaggggttaaaatcaccagaacagagtagagagaaggtacccatgcagcccccttcctgatgagagtagttagatgaggcccttagatgcacaaaacctggtgttccttgaagatctaatatctttcagatacgggtgaccaattagagacctctgctttcagccacacaaagtgtaatgcacttaccaaggcattatccaaaatgtaagaaagtgttctctaaatcagctgtaagaaagtgttctctaaatcagctgtaagaagctcccagaaatttgaagcatcatagtcctgtggttttcatttagaaaggcttcaacatttgtttttctcttaccagcccgtgttcccaagaaaatcctcaagtgcaaggcagtgtctcgagaacttaatttttcttcgacagaacaaatggaaaaattccgcctggaacaaaaagtttacttcaaagggcaatgcctagaaggtattctgctgcctacatgcctgaaatcagggcttagggcgaccaggacaaaaggcaacaatacccagtgaactaaagcagtgctttgataacattccttttacaactcagtttgtggtaggattcctacactctgcaagactgtgaatccccagtgaaacaaaccaaaacaaagctagccactacaaggggctttgaggtctctgacactgggagcgtggatggtggtgcctggtttaggcactgacgttgtattgtgatatgatcatggaggaagctgctatgagcagggcctagtacagtgctctacatacagtatcatacagatttgactggcaaggccactctgcattgaattctcaccatgcagtgtaaagggcacataagccccttcaagctaattccaagtgaatttaactatgtatctatatatagttcacatctagcctacctctaagaaaatgctgcttatattgtgtcctgctcgctggtcctagtcctttagacctcaaagcatgagaagcaagcctttggtgtggttcagaggacwacctgagcaggcttccctgtcttttttacgcccctggtctgagaggttgctgatagcttcctttggtggttctcagggtaggaagaggctcactctagagagggagacaaagagcccttaaactttatactggggcacctgctcaccccggcttttccttcttccttcagaatggttcttcgagtttggctttgtgatccctaactccacaaatacctggcagtccttgatagaggcagcacccgagtcccagatgatgccagcaagcgtcttaacgtgagtgagcaggtctcaggaaattatgaagtgtgtctagaaacaggcattccaggcaggtgggactcctggtgccattcagtgggcagagagctcggttgagaaatagagtaaaagagtatccaagggtatctaggtttccaggttcctgacctttttcatatgaaaaagacagtatgatagagtagaaagaataaaaaactaaaaataaaaataaaactttagattaaaccagatttaaattcctgattcaccctgactacctgtgtcatcttgggcactaatatactttatctctctgagccttagtctttcatctctaaacacagaaattaattctgtcttacagaggtgtaatgaagataaaatgtgatgacatggaaggagactggcatttaatatatataccgaatctatgttaatttgctcccattcctgactaccgtacttccggtatctctgtattttgtttagatcacctttaacagaatctggcaaagtcctattaataattctgttttcgaggatactacttggttacagttttttggagaatggcttaccatattaatagctttggttcctgttccaagaacaatttgtttgtgctttttccaaaaacactgtcaataacttcctacctcccattgtctgtgggaaagatgttagtctctcaaatgttatagtaatagtaccttctaaagagttagctgggcgtaatggcacacacctgtaatcccagctactcaagaagctgagataggagaattgcttgaacccaggaggtggaggttacaatgagccaagatcatgtcactgcattccagcctgggtagcagaccaagactctatttcaaaaaaaaaagagttagtcccacagataattgtgtaatattggatcatctctttcaacagttcctttatgaaagccatattgaatttgttaaaaattgaggttattgactttaaggttttttgtttttgttttgggttttgtttattttatttttttaaaaaacagggtcttgccatgttgcccaggctggactccaactcctgggctcaagtgatcttcctagctcagcctcctaagtaggtgagactacaggcatgtgccaccatgcctgtctctactttttaagtttttttttttttttttgagacagagtctcgccctgtcacccaggctggagtgcagtggcgtgatctcagctcactgccagctccgcctcccaggttcaagcaactctcctgtctcagcctcccargtagctgggattacaggcatacaccaccacaccggttaattttttttttgtatttttagtagagacagggtttcaccatattggtcaagctggtctcgaactcctaacctcgggtgatccacccgcctcaacctcccaaagtgctgggattacaggcatgagccaccgtgcccagcccctttttaaagtttttaatagtttttttaacagccaggtgtggtgacactttcctataatcctagctacttgggaagctgaggcgggaggattgcttgagtccaagagtttgagactagcttgggcaacatagattttgtaagaggctgggcgcagtggctcacacctgtaatcccagcactttgggaagccaagtcgggtggatcacgaggtcaggaaatcgagaccatcttggctaacacagtgaaaccccatctctactaaaaatacaaaaaatcagctgggcatggcggcacacgcttgtagtcccagctactcgggaggctgaggcaggagatcacttgaatctgggtgccggaggttgcagtgagccgagatcacgcctctgcactccaccctgggtgacagggcgagactccacctcaaaaaaaaaaaaaaaaattgtaatagaattttttaaagttttaatagttttaaaagtagattttttttttttttttgatatggagtctcgctctgttgcccaggctggagtgcagtggcaagatctcrgctcactgcaagctccacctcccaggttcccatctttctcctgyctcagccttccgagtagctgggaytacaggcacccgccaccacgcccagctaatttttcgtatttttagtasagacrgggtttcaccatgttagccaggatggtctygawctcctracctcgtgatccgcccgcctcggcctcccaaagtgcygggattacagacgtgagccaccgtgcctggcctaaaagtagattttttaattacagtagtagctatttttatatcttatcagccagtcagattctgagtaccttatttacctgttttttggggtttttttttttgtttttttttttgagacggagtctcgctctgtcgcccaggctggagtgcagtagcatgatcccagctcactgcaacctccgcctcccaggttcacgccattctcctgcctcagcctcctgagtagctgagactacaggcacccgccaccacgcccggctatttttttttttwtatatttttagtacagacggggtttcaccatgttagccaggatggtctcgatctcctgacctcatgatctgcccgcctcagcctcccaaagtgctgggattacaggcatgagccaccatgcccggcctatttacctgttttataattaattaccagcagaaatgtatctgctggttattaattaccctgggaaagtacagagtagtttaggaaagcaggggttttttttttttagattttattaaacttcatttgacttcttcttcacgaggcgtgattttttgttgctgtttttttttgagacggtctcgctctgtctcaaacctatcataagatgaaaatatcataagtcaaaaatgcatttaatatccccataaatccactataaagttgaaagatcataagttgattcattataagtagggaaccaactatacttaactttttattttttatttttttttattttttttgagacagagtctcgctctgtcgcsgaggctggagtgcagtggcgtgatctcggctcactgcaagctccgcctcccgggttcccaccattctcctgcctcagcctcccgagtagctgggactataggcgcccgccaccacgcctggctaatttttttgtatttktagtagagacagggtttcaccctgtttagccaggatggtctcaatctcctgaccttgtgatccgcccacctcggactcccaaagtgctgggattacaggcatgagccaccgtgcccggctacttaactttttagaacccccaaaaacagttgccctaaactcagctcaagtgtgatttggtaaggccatggtctctcccattttacaaatgggagcaccgagatacccaccaagaaaaatgaaattcttccctcacacctcacaatacaggtgcatcatttagtgttctgtagttgtaagtcatagaaacaggctctggctaatacaagagctgaaagactaagggggagagctgggcggcttggaagatgcagatgggcaggaatccctggatggcttcctcaaggagaagctacaggaaggatcttgctcaagagaaagagtctgattggcctaagttacatcctctgttcacccttttgccaggtgagtgaggggccactcacttggcacatggactggaggaagggtggttcccaaatgaagagcaaggtgctgttaccyaaaggcaggaaaatagatgtgggccaggccaaagcccacctttcgactattgtgagtactgtagggaaggatactgcccctgaggtctgcaggcttctatatgtaagccagccagaggtgtccatgaatgcrgtatcagaaagtcagtcggatctataagcaccctgtgtgcagagcactctactaagggctttagagkgtaccaaggagtggagacatgctctcacttctgatttgtgagcttgacagggatgaatgtaaccacataagttaaatgtcatgttagacttgtagccccatatagacaaggattttaatgtccccaagctaagactctgggtgggtgcatgtccattggcccaggaatccagatggaaaccactttgtggaaatgaaatcttgtgcctaacatgctcactctcttttgccctctgtttctcttcttacttacagtgggaacgttatcatagaaacaaagttttttgacgacgatcttcttgtaagcacatccagagtgagacttttctatgtttgaaagaagaatgtgtgtacatttcaagaatttgggttttttggagggaggaggaaactgtttacttttttcctccacacgtttgatttttgacacatacacccctaattccctcaacagcagaacctacctgcagccaccaggggaccagctctgtgtaggtaaccagatggctctttttcccaagccrccatcttccagctgaccagactaaactcccaaccccagaccagggcaggggacaggtctcaagtccttcccagcatacacacagggaacaaacacataccacaaaccggtaactgtacctgtcaccctccttgtctcctccttgggccctacaggctacacatctacctttggcccctggttttggaaaaattccgtgttcctgacccatgtttagttttttcctaccatttctatttcatacattctcatacatttaacttgtaaaatagactgtgatattattacataatgtaattaaaaatatgaattaaaatattcctacagtctttagcatggcactgcttttatctctcctttttctggaaagtgaacctggctgcataatggaaagaaaccaaatataagatcacaactgtatttcactccaggaatggaactgatagatcttgttccctagtgccacagttactgctttccaaaattgtgcaacatacttgaaccaaacccatgaccttaacatttgtcttttagacacaatctttaatggttcttttccacaacatacatgcaccctttgtttgtttattattgttaattttttctatttgtttacagtattcatttgttcaagaagtttcaagaaagggcaattctaagttagtagagtagggactctcatattcctaaatgagactagaagctacaaaatgaaaagatctgcatgaacctaactggagaatgatgggaaggcgtctgggctgggaggaggctgggaggcctttaagactrtcgtcattggaagccagcgtgggagagaagggattacaactggcagtgctttcaggtccgacataagagagaacaccaaaaagtgttcttacctctgagctactagtagccttcagtgtctttttttgttgttttgttttgagacagagtctcactcttgttgcccaggttggagtccaatggcgggatctcagctcactgcaacctctgcctcctgggttcaagcaattatcctgcctcagcctcccgagtagcccgtcaccacacctggctaatttttttgtaattttagtagagacagagtttcaccatgttggccaggctggtctcgaactcctgacctcaggtgatccgcctggctcggcctcccaaagtgctgggattacaggcatgagccaccgctcccagcatgccttcactgtcttttataaaataccaacaattacatgttttcaagttaccaaagcagtaaggtctgaggccagaggacagaacacatcaaaggtatggctctctttggtgtagctcttgctctcagattcctcttttccttttctctctattacctgagtctgtttgcatctgcgggtggggaggagaaaccgtatatttttagtgtactaccatctttcaatgatgattcaattcctcatattagatctgttgtcttcaaaagctgttttttattaattttatttatttatttatttatttagagacagaatcttgctctgtcacccaggctggagtgcagtggcatgatctcggctcactgcaacctccacctcctgggttcaagcaattctcctgtctcagcctcccaagtagctgggattacaggcacacaccaccacgccggttaattttttttttttttgtatttttagcagagacagggtttcaccatattggtcaggctggtctcaaactcctgacctcaggtgatccacccccctcggccccccaaagtgctgggattacaggcatgagccaccatgcccggcccaaaagctattttttaaataccaaagtttggatggaaaaacaagttggggtaaccccagcaatttaggagaccaaggcggaaggatcgcttgagcctgggggttcgagacgagcctgggcaacaatggtaaaacccagtctctacaaatgataatacataaattatccaggcatggaggtgtgtgcctgtagtcctgactactcgggaggatgaggcaggaggattgcttgagcccaggaggcagaggttgcagtgggttgagatcgtgccactgcactctggcgtgggtgacaaagcaagaccctgtctcaaaaaaaaaaaagaaagaaagaaaagaaacgaaaagaaaagaaaagaaaaaacacagccgggcatggtggcgggcgcctgtagtcccatctactcaggaggctgaggcggaggttgcagtgagccaagatcatgccactgcactccagcctgggcaacagagcgagactccgccttggaaaaaaaaaaagaaagaaaaaaacaaggtgaaaatgaattgctttattgtttatttatctatttatttattctttttagagacagagtctctctgtgtcacccaggccagagtgcagtggcatactagcttcacaagagcctcaaactcctggactcaagagatcctctaaccttagcctcccgagtagctgggactacacatgtgtgccaccatgcccagctaatttttaaaaatctttttttttttttctgagacagagtttcactctgtcgcccaggctggagtgcagtgatgcgacctcagctcactgcaacctctgcctcccaggttcaagcaattctcctgcctcagcctcctgagtagctaggattacaggcgcacaccaccacatccagctaatttttgtatttttagtagagacggggttttaccatgttggtcaggctggtcttgaactcctgacctcgtgatccacccacctcagcctcccaaagtgttgggattacaggcgtgagccaccgcgcccagcctgaattaccttcttaaaatgccatctctttttctcagagtgaacccatctcctctttgctaaaccatatctgctccccataattccatcaaggaatgttctcatggtactctacacactgtagtggagaaaggacttcccagagaatgcttctccactcactcatctgtccaaaacagtcagacacgcttcttgctagctgctctgagaaaaatagaaagtgtgtgcttcagggacagtactgactaggggctccaagtagtgtgggtgggatttgaactggtggggaggaaggctgaatgctaggagaaggagggaattggcgcaggcctaagtaaacacaagcaaaaggagaggacaggagaactgtagggactaggacccttgtgaagtcaaagtcagctcttgcatggtgggccttaatgcaggcccagatgcctggagatgcagctttttctggatacactgaaggctgcagaatgttcctggaaagagactcatatagaccaggcctggcacagtctatggccactgattttcaaatcaatgatgggcatctccctgccccacccggctcccagagagtctgatcagtaggtgtgaggcccagaaatctgcaccctaaagccgccaggtgactccgatgcaggtggtctatggaccatgctttgagaaatactggtagaggcatttaatatgtgttagagacatagatgtgtacatgaggatggctgcaggacagactgaggtctccaagcagcttgcttaaggaacagagtcccatctctgacctgtacaagctgagagggattgttcacctgctcagggcaatcaagaggagcttaagagtctgtgttggggaggagaaagggggaagaatcccaggccgcacagccttggagaaggaaacttgcaagaaagaatatagatttctatttagagaattttggttaaactttgctgtgtaatatgcaatacaccctcgcatcagtacccccattatgtttcttgccagtgttttgagtattgggcttttgtgatggggaatgtgatgaagtaccgagtctggccctcgttaggcaggaaagtcttccaaaggggatatagccacattcaggccacactgataggcctattatacccactaataagatgctgtgctaggcacaagcttacctttattgagtttgtctgtagtaggaggatacaacaaataattaccagaaatgccataagaggcttggggcggtggctcatgcctgcaatcccagcactttgggaggctgaggcgggtggatcacgtgaggtcaggagtttgagaccagcctggccagtatggtgaaaccccgtctctacgggaaaaaaaaaaatatctgggcgtggtggcaggcacctataatcccagctgttcaagaggctgaggcaggagaatcgcttgaacccgggaggtggaggttgcagtgagccaagattgtaccactgcactctagcctgggtgacaagagcaaaactgcatctcaaaaaaaataaaataaaataaaaagctgggcacggtgactcatgcctgtaatcccagcactttgggaggccaaggcgggcggatcacgaggtcaggagttcgagaccagcctggccaacacaatgaaaccccgtctctactaaaaatacaaaaaattagctgggcatggtggcaggtgcctataatcccagctactcaggaggctgagacaggagaatagcttgaacccaggaggcggaggttacagtgagctgagattgtgccactatactccagcctgggcgacagaactagactccttctcacaaaaaaaaaaaaaaaaaatgccataagagaaataccagttagaaatttaaaggaagaggagattatgctcaagacaaaatcggaaaagccttttctccagatccttcaaccctcagcccacaaaacatgttcaaatcaccttaaaaaataaatttctaaaaataagacttctcttcaatcctgcatggccttcagctcctgccctagtccttctctttctctgcagatccaaacttggaattgtcttcactcacgcttcccactcctctcatccattcctcaaacactgccatctggctctggccccacccctttgtcgggccccttcaagtccttgctttctctgctgcatctgattcttctgacgtctgctgggtttcccttctccttagattctgggagcccctcttctgggtgttctgctccttcctcatctgtaggctcttcatttttcttccagctgcctcgtcccaaaaatgttttagattttcttttttagttgtagtgtattgagaagatgctatgtgccaattctttaagcattacgcatttactccacacacatttactgaccactttttatactccagacactgttctaagcggtggagataacttactagacgagatgaatgagggccctattttaccattagatttttttgtttgttatagatggagtttcgctcttgttgtccaggctggagtgcagtggcgtggtctcagcttactgcaaattcgtcctcccgggttcaagcaattcttctgcctcagcctcccaagtagctgggattacaggcgcctgccaccacgcctgcctaatttttgtatttttagtagggacggggttttaccatgttggccaggctggtcttgaactcctgacctcctgatccacccacctcagcctcccaaagtgctgggattacaggcgtgagccaccatgcccagccaatctcccattagattttaatgggaggagacagaaggcaaataaataatttcgatagtgatcagtgttctgaagaaaacaagacagtgcaatgacagcatcagtctggagtgagggggtatagaaactgaaagaagtcaaggccaggcatgggtggctcacaactataatcccaacactttgggaggccaagggggaggatcacttgaggccaggagttcgaaaccagcctgggcaacatagcaagaccctgtctgtatttttttttttaataaacaaatgaaagaagtcaacattcagcaattgacttccaaaacaggatttttgagtctccagcacaaaacaggatttttgagtttccagattttcttctggaaagccaggctttactcagaaagaaaagagtttttaaatctcttaaactgacatcaacatggcaagaaccaggggtaccatacttgattacctgttgaatacagagaactcaggctacaacgtgagggaaatccctgcgttataggaggaggtgaaagccctccccttgcagcctagagtaggatggagaagagaaatgaggaagaagtcgggcaaagaggtcaagtgtccttgctttccttcactcccagtcacgggtgagaggggtggctggatacatccacccaggtgggcatgggctgtctccattctccttgccctactgccccacagcccagtagaccctagcccgttgacctcacttcataaacat

SEQ ID NO: 95588 - DNA, 25846 bp, Homo sapiens
cacagtctgattccagtcttttggaggggaaaccagggaaagagatgccaaaaacccatcaaacaatcagtgcatgttccagcccaggtggaagtgccctgccttggagaacaggaataggatgctgtttgctcatctgttctcagctcacgaagggcttctgggcagatatactgtcctttagagacaaaccatctcggtacagcctgcagataaacaacctgcccctcctccttttctccctattctccaaggttaggggtaggtctcatacctcagggacaccctctacatgctcaaaagcccagccttctttccatctagggtctagaactctgatgtttggggttcccacctggatgtaaaagttcccaaataccttgtaaggtaaacagtcatttttttttgagatggagtctcgctctgttgcccaggctggagtacagtggcgtgatctcggctcactgcagcctctgcctcccgggttcaagcgattctcctgcctcagcctcccgagtagctgggacaacaggtgcatgccaccacgccctgctaatttttgtatttttagtaacgatggggtttcaccatattggtcaggctggtcttgaacgcctgacctcaggtgatccacccgcccggcctcccaaagtgctgggattacaggcgtgagccactgtgctcagtcatttctttaagaaagcacttaaaaagaaatctttttaactgatgtgcagtaaacatataaaagaacatatcacaattacacagcgtggtgaattttcacaaactgaacactcctgtgaaatcagcaactagagcaagaaacagaacatgtgaccaacaccctcgcctcatcaccttcccttctagtcactattccccctaagggtacccactctcctgattccaacacgacagttttgtgggtttttatactttttttgtttgtttgtttctgaaatggagtttcgctcttttgcccaggctggagtgaagtggcgcgttctcagctcactgcaacctccaactcccgggttcaagagattctcctgcctcagcctccacagtagccgggattacaggcatgcaccaccacacctggcttttttttttttttttgtatttttagtagagacggggtttctccatgttggccaggctggtcttgaactcctgacctcggtgatccacccgcgttggcctcccaaagtgctgggattacaggtgtgagccgccaccacacccggcctgggtttttatactttttataagtggaatcactcagcgtgtagtgttttgtgactagtttcttttgctcacctgtgtcattctgaaatttgttcatgttgtgtatagctgtagattgttcattctccgtgcgcgttgtgtacagttgtaggttgttcactctccgtggtgtgaacgtacaaacacccggcgtttgggtggtttccagtttggggctgttatggatactgctgctgtgaacattgaggactgtcttctggtgaacaaatgtttgggatttatgtttctaggcaaggaatgtctgatgcacacactttattagatattgccaaattgttctccaaagttggttataccactttacactcccatgtatgaggttctggtggttcccaacatttaacccaaactctgttgatgtcctgggagaacctgctagcaggcagtcctagtactggagattatagagattacctagtgcagaatgttacacataaagtgagccttgggtagagctagtcttccccattctttagacaggaatgtaatgttctgatgctgtccaggttcccaagacccttagtcaagactgtatagtttggagggtggtagaacctcaaaagcctggggaggcgggaagaaggacctggaggcccctccctgccggaaactgctaatggttagtgctcaggtaaaaggggatcagatcaattaatgcaaatgcactctaagctgttaaaagcttcctagacggctgggcatggtggctcacgcctgtaatcccagcactttgggaggatcaggctgaccaaaatggtgaaaccccatttctactaaaaatacaaaaattagccaagcatggtggtgggtgccagtaatcccagctactcaagaggctgaggcagaagaatcacttgaacccggaggcagaggttgcagtgagctgagatcgcactccagcctgggcaacaagagtgaaactctatctcaaaaaaacaaacaaacaaacaaaaaaaacttcctagattacctcccaaggatgttagcattcaacagaggataatgtcacagctaaagacctggaggcatctgaagcaggctgatggggaggatttttgggttgaaggatctgcagatacccctagaattataccagtggtcctttgtgaaaggccagcctggtctaccaatattcctgttgtttttccttgcagaagggacaggatgtttctgtagaaattaaacactgggccaggcgtggtggctcacgactataatcccagcactttgggaggccaaggtgggcggatcacgaggtcaggagatcgagaccatcctggctaacatggtgaaaccccgtctctactaaaaatacaaaaaattagccgggcgtggtggcaggcgcctgtagtcccagctactcagaaggctgaggcaggagaaaggcgtgaacccgggaggcggagcttgcagtgagctgagatggcgccacggcactccagcctgggcaacagagcgagactccatctcaaaaaaaaaaaaagaaatcaaacactgaaggaggaaaggagaaacatgagttcagagcaggtcaacttttgtcaggaatgatacgtagctgtggcatattctgacatttctcacattttcttaggaatcacttttggagcagtatagtccagtttctaagcactggtggaaaaagtcatcatcctcttaaaaaatatttcctggcggtcgcagtggctcatgcctgtaatcccagcaccttgggaggccaaggcgaggtcaggagatcgagactatcctggccaacatggtgaaaccccatctctactaaaatacaaaaaattagctgggtgtggtggcatgtgcctgtagtcccagctacttgggaggctgaggcagggaaatcgcttgaacccaggagctggaggttgcagtgagctgagatcgcaccactgcactccagcctggcgacagagcaagactccgtctccaaaaaaaaaaaaaagtatttcccattatctgtgactaacctccaaaattgagccatatctataatcccagcatatccacctcaagtgtagacacaagtacttttctattttgtttacactgttcaagtctctgtcactagactgcttccttttgcaggagaatcaagatttctcttttcattggggagagcagaattgggcttaaatgctgacttgatacacccctggcctaagaaatccttttttgggcctcttcacagcaaagacataatgaagcttctcccacaagcgggaaagctgatggcttcaactacatctttaccaaggggaggggtgggaacaaacattagggcctagtagccaggccatggctaacgcatgagaaccatctagagatttccgggactttttttttttttttttttgagatggagtgttgctctgtcgcccaggctggagtgcagtggcacgatctgggctcactgcaagctctgcctcccgggttcatgccattctcctgcctcccaagtagctgggactacattcgcccgccaccacgcccagctaattttttgtagagagaggtttcaccgtgttagccaggatggtctcgatctcctgacctcgtgatccgcccgtcccagcctcccaaagtgctaggattacagtcgtgagccaccatgcccagctttcttttttagacggagagttgctctgtcgcccaggctagactgcagtggttcgatcttggctcactgcaaccacacctcctgggttcaagcgattctcctgccacagcctcccgagtagctgggattacaggtgcccaccactgtgcctggctaatttttgtattttttgtttttttcagtagagatggggtttcaccatcttggccaggctggtctggaactcctgacctcgtgatctacccgcctcagcctcccaaagtgctgggattacaggcgtaagccaccgcgcctgtccactttccaggatgttatgagagcccagacgcttccccaaccctgaaactctaattacggctcagctaaggtaaacttttttttttttgagacggagtctcactctgtcgcccaggctggagtgcagtggcacaatatcggctcactgcaatctccacctcccaggttccagcgattctcctgcctcagtctcccgggtagctgggattacaggcacgcaccaccacccctggcttattttggtatttttagtagagacggggtttcactatattggccaggctgatctcgaactcctgagctcaggtgatccacccacctaggcctcccaacgtgctgggattacaggcgtgaggttatatatatatatattagggagacggcatagagactcaaggtcacacagaattaggtccagactattccaaaatgtatgctttccaaacaccaggcctcgaagtctccaaaatcagcacatttatttaccaaacagtcacggagtgcctacagtatgccaggcactggatacaaggcagtggacaaaacagagggtctcctgccctggtggagtttacttaccaggcagacaacagccacagaggcaggcaggggaaggaggcccaatgtattctaagctgcgctgtgggttggagctctccagctctcatatgggagtgagtcattcacatggtcactgccccccacccgaaatggaaatgggcttttgggcagggtcaaggtaaacggagttagtagagggaaggactacttctctttctgaagtaggggggcttccctcaaaagggaaaaacttccgagtgttaaaaaccattccaaacaagcccctggtccctggctaaggaggtgggcgtggagggagaaactgaggtgtgcggcgcacccctccggcagcgatcactccgtagctggaggcacagcggacgtcggacaagggggagctcagcccgcacgacacccacttaggacgtggggaagctcggcccgcacgacacccacctgcgccgcgggagctcgcgcggggccccgccccctcccctggcggcgcgggcactgaatgggcagctccggatccagccatccccgccatcgccgccacccctcccccggcyttgggctcccagcgccgctgccgtcactgggcggggagctgcggggctgcgaagcaaacaagccgggagcgccggccgggtcccccgggcagaggggcgctgccctcccccatccgagaaaggggaaggaggcgcagcccgtccaggacccgccccgcccggcccaggttcggcccgggtgcccgcgccggggggtgggcgcggacctttctgccccctgggccgcgcgggccagggcgcgagccccccggggttcttgactcgactttacctccttcttcacgttccacagcagtttctctttgactgcgtcctctgcgctgcccatggtgtggcaggaggcggcgccgagcggtcctcagagcccccgcgccctcgccgcctccgcgcctctcggctcagcgccccacgcgcaaggcggagcccccgcccgccgcgctcccggcccgccgccgccgccgccgccgcagccactgcccggtgctcggctccgcagccatcttccgagccccgcacagacgtcaggcggcaggcccggccccttcccacagccggaggggggttgcgcacagcgacgggggatcggggcggggagaggccgtgcgcgcctaggggcggcagacccgggcgcgcgccacgggggtcgctgtcatggcaacgcacccgctcccgcatggagggcgcgaagccgcattgtgagcgctggccctggagcccgcggccccgcggctgagagcgagcctcggtcccgctgaagctcccctgacttctgcctgctccctctcccgacgggacggaaagggccggggctcgggcatggggtcccctgcggtccgagcctgcccacggcgaagccggtgcagcctggccccgtgacccctctgaatccccgtccggccgtcgccgtgcagttgtcaagtttctgggaagattagtgggagcgcagccgcccgagcccgacggccggagggtcgcggccagtcccccttgccgggtcgccacgtcccacaaggtccttcccggccgctccgtgggaggcggggcgcaggttggagtaacagggacgggcttgagctggtacggaaccgggcaaggtgagagaagtgtcttccacgcgattcccaagcctcgctagggaatcgagggagaagaaaggttgctcagagtgataaagaacatgccgttgcaaacggaagagcaacgtgcccgaatctaggtgacaggaagggcttaggccttttcggcacgaatggagccttccagtcaacatgcttctacgtgatgcagctttatagcgcaaaaaaatgacaatgcaaggggtacaaacagccctgctagaccaacagcccgagcctcgacagtctacatccggcgccttcaagcccccaaccacacactgcgaagtgggaaaagttcccagcgcggcttggcgaacccgctaacacggcgctctcacgagctgctggaaaagaccttcgcgagagggcgcagggagtcccgctccctggagggcccgcccccttggaggggaccggaagcgcttgtcctggcccggaagcagtgctgactccgtacacgcgcgctgcggcatggcggcccaccgccccggcccgctcaagcagcagaataaagctcataaaggcggacggcatcggggtcggggatctgcacagcgggacggcaagggtaaggagataacgtagaaggaataagggctatttggccgttattaactctttttcctcatgcccagactgagcttctgtctcccgtctgggctccacgcgaaaggccctttctaaggtgggcggagaggagtcccttttcttgaccttgtggggccgatcacaccagccccttctaatctgccattcaggccgtctggcactgaaaaccctaagcaagaaggtgagaaaagaactcagcagagtcgaccagaggcatcgcgccagccagctccgaaagcagaagaaggaggcggtgagaggagcgggatttgggagaatgcggcttctctggtgttctaggtggctaatgcctcgaagtggaaaatgagaccgggaggagggtccagggacagagcatagccctagagcacgtgtcgagcgtgcaggtctagcattctttgctttggtcagaattcctgccaccccgctggcatacctgtggtcttttactagagagatgctggttttgggtagggggagcatctgtgggagtggaaatgcaatgctggagtgaagtactgagacactgagatgttctcggatatctttctattttcaggttctggcagagaagagacagctgggtggcaaggatggccctcctcatcaggtactggtggtgcccctgcacagcagaatttccctgccagaggccatgcagctgcttcaagatagggacactggaacagtacacttgaatgaattgggaaacacccagaactttatgctgctgtgcccccgcttgaaacatcggtggtttttcacctcagcaaggccaggttagagtatacaccaatattttgtattatgtttgagtagtggtattttttttttttttttttagaataatgtgctggtgccaaccacctcttcttactgtgtcttctatctgcaggggatctgcacrtygtgttagacatggctaaagtagctgataccatcctgttcctccttgatccactagaaggctgggacagcaccggtgattactgtctttcctgcctctttgctcagggccttccgacctatagtaagtgagttagcatttattgtgcacctttaatttgtcaggcactatgcctggtatttgatacaggaatacaactgatggatcatattcagctggtggtgggatgtacacatatggattaaacttgatccattgtttacagattatcactcagggtgtctttttgtttttggctgtcctttgcccagagaaacaaggatatgaagtttgatttcactgtgaaattccttcagggtagttcagtgttgggcttcccagtgatctctgggcttgcaactgagctattaggttgtttgtgaactgcagagggatttttatgtaatgaagcagtaggtcatgaagcgttttctctttcgcttacagcactagctgtccaggggatttctggcctcccactgaagaaacaaatagataccaggaagaagctaagtaaagcagtggagaagcgctttccgcatgacaaactcctcttgttagacactcaacaggaggcagggatgctgcttaggcagttggctaaccagaagcaacagcatcttgcttttcgagatcggcgggcctacctatttgcccatgctgttgattttgttcctagtgaagagaataacttggtgggcaccttgaaaatttcaggctatgttcgagggcagactctgaatgtcaataggttgctgcatatcgttggatatggtgatttccagatgaaacagatagatgcccccggagaccctttccctttaaatcctagaggaattaaaccccaaaaggacccagacatggcaatggaggtaagactgatattcttaattcatgttcatatgaaagttggcayaggaaggaaacttaaattcagagaagatagtctgtacacttaggtgaatgaggagactgctagtctgaagtaaggcaatagtcagttataaataggttgataaatcayatatttatccagcactttctaggtagtctgcactgtgattggctctgagtttatagaacacactcaagatgtggttgctttcctcaagggacttaattgggctggaacaaaatggcatgtgtgaaataaagattgagatagcatatggytagrgtgcggaccagcagtggaagttgagaaagtagactagcaagcttcacataagagatcagacttgagctaggtgttgagaaggataaatgtgatttatgagttgaagagggataaaagaatatcctagaagataagagacagaatgaacctaggcacagtggtggatcaaagggtttatgtgaaccttgaagaaatcagcttgatgggagtgaggtacgtaataaatggataggagtgggagcagattaagaaagacctcaagagccaagcagagacttaaaataccctggaaattagaaaacagccattggaaaagttttgacaagttttagcattctgtcgcactcatcttatacatgaggactgatatttctgggtctttctggttactgtgttagatttaggagatttttggttcatggttgacyatcacctgcttttggttttcagatttgtgctacggatgctgtagatgatatggaagaaggtcttaaagtcctaatgaaggcagaccctggtagacaggaatccttgcaagcagaggttatcccagatccaatggagggagagcaaacctggcccactgaggaggagctgagcgaggcaaagggtcagtattggtaaacttgtctgtaattcatctgacctggaattgtggattttctgtagctgttccaagtgagggccctataggatagagtggggtgggggtatagttgaaagtctctcctcaccctcaaatgctgtatgttttcaataaacaaacattatacacagtcttgttccatttctcaaaattacttgtgttaatgttttatcatgaacagataaacaactttggattcattgcagggcttatttagctgtgtaagtattgctagttgtgaggcagctgaattaaatttggaagtagttctatttacagtgtctgccagaatttcccatgttggcagcagtatctggtgccttgcctaggtgagaataaccagagggatagggaaaagaagtctgtaatttacttaatttgtttgggcttttacagatttcttgaaggaargttctaaggtggtaaagaaggtccccaaaggaacatccagttaccaagctgaatggattttggatggtggcagccaaagtggtggggaaggagatgaatatgaatatgatgatatggaacatgaggattttatggaggaggaatctcaggtaaggaaatgaggccttaggccaattctgtgtctagctccaaatgtaaggcaaagtgcaggtgtgatcttgatgggtgtgtgtggttagtttcttttttttattttttttattttttttttatgagacggagtcttgctctgttgctcaggctggagtgcagtggtgcgatctgggctcactgcaagctctccctcctgggttcacgccattctcctgcctcagcctcctgagtagctgggactamaggcgcccaccaccatgcctggctaatttttttgtatttttagtagagacggggtttcactgtgttagccaggatggtctcaatctcctgacctcatgatccgcctgccttggcctcccaaagtgctgggattacaggcgtgagccaccgcacccggccgtgtatggttagtttcttaggaatgactctgtagttgccaggaatgaggcttttgttttatactttagactgtattagaatttatgttggttgggaatagggatctagtacaattattttactcttagcttattggcctttggggtagagacaggtgtggatttcttctgaaaaaactgtaatcctattctacaggatgagagtagtgaagaagaggaagaatatgaaactatgactattggggagtctgtgcatgatgatctgtatgataagaaagtagatgaagaagctgaggcaaaaatgttggagaaatataaacaagaaagactggaagagatgtttccagatgaagtggacacgccccgtgatgtggctgctcgaattcggttagtcaacaagtctatcaacaaatctaaattcagtcaatacgtttttaaaaacttggctcagagctgtgtcactgtgatgcaaaagaagaaaaacacattttttctgctcctgaagagctaacatttaatatgggaaggcaggacatacatacgggaaatggtcatatgtaattaagttctagactgtggtgcagactcacgttacaggacttgaatgaaggggaaatactaaggttaattagcaaatacttcttcccaaaggagccagtactcaattgaagtatataatgtttggaaattttagggggtttgggtagaatagcagaagtagaagagtgaagaagtagatgattatatctgttctggaggtgagtgactaaagccagtgaattaattttggatattaggaggtaaggctatgtattaggccattctcgcatggctataaagaagtaccagagactgcataatttataaagaaaagagatttaattgggtcatggtcctgcagactgtacaggaagcatggtgttggcatctgctcagcttctgggggtgtcctcaagaaacttacaatcatggcagaaggtggagggggagcaagtcatgtcacacggccagcgcagtaacgagagcaaggcaggaggtgctacacactttaaacaactagatctcatgagaactcactcaacaaggagggtggtgctaacccactcatgagaaaacctctcccctaatgcagtcacctcccaccaggctccacctccaacactggggattgtatttcagtatgagattggggcagggagacacatctgaactgtatcaggccattaccaagcatcttttttgtcagtgagaagcttgggtttggttccgatagaacttgttataagctgttcggagtgtcgtcttggtttaagctgttgggttgtttggagagaggatgattggagttcttttcagctagctccttagccattttagcagtgacttgagtctatatagcaccatataaatctgacttaatgtctttaaaaatcttcaatattctagatttcagaaatacagaggccttaagagcttccggacatctccatgggatcctaaggaaaaccttcctcaagattatgctcgaatatttcagtttcagaactttactaacactaggaaaagcatctttaaagaggttgaagaaaaagaggttgaaggagctgaggtatctatcctccttgttcatcttgtatgttgctttcatttgtcaacatgctccctactttattccttctcttggcatgaaaatatgctgcatttggggattaggggagcccctgagtcattgattagaatgatactgggaacaaagaggtatcagctatgttaaatgaaaaagtgtgatctgggtaaatgaagcatcttgaaggatgagggttggctttaaaaattttatctgaragactcaacatatttggagaaagcttcctcgctattgggactttgaaaggtaactccatgattgctttctgctttcttgtggcaggttggctggtatgtcacacttcatgtctctgaagtccccgtctcagtggtcgagtgcttcaggcaaggaacacccttgattgcattttctttactacctcatgaacagaaggtaaattgctgtcttgtgggaaaatggggggttgtgaaactttccagctgcttctgacagtctaaaattctgtttatgtgtgactaaaattttgctcattgggatgcaaaaagtctgcctttatgattaggaattggagaataatagagaagtcaatgatggttttattcatatcgtctgaacctgtctgaagcatctcagtgatgcaatctctgtgtggttctgagacttctccaagtatgtttttcagaccagattttgaataagggttggcagccttaaaaataaaggtttggctgggcgcggcggctcacgcctgtaatcccagcactttttgggaggccaaggtgggtggatcacctgaggtcgggagttcgagaccagcctgaccaacatggaggaaccctgtctctaccaaaaatacaaaattagccaggcgtggtggcacatgcctgtaatcccagctacttgggaggctgaggcagaagaattgcttgaacccagtaggcggaggttgtggtgagccaagattgcaccattgcactccagcctgggcaacaagagcgaaactcttatgtcaaaaaaaaaaaaagtttatgccaaagtgcagatctcttttctcttggtggccagtagttgtgtatgttgtggggtatgtgatagttctttgatcggttttggtaagggctcaagaagaaggggcttgaatgagtgtggttttgagattgtggtgagtgaatgccttgaaggccactgatttttgtgtggcagatgttgagctcttttctgttaggtgcaggaaggtaggttagcattgaagggtgcatgaaagctctgatcagcctgtgtttggcttaaatgccagtcattggtggaggtaaaggatgaacccgtgtttcagcatctacactccaccattaattagcattgtcagttcttagaatgagtctgaatctgctagtttggtttgccttctttcagtttaggcaattgtattcctagactatgaagatktttgtttttcttacttggtccccagatgtcagtattgaatatggtggtgaggcgtgaccctggcaacactgaacctgtgaaagccaaggaagagctcatatttcactgtggattcaggcgcttccgagcctcacctttattctctcagcacactgcaggttagcaatggggaagctgggttcttgtccatcttgtcttttgggaaagtgacttgtggtggaggggtgccaaaatatatggtttcaaaatcttacatctctgggttagaggtattttcagtactctggcttaagagccaatgatgtttttattcaaaatgtctgaacctgtctgaagcatcccagtgatgcaacttctgtgtgatactgaggcttttttgccatgagtatttgttccatagcaggttttgaatagaagttggcagctttataaaaagggtattagggtgggtgcagtggtgcagtggttcacacctgtaatcccaacacttgtggcattagaacggggaattgaagaccaaaaaaggtaagatttaatcttgtttttgtttctgttttttttttttttttttttttttttttgagacggagtctcactctgtcgcccaggctggagtgcagtggcgcgatctaggctcactgcaagctccgcctctcaggtttacttacaccattttcctgcctcagcctcccaagtagctgggactacaggcgcccgccaccatgcccagctaattttttgtatttttagtagagacggggtttcaccgtgttagccaggatggtctctatctcctgacctcgtgagccgcccgcctcagcctcccaaagtgctgggattacaggtgtgagccaccgcgccccctcttgttttttttgtttttttttgtttgtttgtttgtttgtttttttggagacggagtcttactccgttgcccaggctggagtgcaatagcgtgatctcggctcactgcaacctccgcctcccgggttcaagcaattctcctgcctcagcctcccgagtagagtagttgggactacaggcatgcacgaccatgcccagctaatttttgtatttttagtagagatggggtttcaccatgttggggtttagtagagatggggtttcaccaagaccaggagttcaggctggttttgaactcctggtctcaggtgatccgcccacctcggtctcccaaagtgctgggattacagacatgagccaatgtgcctggcctcttttttttttttttttttttgagaccgagtctcactctgatgctcaactggagtgcaatggtgcaatccaggctcactgcaacctctgccttccaggttcaatcagttttcctgcctcagcttcccgagtagctgagattacaggcacccgccaccacgcctagctaatttttgtatttttagtagagacggggtttcaccatgctggccaggctggtctcgaccttaggcgatcctcctgccttggccttccaaagtgctgggattacaggcgtgagccactgcgcctggccagtcattcttttattgtttcaaaatggttttgatttttttttttaggatgaactattttcatattttatacagttgggaaaataaggaataatgtaaaagtaaaattaccttatattagagaaaattcatttttattttatacattttcatccagatctcattttttttctttacacaatttggattgtaattgtaaatatggtgttaaacattgcatttatcacttaattgattttgatcaattttccataagattaattagttaatgagacttttaatgctttattgtcatttggatatattccagtgtatgtgatgtactgatacttatttgagcttctacgggtgagcacttaggctatttctaatgttttgctctaaactagatctgtatgcataaaactttatttacttctttgcttattttgtaaaggcagatccttagaactggaactaaataaaagtctcagttgcagagactgaggcaggaggatcgcttgaggtcaggagtgtgagactccggtctctacaatttttttttttttttttttgatatagagtccaactctgtcaccaaggctggagtgcagtaacatgatctcagctcattgcagcctccccgtcccaggttcaagtgattctggcgcctcagcctcccaagtagctcggaccataggtgtctgccaccacgcccagctactttttgtatttttagtagagatggggtttcaccaagttggccagtctgttctcaaactcttgacctcaggtgatccacgtgccttggcctcccaaagtgctgggatttatagggatgagccaacatgcccggcctctacgaaaaaaaaatttttttttttgggagatggagtttcactcttgttgcccaggctggagtgcagtggcaggatcttggctcactgcaacctctgcctcctaggttcaagtgattctcctgcctcagcctcccaagcagctgggattacaggcgtgtaccaccatgcctagctaatttttctattattagtagagatagagtttcaccatcttggccaggctggtctcaaactcccgacctcaggtgatccacccgcattggcctcccaaagtgctgggattacaggcatgagccactgcgcccggccaaaaatttttctttttaattagccaggtgtggtggcatgtgctttgcagtcccagctacttgggaggctgaggcaagagggattgcctgagccagtgggcccaggagtttgaggctccagtgagctgtgttcacaccacagcccttaaaatattttattttcctataagtttagtatttttaaaaggggggtgagggctacattgaaggtagaacaccaaatacagtctagcctagatagcagagtgagacactgtctctcagaatttaaaagggtgtgataaagtgtggaaactttgatgtctagtgtgccaagggcagtgtgggtgaaggaatggaggctgggtatggctcatagttgggtaaagcagaggtaggggtcctgagatactgagagactactggacgggacttgcagcagaaatgattgtctcctacacagtaggagcaggaagatatgttgcccactaacttgggggcttctgaacatcgtcctagttcactcactctcagcagtggcaggaggaatatgaagaaagcagtattaatggtgttttggataatttttattctcaccaattgtgagaatcacaatctctaagtgagattaatttttctttgccttaaaatattttattttcctttaagtttagtattttaaaaaggaggtgagggctaccttgaaggtagaacatcaaatacagtctaggctccaagattctgactccagataaaaaagttactgatcaggcacctgcaattccagctattcgggagcctgaggcagaagaatcacttgaacctgggaggtggaggttgcagtgagcagagatggcaccattgtactccagcctgggcaacaagagcgagacaccatctcaaaataaataaataaataaaaagttactgatacagcctggcgcggtggctcacgcctgtaatcccagcactttgggagattgaggtgggtggatcacaaggtgaggagttcgagaccagcctggccaacatggtgaaacccggtctctactaaaaatacaaaaattagccrggcgtggtggcatgtgcctgtaatcccagctactcaggaggctgaggcaggagaactgcttgaacccgggaggcagaggttgcagtcagctgagatcacaccattgcattccagcctgggtgacaggaacgatactcaaactcaaaaaaaaagaaaaaaaaaaagttactgataggactagatcgtatcttttaggtgcattgaggcagcgaaaatttttgagaactggtggtttagagaagtagaagctgccataggtttaagagttgcactaatacagcttttcacaggcctctatcacctctggtttctcaaaatggttttgcttttcattttttaacccttatggcagcggacaaacataaattgcagagattcctgactgctgacatggccctggtggcgacagtctatgcgccaatcacttttcctcctgcatctgtgctgcttttcaagcaaaaaagcaatggtaagttgagccacagagatgaacagaccctgcaggtccttaatagatgaacaccgttttctcttgtttatttaaatttgggagccaaatggtatggagaaggtaatgatggttttcaaaatacagtaagtcttcatttaacattgttaatagaacaatgaaaactccaacttttacgtgaaacagtgtatagccagtcctcaaataactgccttttgttcaacatcctttccttgtaacaactgatgagaaaaagtatggttttgttatacatcatttctcttgaagtacaagttttcaagaacctattgacaaggttaagtgtgggcttacagtttaccaatcttagcctcagattgggctagggcagggatgacaaaccaggctcttgcatgggtctttaaatggactgggcaataaatgaagactttggcctgtaaattcctaaatagcttctttgcttttgtcctttaggaatgcacagcctcattgctacaggccatcttatgtcagtagatccagacagaatggtcatcaagagagttgttctgagtggtcatcctttcaaaatttttactaagatggcagtagtacgttacatgttcttcarcagaggtgggtatgaaggaggaggatgggatctgattgcctttgtggtataaaggttgggtttacattttgtgggtaaatgtttcatcttggtctttaatgtgtttgattctaagaggatgtgctgtggtttmaaccagtggaactgagaacgaagtggggccggagaggacatatcaaggaacctttaggtaaggaaacacgggatttgagaccatgtctgcatttctgcagtgttgctaaatgactgttgggttggaagtcattgctttaaaattttctacttttaatttgaccgacttgttctgatgtctttctaggtacccatggccamatgaaatgcagctttgatgggaagctaaaatctcaagacacagtactgatgaacctgtataaacgagtcttccccaaatggacttatgatccatatgtaccagaaccagtaccctggctgaaaagtgagatttcttcaacagtgcctcaagggggcatggagtaatggattcaaagagattctgtcttaccggtgccagtcagtactccagggatgggaggcacaagttgtgattgggcaaagtttattttctatgtcagcctgtcagtccactgccccattttgcaagacttttttttagccttgacaaaatgtctcagttaagtataaaagttttyccactacttagtccaaaaaaaactattaaatcttaatgaaatagccactctccattaagaatctgataactaagagttgacaatactaggaaacaaaatgtcttcagtatctaaagacactgaattcccaccatttccttttctgtaaattaaacagaaacagactgataagaagctggcctttcagcctgcttcacccaagttatggaggaggttaagtctacatttccaccactgagcacaatacaaatgttctttacttctggggaaacagtttgaaaatgttgagacagcacagcagccactccaacaccagctgtaggttcaatgagtagtttcatcctctcccacaccagctgggttgcacactgttgatatggaagggagtaggaattagtgaaaggggagtctagttggtttacctataaagttcagatgagaatacgtgtccagtttgaattttcttatcactgtgtacacacgcttcccaaagcttttctttaattctgactctgcttctgtcaagagggttgtcattaatacatctagggtaccctcccatgtcatgaagttacctagtcaggttcccgtgggtcacttgctactcctaagggaagtttcttctgcctaagaagttacaccatgctttgctatttcttttcttgctggagcctcaccttaatttcatcctctgtgacagtgaagatatcatccacaaggtccctgataataggccaggtgttcaagccaatgctggatttgacaccatctgctatggtttctggaggataaagattgggcatcagtttccccttcagcttggactggtagcagtcatctgcatttgagggttcagcagcatataccttcacactaggtttcagagcctgggaagaggaatattaagacatcttaacaacaaaccacaacattgcctgcatgtctaaaagaaaatatgggcctggtgtggtggctcacacctgtaatcccaacactttgggagcccgaggcgggtggatcagctgaggtcaggagttcaagaccagcctggccaacctggtgaaatgcagtgtcaactaaaaataggaaaatcagccaggcgtggtggcagacccctgtaatcccagctactcaagaggctgaggtaggagaatcacttgaacttgggaggggtaggttgcagtgagctgagatcacaccaaaatggggtggggcgcagtggctcacgcctgtaatcccagcactttgggaggccgaggtgggcggatcacgaggtagggagatcaagaccatcctggctaacacggtgaaaccccgtctctactaaaaatacaaaaaaaaaaacaaaaaaaaactagccaggcatggtggcaggcacctgtagtcccagctactcgggaggcagaggcaggagaatggcgtgaacctgggaggtggagcttgcagtgagccaagatcgtgccactgcactccagcctgggtgacagagtgagactccgtctcaaaaaaaaaaagaaaataggcacaataagtaatacatttctgcccaagtaagagccttcccttttgtggatgtaatgaaaatatcttcaagcactttataaataaattatatgtctgatactagccttccattgcctggatcacatctgattgtcctggtaatttgagaaaagggtagccccttggtatggatagtagcttgatgacatggaattcagggaaaagactatgatggtgtcacttgtaactgcttttgtgctgtaaaattgtcatggattaagaagagagttggctgggtgcggtggctcacacctgtaatcctagcactttgggaggccaaagtaaggactgcttgagcccaggagttccagaccaacctggccaacacagcaagaccccatctcttaaaaaaaataaaaatattagaaataataaataggccgggcgcagtggctcacgcctgtaatcccaacactttgggaggccaaggcgggtggatcgcaaggtcaggagttcaagaccagcctgaccaacatggtgaaaccctgtctctactaaaaaaaatacaaaaaaattagcggggtgtggtggctcatgcctgtaatcccagctactcaggaggctgagacaggagaatcgcttgaacccgggaggtggaggctgcagtgggccaggatcgtgccactgcactccagcctgggcaacagcgagaatctgtctcaaaaaataataataatagtaaatagagtagtgaggcagagatgggccttcatctcaagtcccaaaggaataaggggaaggaatggtaatgtgtgcagaatgttgagcacgtgtatacagaacatttaggatgtaaagtaaatcctctgcttgaagcagggaatcctccagaagctgctcaccttaactgtaattgctattccagcaagcattcctcctccacctacaggtaccaccagtgcatccaccaaaggaacctttagtgaaaatataaactgtaagcagttttatatttaatgtatacatataaaataattgaatatagcccaacagctttaccagtagctaaacaggaagaactcagctattttacctggttcagcacttccagggcaattgtcccttgtccagctatcactgcaggctcctggttgggatgtaccatgatgccttctgtttcttctgtaactctttttgcaacattttctctggactgaaagtacattaatttagcttaattgatttgtatttaatagagtccccaacaagttccatttggtcattcagcattttattgaccatctacttttttcacactttgttcaggtactagagatatatatgttaataaaatatccctgccctcaagcacgttatattgtatggtagagatggatgaagtaaatatatggtatgtctaagtgcaatggagtaaaatgaaggaatttatttcatatagggtagccaagaagagcctctagtaaagtgacattttaaaagatctgaacaagtgctgtggatgtctagaatattccagagagggggtaacagtgcaaagactacaaagtaggagtgcttggcctttctgaggaacagctaaaaaggttagtatggctggcacagagtgggcaagagaaataatagaagatgaggtcaaggctgggtgcagtggctgacacctataatcccagcactctgggaggccaaggtgggcagatcacttcaggtcaggagttcaagaccagccttgccaacacggcaaaaccccgtctctactaaaaatacaaaaattagccagatgtggtggcacgcgcctgtaatcccagctactctggtggctgaggcatgagaatctcttgaacccaggaagcggaggctgcagggagctgagaagaaactaccgcactccagcctgggttggacagagtgagaccctgtctcaaaataaataaaaagaagatgagggaccaggcacggtggctcacacttgtaatcccagcactttgggaggccaaggcgggcagatcacgaggtcaggagttcgagaccagcctggccaatatggtgaaaccctgtctgtactaaagaatcaaaaattagctgggcatggtggcacgcgcctgtagtcccagctactcgggaggctgaggcagaagaatcgcttgaacccaggaggcggaggttgcagtgagccgagattgtgccgctgcactccagcctgggagacggggagattctgtctaaaaaaaaaaaaaaaaaaaaaaaaagatgagagatgaggtcagaaagataggaatgtttgagtttatccagggattagatgattgcaagaactctcgtttccaccgtgtatgagatgggaaaccaacagaggatttagacttgaaaagagacaagttctggccaggcgtggtggctcacgcctgtaatcccagcactttgggaggccgaggtgggtggatcacgaggtcaggagatcgagaccatcctggctaacacagtgaaaccccgtctctactaaaaatagaaaaaattagctgggcatggtggcaggcgcctgtagtcccagctactcgggaggctgaggcaagagaatcgctggaacccaggaggcggggcttgcagtgagccaagatggcaccactgcactccagcttgggcgacagagcaagactccgcctcaaaaaaaaaaaaaaaagaagagacaagttctgactttattaaatggagacctctggttgctcaaaaaagcctgtagtgtggcaagggtggatgcagagagaccagtttggctactgaattgaatataggtgagaattgatgttggtttgaatcagagtgctaacggtagacacagaagcagttgggttatggaaatatgttgaaagcagactgagatttggatgtggggtatgagagggttatcagagaggattcctggctgtgtgcagtgggtcatgcctgtgatcccagcattttgggaggccaaggtgggaggactgcttgaatccaggagtttgagaccagcctgggcaacagtgagaccctgtctacaaaaaataaaggaattaggtgtggtggcatgcacctgtagtcctagctactcaacaggctgaggcagaaggatcccacaacatagaaagagtccatctttaacaacaacaacaaaaaattttcaaaaaaagatgactccaacttttttttgagtaactagaagaataaaaattgccatttactaagatgaggaagactggaagggaagcaatatagggaagtaagatcaggagtttggttttagctgtagtttgagatgccttttaagacatcaagtgggaaagttaggtagctgttatataaaagttggctgttaaagggagagaagttggagttggtgttgttagaccataggtaataatttaagaaatgagactaatgagatcttgtgagtgtagatagagaaaaggttgagcatgctaacagaaataaaggggaaaccacaaaggaggctgagaaggagcagccagtaaggtagaaagagccattggtcaaatgaaagctgttaaggtggtaccaagcactgctctccttacctcatcactaggttcacagtatacaattgacgctccgtaggcttgtattgcaagttttttacagtctggagctgtctggggcaccacaatataagcaggaattcctgggagaggaaaacgagaggaaaaagtcaggagaatttagaatagaaacttatgtggccaggcacggtgggtcacacctgtaatcccagcactttgggaggctgaggcaggcggatcacaaggtcaggaaattgagaccatcctggctaacacggtgaaaccctgtctttactaaaaatacaaaaaaaaaaaaaaaaaaaaaaaatagccaggcatggtggcaggctcctgtagtcccaggctgaggcaggacaatggtgtgaacccgggaggtggagcttgcagtgagccgagatcctgccactgcattccagcctgggcgacagtgcaagactccgtctcaaaaaaaaaaaaaaaaaagaaagaaacatgttcagccaggtgtggtggctcacgcctgtaatcctaggactttgggaggccaaggcgggtggattgcttgagcccaggagttcgagaccagcctgggcaacatggtgaaattagtattttgtatttgtaaaatagaaaaaattagccaggcgtggtggtgcgcacctgtagtcccagctactcaggaggctgaggcaggagaatcgcttgaacccggcaggtggaggttacagtgagccgagatcgcgtcaccgctctccagcctgggtgacagcaagattctgtcttcaaaaaaacaaaacaaacaaaaaaaaaacttatgttcatattgcttgcaatcagatagagatttctttggaaagttacttcccacagctatcatcactctcactgaaattaagggcacttttccactcctttctgaagatctacccagtaccttgagaaatcaagtaccttccaatttggcagcataggtgagagcctggccatggtttccactgctgtgagtaacaacagctttcggcttcctttctaaagcatcaggaaccaagcttctgacggcattgagagcaccacgaatctgaaaaagagggatggtgaattcacatatttgattaaaacattgttttggaaagcaaggagcttttctagattttctatccttaacatgcacatccaatctgtcaccaaatcttatcgatttacctcttaaatatctcatgtgcatctttattttttatttttttgagatggagtctccgttatcccggctggagtgcagtgccacgatctcggcttactgcaacgtccgcctccccacactgcgtctacccccagggccgggttcaagtgattttcctgcctcagcctcccaagtagctgggattataggcacctgccaccatgcccggct

SEQ ID NO: 95589 - DNA, 33824 bp, Homo sapiens
caattgccagtaatttatggtcccaaggaagcaactggtgtagggaaggctcagaacccaagaaaagggcagtttttttgtcgatattctgttctaaaacatagtatttcaggtagtaaaaatccatcgtaactacagaatgctgaagcctttatcctgaggacaaaaagatgacagtttacctcatccaagagctccaaaagtctgttccgaatctgttctgggttctcaacattcggatccttgacaagttgcctgaacttctcaatcacctgatagaaagcattcttccacaggatctgatccacattctgattatcagagaactcaatatctaatagaatacagcgctcatatagctgcagcagttcagctctggaataaaatacatgcaacttccagctccaaatacaccacagaaaaagctagactcaagttttgagattcctgcaaattaaccacctcccctsrcaggaaataaaaaatgtgaccaggtaggtatactaytcactctggtttccattctgcagagcagaatgtcattctaaagatagttgtgtctaggaaaatagtttttccccatatgtcttcacctaaatttaacaactgaaataagatcttcactgcaagttacatgttgttcatttcttggcattctagaaagtctttttccatttcaagattccatgatcccttaaagataattttttcttaaagaaaaagtaggatgcataattatttctaagactagaaatagggccgggcgcggtggctcatgcctgtaatcccagcactttgggaggccgaggcaggcggatcacgaggtcaggagatcgagatcatcctggctaacatggtgaaactccgtctctctaaaaatacaaaaaattagccgggtgtggtggcaggcgcctgtagtcccagctacttgggaggctgaggcaggagaatggtatgaacccaggaggcggagtttgtagtgagccaagatcgtgccactgcactccagcctgggcgacagagcgagactccgtcttaaaaaaaaaaaaaaaaaagactagaaataaaacttctgttctgtttccaactgcccttcccttacaacgtgaaaaggaaataatacccagtggctcagctaaaaagtttctaccttcctcagccatagcaatctatacacctccggctgatccccatttccctccagccagaatagaccacatcatacctgagttgcgccatcttctccaggccctccggactgatgcggtccctggagagcaggttgctgagctgcagttcctggttgtcagccacccggagaagcctgtgcagctcctgttgctgcaggytcctcatgtgctgctctacctcctcgggactcatggtgctggtaggtagagggctacacacatactgtcctgacggagtcgggtagcctgggtagtaaggccctgggtacacaccattcgtagggcccactgggtactgtagagggttatagcccgtatagggatactgggaggcagggcctggtgtccgggggtaataataggggttgtcagagttttgaaacttatagtaagatgcctgagcctggcgtgagtcaccccaagatgtagggctgacttcatcatcagtgtccaagaaatgtagctggggcgtctgagtctttagagcaggtttctgatcaggattgtttgggtcccacaatcggcgtgtggtgcctccacggccccaactccgagatcccttactaccagatccaaacaaaagccgaggtcccaaaggcgcggactctggagaacctgctgaattgacagatagggtggtatgggcaggcaaaatcagaatgccacgaccacgaccccgaagttcttgtttcgggtttttggactcctgcttctcagagcctttgcccccactgctcaagcctttgtcaggctttcctctatccatatcatccctggcygacctcaccatgggagactctttgttcatggcttctgcatcgaaagtgacacgaagagtgcctcgatattctttagcactgkttttctgctcaccctccccacggccagaccagtttctttctaaatgtctcttcctytctgaacttctcctgggtcctaatccatcaggctcatcaattctgtcctcgtctaaggaatcggttgaggacacagacacttgctkcttcagtsgtggcctctccttggtcctatcctgtcggcggcggcgacatccattatcygtcaggccagctccctcagcgctgttgttgctgccagctgagctggtgctgcgcgtgcggtagcgattccttcgtttgtctgagcgggagtagcgctttgcggagcccggcctcccgcgggcygggtcgtsgtgggtttccctcaccccctccccttttcccatcctctttcctttttctccttttgcagcccctactctcccaccacctgggctcttttctatctcrgccctgtctggtttattcgcaacttcctccttcgcaacatttcccctacactcatcttcctctactctcagttgttctacctggttgaggacttcttcctcctccacccgactggcggattctttgctaacagtctgcaaacgtcgtccaggctgatagatctgcaggtcgggtttctttgttcttttgataatttttagactacgatcctcttgtccagcagtcctaggaaaggattcttgtccccgattattttctgggtctataggaccattctgctcttggttgttcagttccttgcagacatctttaacgggctgtgtaccattttcaacagcagagcaatctcggtcattaacaatttcatctttgaattcctcactcccagggggttccttgattttgggcttgttccttagccgagaaaggccaggcttatagatttccagatctggacgcctgttatctttgcgcggcctggcctcctttaattccttcatgttttctgttatgtcggggaaagagtttgggagggaaaggtagaagataagaataaagaaggaagataggrgaaagactgtcattctggttaagtaacaaaaaaagtcgagcaagaattacatatccaaatgctaatactggtaggcaaagaaggacatttctgtagaagcagaaattctgggtttacaacacttgttcaacaattcacaaggctaaggacctaactgtgttggggctacctacacttgggtaagtgaaatgggggaaacccatctccttatgtgtcatccaagtcatattcagaaatccaagatcccaaactacctcattattgtcagaacaaaagacctctctaaccttttcagcactacactgttctctatctatagagcctgtgaatccacctcagccttttcttccgcctctaactttttcctgggtggctaagttcttttaacataacagcaggaggaagaagtaaaaaaggagaaaaaggagggagggtattataacaattatcagtcctggacatctctggagaaaaaaaatgcaactttagtctttaaacttgaccaggatgattctcttcttcaagataccaattaccaaataacatacctgctggtgaattaaacagcaagcagttcttttcccattcttcaacttcacccatcctcaccaactcactaacagtagctcacagagttaccaaaatactgctcagactatcatactagaatactgacactaactgctactgtgatgatggaattattagaaaaaagttccataagggaactttccctggatgctgatggaaagattgtgacatactctcaaaatgccaacaactgggaactcaagaattaagaataatacaggactttagaaaccactctcggccgggcgcggtgggtcacgcctgtaatcccagcactttgggaggccgtggtgggtggatcacgaggtcaggagatcgagaccatcctggctaacacggtgaaaccccgtctcaacaaaaaatacaaaaaattagccgggcgtggtggtgggcgcctgtagtcccagctactcgggaagctgaggcaggagaatagcgtgaacccaggaggcggagcttgcagtacgcggagatcgcgccagtgcactccagcccagcggacagatacttacttaagtatctggttttttaaaaaagtatctgttaccgttatcaaaagtaaccactaaacattacaatggaaaagtgacagaattcgggagaatattatcaagtacacaaatggaatgctatataaaatcctagcataggccaggtgcagtagctcacgcctataatcccagcactttgggaggctgaggcgggaggactgcttgaggccaggagttcgagatcagcctgggcaacatggcaacaccctgtctctataacgtatacaaaaaatagccaggtgtggtggtgcaggtctgtaattccagctactcggaaggctgaggtgggaggatcacttgagcacaggagggggaggctacagtgagctgagatccctccactgcactccagcctggaagacagagtgagaccctgcctcaaaaaaattggccgggcacggtggctcacgcctgtaatcccagcactttgggaggccaaggcgggcggatcacgaggacaggagtccagaccatcctggccaacacggagaaaccccatcactacaaaaatacaaaaaattagccaggcgtggtggcacacgcctacagtcccagctactggggaggctgaggtaggagaatggcgtgaacccgggaggcggaggttgcagtgagcagagatcgcgccactgcactccagcctgggcgacagagctagactccgtctcaaaaaataataataacaacaataaaaaagtttttaatcctagtattgctctctaaatataaatggaaacaagcccaaaacaggaatcacatgctccagcaagtacatttactgtttgtaggtgtaaggaaaaggggaagaaaagagactgaggttttggatagtgcttcactattttcataagtttaaaaggtaggttcatgaagtatccacaaagataaagcagtttaacccaagaatagctcaccctcggcagtctgtaacttggtggggggcggggrgatggggaaagctattcctactactttctagagcagcgggagaaaatagccttaataatccaattatgttaatcaacaaaaaccaatttcacagactggccgcaaacctagagaaggcacctatcacagctaccattctacacaactctattgcctaacgcaggagaggtgagacacttagaatctttcttactttcctgacgtggctggagacttgaaattaacttgcaaattgagcattctctctaataaaaactgctcccacacatgccagggccaaacccgagtagtctgaggtcccggatccctccagtggcgcagctttcggaagcctgtcttgggggggaaaagttcagcaacgaagtcgcaggctcttaaacctttctccccaattccttctctccgacgttaaagcggtggccggggcaggcccgcggagggcggcctggagagcgatacgcccggggcctccaccagaccccactcctttccgcgtctcccgatgcctgggaatccggggcgggtctgagagggctggggcaaaaggaacagtcaccttcgcggcgagaaagagggtggaggcaggaattcgggccaggctctcccggagctggccaggactggccgagcccgaccccgcactaacccgcgagagaggtagggcagcgagggtccgccgcggccccagcgcctactgctgggggaaggggcgggggctccggagccgagggccgagcggggaggaggcagaggaggaggagagggaggcggggcgggcaggcccggcccaggagctgggcggcgcgactcacctctgctcccggcctgcggggccagagtagccaggatcccgcgcagctccgacgcggagatccgcacacgctccagcccttccgccatcttcgcggctgctgctacagccgtagcggctccgccaccgccgcgcgcagccaggaaaccaccacagacgggcggcgcgcgcgctcgcccacctcccggcctttccccgccccctgccgccctccctttccgaacgacggtggccgcgctgggaggaaaagcgcccgccgccggttccagaggggcgggaccggagcgagagcctgggtggggcgggcgggsgctgcgcgtgcgcagaggtgcggccggggaggcgcgcggaggctggagctggaggcgcggcgccggtgagctgaggtgaggcgaggccgrgccgtgccaggccaggcgggcgtttgcggcggtggctgccgttgctgttgtcgtggacaccaaggacactgctagtctgggactcgggttgacagagayacccctcagcctgggctcctctggacaccttaggccaggctctcccgccacaggcccggcctagcgccgcgggccattacttgggaccttgaagatctgctaagagtagttgttactattcccttttttttttagttggagtctcgctctgttggagactcccgggctggagtgcagtggcgcgatctcggctcactgcaagctccgcctcccgggttcaagcttttctcccgcctcagcctctctactattcccatttctaagattaggaaactgaatcccagagaacggaagtaaattgcccagggtgacaccgtggatgaaaacctatcaaagcctttttcattacagcaagccacatccccaaaccctctttttttttttttttttttttcttaagacggagtctcgctctgtcgcccaggctggagtgcagtggcgcggtctcggctcactgcaacctctgcctcctggattcaagcgattctcctgcctcagcttccctagtagctgggattacaggtgcacgccaccaagcccggctaatttttgtattttttgtagagacggggtttcactaggctggtctcgaactcctgacctcaggtgatccacccgcgtcggcctcccacagtgctgggattacaggcgtgagccaccgcgcccggccgccccctgacttttaaaaactagatacgatatagttggaatcgtgtggaaggaagtacatcaggaggcatataagtccatttgggacctgtaatcccggcgactcggaacgctgagacgggcggatcgcttgaacccgggaggcggagactgcagtgagccgagatcgcgccactgcactccagcccgggagtctccaacagagcgagactccgcctcaaaaaaaaaaaaaagtcaatttgggaatttctgtgtcactatggattcttgaaaaaaattactgctgtggatctcaggttgactttttaatttcccatctttaaaattgaactataccagaaggctggtacttgaatctttttttggagaactgtacagaggtgaagctcccttccccaaggcctcctgcctccacctgttgcccctccacagccccataggcttttaccccacacccatcacagaatagttaccaattattccttagtctgagccgaagggattgccacaacctctgacagaactccttcagttccttttacgtgacactttgtcaccggaaggttaagcataagaagaaagtcagtagatgatgggtgaaaagatccaacagttcagaagaggaaccatttgagtggtcagagcagaagacagcctttgccaccagatttgagagaaataggaagaagcgttaaaaaataatctgtttcatattgaaatttgagaggccattgcatgatttcttttttcagctggaaaaataatggaaaacaagaaaactttcttaggacaaatggcaccacccatttaatgcaacagtgtcagtgaactgcagattagatatgccaaaagttaaaccagttcaagaaaatttaccagaactcagaaggaaaaggtaatagataaaaactgagagacaaagataggagacatggagaaggggtacaaaaaattaataattaaatacgagttccagaaggggataatacagctgactgcagaagagcaataatcaaatagtagaagaaaatttactacgttggtggaaatttttgaattatcagatttaaagaattcatgaaataccaggtaaaaagaaatgacaagaaagacaaccatatttaagtcagtatcacaatgaaagctgctgagattttttgtttttcgttttttttgagacggagtttcactcttgttgcccaggctggagtgcagtggcacaatcttggctcactgcaacctgcctcctggtttcaagcaattctcttgcctcagcctcctgagtagctggtattacaggcgcccaccaccatgcccagctaattttttgtatttttagtagagatggggtttcaccatgttgaccagtctggtctcgaactcctgacctcaggtgatccacccgcctcaacctcctaaagtgctgggattacaggcgtgagccaccgcgcccagccttgaattcagtttctaaaagtaaaaattgtacaagttggccgggcgcggtggctcacgcctgtaatcccagcactttgggaggccgaggtgggcagattgcctgagctcaggagttcccaaccagcttgggcaagatgaaaccccatctctactaaaatacaaaaaaattagctgggtgtggtggcgggcacctgtagtcccagctacttgggacgctcaggcaggagaactgcttgaacctgggaggcagaggttgcagcgagccgagattgctccactgcactccagcctgggcgacagagtgagactccgtcaaaaaaaaaaattgtacaggtcatatttacttagcacaaagtaataaaactagaagtgaatagccacaaatgaagcaaaacattctaaccatttggaatttttttaaaaacaacaattttaggccaggccccgtggctcatgcctgtaatcccagcactttgggaggccaaggtgggcagatcacttgaggtcaggagttcgagaccagcctggccaacatggcgaaaccccgtctytactaaaaatacaaaaactagccgggygtggtggtgggtgcctrtaatcccagctacttgggagactgaggcaggagaatcacttgaaccaaggaggtagaggctgcagtgagccgagatcacgccactgcactccagcctgggtgacagatagagactctgtctcaaaaataaaacaaaacaaacactttccacccatggacaccgccaagtctaagtcagagtctcctaaagagctcgtacagctgaagaagctcttcattggagggctgagctttgaaacaaccaatgagagcctgaggagccattctgagcaatggggaacactcgcggactgtgtggtaatgagagatccaaacaccaagcactccaggggctttggatttgccacatatgccactgaggaggaggtggatgcagccacgaatgcaaggccacacaaggtggatggaagagttgtggaaccaaagagagctgtctcaagagaagattctcaaagaccagatgcccacttaactatggaaaagatatttgttggtggcattaacgaagacactgaagaatatcacctaagtgattattttgaacagtatggaaaaactgaagtgattgaaatcatgactgaccaaggcagtggcaagaaaaggggctttgcctttgtaacctttgatgatcatgactccgtggataagactgtcattcagaaataccatactgtgaatggccacaactgtgaaattaggaaaggcctgtcaaagcaagagatggtgagtgcttcatccagccaaagaggtcaaagtacttctggaaactttggtggtggtcgtggaggtggtttcggtaggaatgacaactttggttgtgaaggaaatttcagtggtcatggtggctttggtggcagctgtggtggtggtggatatcgtgcagtggggatggctataatggatttggtaatgatggaagcaattttggaggtggaagctacaatgattttggcaattacaacaattagtcttcaatttttggacccatgaagggaggaaactttggaggcagaagctctggcccctatggtggtgcaggccaatactttaccaaaccacgaaaccaaggtggctatggcggttccagtagcagcagtagctatggcagtggcggaagattttaattaggcaacaaagcttagcatgagaggagagccagcgaagtgacagggaagctacaggttacaacagatttgtgaactaagccaagcacagtggtggcagggcctagctgctacaaagaagatatgttttagacaaatactcatgtgtatgggcaaaaaactcgaagactgtatttgtgactagttgtataacaggttgttttagtttctgttctgtggaaagtgtaaagcattccaacaaagggttttaatgtattttttttttttgcacccaagctgttgattgctaaatgtaatagtctgatcgtgacactgaataaatgtctttttwaaaaaaaaaaacaacaaaaaaaccaccaattttaaataattcatgggtcaaaaaagaaaacaagactaaaatmttggattatttagaaattataataatgaaaatattgcataatggaatccatgatattaaagcacttctcagaggaaaaatcatataagtaaccttatatgctttctttttaaagtgaaaattagtaagctaagcattcaacaaatatagaagacaattaaaggaaaatggcagagtaaacaatcagaaataagggaaaaagagctgtactttaaatagattgaaaagctcattcttcagaaataaagcagatactaatatacacacatttctggcaaaaaataatttttaaaaaagggacatcctcttggatgtttcataaacaattcaaacttagctaatcaaatctgattttcctgtcaaatacttatttcttctcctgttttaaatctcaacaaattgtaccaccatttaagtcaaaacccaggagttactctttttaaagaaaaatttttggctgggcacggtggctcacacctgtaatcccagtackttgggaggccgaggtgggtggatcacaaggtcaagagatcaagactatcctggccaattagctgggcatggtggcacgctcctgtaatctcagctacttgggaggctgaggtaggagaatcacttgaacccaagaggcagaggttgcagtgagccaagatcgcaccactgcactccagcctggtgacagagtgagactccatctcaaaaaaataaaaatattggccgggtgtggtggctcatacctgtaatcccagcactttgggaggctgaggcaggtggatcatctgaggtcaggagttcgagaccagcctgaccaacatggtgaaaccctgtccctactaaatacaaaacattagccaggtgtggtgctacatgcctgtaatcccagctacttgggaggctgaggcaggagaatcgcttgaatccgggaggyggaggttgcagtgagctgagattgccccattgcactccagcctgggcaacaagagcgaaactccatctcaaaataataataataataataatttgtagaggcagggtttccctgtgttgcccaggctggtctcaaactccttgcctctggcaatcttcccaccttggccttccaaagtgttgggattacaggtgtgagccaccaggcctggcccaggatttattcttcacacttctctcccccattcaatccactatcaggatatgtctcttctgttcctataatgaacatgtatggaatcatctccccagcattctcccctttattttcacttggaaaatgccccttactcccactcaaaagtacttttttcttttctttgttttctttcctgtgtcactcctttattttgctattttcccctcaggtgcagagaattgagccagtcatactcgtttattcacactgtcattaacaagccctttctcattttatcttttctcttcattccagttcccactaatgttcctttcctccctccttaggtattcactctaatgtgtttgatatatgtctttgaatatacatgtatctttgaataatatgtaatgttttatgtatgtatgtgttttaaatgtacctaattgatactgtgttacagatctcattctgtttctttttcatgtttatgtaaatacttctgactattgcacactgttatcttcagtgacctcataccctggccactggtcctgggccaagatgggccaragtccttacccagaatttttttaactgaaactgagaaagaaaattccccttcagtgtggaagccataaaatgtaaaacatacgagctgtcagcagccacgtgtcagttggttccatatggaaccaactcgcctgtgtgaaaaagaagccgacgtgcagaaagcagcagaggtgagagactaagagtctgggaagctgtcaaatctctggttccagtagttcctgaagctccatattcctccccttaccatggtttgttcatttcttcatggattccatgagctagtaaatctcaacaccttgtgcctactaaggtagtacaaattgaggttctatcacttgcaactaagaggactaactgtttacaacctccaaaatatatcttatttttgatagtgggttttttgtattctgggttttgttgttgagagacagggtctacatgtaggaatggaatcggtagatcataggatgattctatgttcaattttttgaggaagcaccatactgtttactgtagaattaccactacaggcgcctgccacctgcacggctaatttttgtatttttggtagagatagggtttcaacgtgttgcccaggctggtcttaaattcctgagctcaagcagtccgcccacctaaagtgctgggattacaggtatgagccactgcatcctgccaagggggcataattgacatttattcataaaaatattgagacttcaggcctggcatggttttttgggatttttggttgttgttttttttttgagacagagtctcactctgtcgcccaggctggagtgcagtggaacattctcggcttactgcaacctttgccttccaggttcaagcgatttttctgcctcagcctccctagtagctgggactacaggcaaatgccactactcctggctaatttttttgtttgtttgtttgagacagagtcttgctctgtcacccaggctggagtgcagtggcatgatcttggctcactgcaaactccgcctcccgggttcatgccattctcctgcctcagcctcccgagtagctgggactacaggtgcccgccaccatgcccggctaattttttgtatttttagtagagacagggtttcaccatgttagccaggatggtctcgatctcctgaccttgtgatcttcccacctcagcctcccaaagtgctgggattacaggcgtgacccaccacgcccggccaatttttgtttttttaatggagacgggattttactatgttagtcagtctggtctcaaactcctgaactcctgatctcaagtgatccacttgctttggcctccaaaagtgctgggattacaggcaagagccaccacgcccagccaactattttttgttctcttgtttttttgtttttaagagacagggtcttgctcttgcagtggtacaataactcactgcagccttgaactcctgggtttaagcaatcctcctgccactgtgcccagccgagggggcataattgacattaaaaaatattgagttttcgggcccgtcatggtggctcacgcctgtaatcccagcactttgggaggccaaggtgggtggatcacttgagctcagaaggtcaagaccagcctgggcaacatggcaaaaccttgtctctacaaaaaatacagacgttttttgtatttgtggtggcacagtgcacctgtggtcccagctactcaggaggctgaggtgagaggattgcctgagcctgggaggcagaggttgcagtgagctgagatcatgccaatgcactccagcctggacgacaagagaccccgtctcagtaaataaataatgcctccaattcatttatacatctttacaatggaatttctggcaactttgataaagtaattctagttcacctgaaagaattgatatgtgagaaaagccaatgaattttagagcaatcaagggagaatttattaatacagtatataataggaaaagacattggcagtctggccaatggaacaaaatacaatagccccaaccattcatagaaatttaatttttgataaatagagcatttcagaggaaaaggattctgtcagtaaatggtgtgttaagaaggctgggtgtggtgcctcatgcctgtaatcccagcactttggaaggccaaggcggaaggatcacttgagctcaggggtttgagaccagcctgggcaacacagcaagacttcctctctactaaaataaaaatttaaaaaattagctgggtatggtggtgcacagtcatagtcccaggtacttgggaggctgaggcgggaagatcacttgagctcaagagtttgaagctgcagggagccataattgagccactgtacaccagcctggacaacagagtgagaccttatctaaaaaaaaaaaaaaaagactgagaaaagaacaagtggccaagatacacaaaaaaatgttcaatcactagtaattaatgtaaattaaaactactagacattgccaggcacagtggctcacacctgtaatctcagcactttgggagtctgaggcaggtggatcacgaagtcaggagatcgagaccatcctggctaacacagtgaaaccctgtctctactaaaaatacaaaaaattagcctggcgtggtggcacacaccggtagtcccagctactcgggaggctgaggcaggagaatcacttgaacctgggaggtggaggttgcagtgagccaagatcccaccactgcactccagcctgggcaacagagcaagactccgtctcaaagaaacaacaactactagacataactaaattgacataaaaatgatataggacggatgaaggaaaagaggcatcattccatcaaaactgttgttgggagtacaaattgatgtaatataggacccttctggagatcagtttggcagtgggtatcagatttcttagaaatatgtatgccttttgatacaaaataccatttggtgaaatctaccctaaggactgacggaggtacacaaaaatcttgcaacaaggctattcattacatcattcttacagccaacaacaacaaaaggaaatccaaatgttcatttgagctatgtaaacttaaaattattattttttctttttcaagagatagggtcctgcttaygttgcccaggccacagtacagtggctattcatagacgtgataataacacactcccgggctcaagcaagcctcccgccttagcctcccaagtagccgggactaccagtgtgtgtcactgcccccagctaaattattgtatttttgtaaaagaagtactattaagtcattttaaaagttggataaagccgggcgcagtggctcacgcctgtaatcccagcactttgggaggctgagccaggtggattgcctgaagtcaggagttcgagactagcctggccaacatggtgaaaccctgtctccactaaaaataaaaaaattagctgggtgtggtggcaggcgcctgtaatcccagctactagggaggctagggcaggagaatcgcttgaacctgggaggcagaggttgcagtgagctgagatggcgccaccgcactccagcctggcggcagagcaagactctctcaaaaaaaaaaaaaaagttggataaatgggccgggcgtggtggctcacgcctgtaataccagcactttgggaggccgaggcgggcggatcacctaagatcaggagttcaagaccagcctggccaacatggtgaaaccccgcctctacgaaaaatataaaaattagctgggtgtggtggtgggcgcctgtaatgccagcaactcaggaggttgaggcaggagaattgcttgaacccaggaggcagaggttgcagtgagccacagtcatgccactgcacttcagtctgggtgacagtgaaactccatctcaaaaaaacaacaaaaaaaaaatgttgataaatgtactcacctatgagattcattgatattcataatactgtctgacaaaaaaagaagttaccaaacctaccaaagagttttgtctgcatatgtagttgggcctggaaaggtaaaccactggatagcaactgtctttaggtaggaaggtttcgtggctattttcatgttctttttgtatctctgtattttcagattaactcagttttctaatgaatatagattcttttgtaataaggaaaaatagagaaacttcatatttaactgctacaatagacacagtggaaagtggaagcttaatgtagttattgaaaattatgaaaattgtaaagaaactgagtcaaatgtaggagcaaataaaatgtttgctttaactgttacataatgtatattgagaatgcagaaggagccgggcgcagtgactcacgcctataatcccagcactttgggagtctgaggcaggcggatcacctgaggtcgggagttcgagaccagcctgcacaacatggagaaaccccgtctctattaaaaatacaaaattggccgggtttggtggctcacgcctgtaatcccagcactttgggaggccgaggcaggcggatcacgaggtcaggagattgagactatcctggctaacacggtgaaaccccgtctttactaaaaatacaaaaaattagccaggcatggtggcaggtgcctgtagtcccagctaccagggaggctgaggcaggagaatggcgtgaacccgggaggcggagcttgcagtgagccgagatcgcgccactgcactccagcctgggtgacagagcgagactctgtctcaaaaaaaaaaaaaaaaaaaaattagctgggcatggtggtgcatgcctgtaatctcagctactcgggaggctgaagcaggagaatcgcttgaacctgggatgtggaggttgtggtgagccaggactgcaccagtgcactccagccgggacaacaggagtgaaacaccatctcaaaaaacaaaaaaaaagaaaatgcagagggaaataaagaaaatgaacatagttatttaaatggaatagtctagctattttttctttatcaaataatttgttaaatttttattaaaaattaaaaatttaaatttataaattaaaaataatataaaaattgaatccaattcattcaagtagcttcacaacgatgattaaaagaaaggtggagctgggcacggkggcttacacctgtaatcccagcactttgggaggccgaggcaggcggatcacgaggtcagaagttcaagaccagcctggacaacatggtgaaaccccgtgtctactaaaaatataaaaattagctgggcacgatggcacattcctgtaatcccagctactcgggaggctgaggcaggagaattgcttgacccgggaggcggaggttgcagtgagccgagattgtgccactgcactccagcctgggctacagagcgagactcygtctcaaaaaaaaaaaaaaaaaaaggaagatggagaccagtggcagtgccaacagtgccaagagatgggtggtgtgggtggggagtgggctttagccttctgtaatcaccatcagttacttccctcaaagcttcaccagaaaaacttcgttcagcttttaagtcaactctcttttagggaaattctgacactccaataatggagaatttccacatgacaccacaggccccaggtctattctgttacgtattttcaaaatctcttcaataaacatactgtctcagactttgctttgacccctttcttattcctgggtttcagaaccatgtgtgctcagtattgcatctcctttgctgatgttgaaaaagctcatatcaacattcgagattctatccacctcacaccagtgctaacaagctccattttgaatcaactaacagggcgcaatcttttcttcaaatgtgaactcttccagaaaacaggatcttttaaggtaacaatcctttttctcagtgtatcatgtatgttttcacaccctttcacatatcagtttgattctcctgaccacccaatgagataggcagaagtaaattaatgcctttatacagctggaaaaaaggttacagaaattttcctttcaagtccttgttttacctagcatcatagtgttgataagcaacttttacacagtcataaatccttataattaggataatatatataacttatccgagtaatttttatatatatgtatgtgcatatatataatatatacataaaatacagtcatatgccacataacgtttcagtcaatgacagaccacctatatgatggtggtccttggtcccataaggttataccacacatttactgtacgatttctgtgtttagatacagaaatacttctcattgtgttatagctgcctacagtattcagtacagtaacatgctatacagggtttgcagcctaggagtaataggctgtaacagctggatttgtataagtacactctatggtgcatgcaagatgatgaaattgccaaatcatgcatttctcgaaacatatccccatccttaagcaaagcatgactttattatatataccatcacttactgtccaaactaagacataatttattatccaaactaggacatgtttgggactgaaagaagcaacctgaaatatctaaacagacacctgaactgttgcaggcaaattggaaagtgttatcactctgtatatgacccaagtttaagcattcactgtatcaacttgctacacatggatacattatcaatataaaagatctaagcctgggccacacggcaaaactctgtctacaaaaaatacaaatatatgacaggcgcagtggttcacacttgtaatcccagcactttgggaggctgaggcaggtggatcacctgaggtcaggagttcgacaccagcctgaccaacatgatgaaacgcttttttgttttgttttgttttgttttgagacggagtctcactctgtcccccaggctggagtgcagtggcacgatctcggctcactgtaagctccacctcccaggttcacgccattctcctgcctcagccacccgattacctgggactacaggcgcctgccaccacgcccagctaatttttttttttttttttttgaatttttagtagagacagggtttcaccgtgttagccaggatgttcttgatctgaccttgtgatccgcccgcctctgcctcccaaagtgctgggattactggcatgagtcaccgcacccagccttggtgaaacactttctactaaaaatacaaaatgagcgggacttggtgccaggcacctgtaatcccagctgcttgggaggctgaggcaggagaattgcttgaacccagaaggcagaggttgcagtgagttgagatcacgccattgcactccaccatgggtgatagaggaagactccatctcggggaaaaaaaaaaaaaaaaggccgggtgcggtggctcacgcctgtaatcccagcactttgggaggctgaggcaggcggataacgaggtcaaaagatcgagaccatcctggctaacacggggaaaccccgtcgctactaaaaatacaaaaaaattagccgggcgtggtggcgggcgcctgcagacccggctactcgagaagctgaggcaggagaatggcgtgaacccgggaggcggagcttgcagtgagccgagatcgcgccactgcactgcagcccgggctacaacagagcgagactaggtctaaaaaaawaaaaaaaaaaaatttagccgggcatggtggcaggtgcctataatcccagctacttgggaggctgaggcaggaaaatcacttgaacccggccctgggggtagacgcagtgtggggaggcggacgttgcagtaagccgagatcgtggcactgcactccagccgggataacggagactccatctcaaaaaaataaaaaataaagatgcacatgagatatttaagaggtaaatcgataagatttggtgacagattggatgtgcatgttaaggatagaaaatctagaaaagctccttgctttccaaaacaatgttttaatcaaatatgtgaattcaccatccctctttttcagattcgtggtgctctcaatgccgtcagaagcttggttcctgatgctttagaaaggaagccgaaagctgttgttactcacagcagtggaaaccatggccaggctctcacctatgctgccaaattggaaggtacttgatttctcaaggtactgggtagatcttcagaaaggagtggaaaagtgcccttaatttcagtgagagtgatgatagctgtgggaagtaactttccaaagaaatctctatctgattgcaagcaatatgaacataagttttttttttgtttgttttgtttttttgaagacagaatcttgctgtcacccaggctggagagcggtgacgcgatctcggctcactgtaacctccacctgccgggttcaagcgattctcctgcctcagcctcctgagtagctgggactacaggtgcgcaccaccacgcctggctaattttttctattttacaaatacaaaatactaatttcaccatgttgcccaggctggtctcgaactcctgggctcaagcaatccacccgccttggcctcccaaagtcctaggattacaggcgtgagccaccacacctggctgaacatgtttctttcttttttttttttttttttgagacggagtcttgcactgtcgcccaggctggaatgcagtggcaggatctcggctcactgcaagctccacctcccgggttcacaccattgtcctgcctcagcctgggactacaggagcctgccaccatgcctggctattttttttttttttttttttttttgtatttttagtaaagacagggtttcaccrtgttagccaggatggtctcaatttcctgaccttgkgatccgcctgcctcagcctcccaaagtgctgggattacaggtgtgacccaccgtgcctggccacataagtttctattctaaattctcctgactttttcctctcgttttcctctcccaggaattcctgcttatattgtggtgccccagacagctccagactgtaaaaaacttgcaatacaagcctacggagcgtcaattgtatactgtgaacctagtgatgaggtaaggagagcagtgcttggtaccaccttaacagctttcatttgaccaatggctctttctaccttactggctgctccttctcagcctcctttgtggtttccyctttatttctgttagcatgctcaaccttttctctatctacactcacaagatctcattagtctcatttcttaaattattacctatggtctaacaacaccaactccaacttctctccctttaacagccaacttttatataacagctacctaactttcccacttgatgtcttaaaaggcatctcaaactacagctaaaaccaaactcctgatcttacttccctatattgcttcccttccagtcttcctcatcttagtaaatggcaatttttattcttctagttactcaaaaaaaagttggagtcatctttttttgaaaattttttgttgttgttgttaaagatggactctttctatgttgtgggatccttctgcctcagcctgttgagtagctaggactacaggtgcatgccaccacacctaattcctttattttttgtagacagggtctcactgttgcccaggctggtctcaaactcctggattcaagcagtcctcccaccttggcctcccaaaatgctgggatcacaggcatgacccactgcacacagccaggaatcctctctgataaccctctcataccccacatccaaatctcagtctgctttcaacatatttccataacccaactgcttctgtgtctaccgttagcactctgattcaaaccaacatcaattctcacctatattcaattcagtagccaaactggtctctctgcatccacccttgccacactacaggcttttttgagcaaccagaggtctccatttaataaagtcagaacttgtctcttcttttttttttttttttgaggcggagtcttgctctgtcgcccaagctggagtgcagtggtgccatcttggctcactgcaagccccgcctcctgggttccagcgattctcttgcctcagcctcccgagtagctgggactacaggcgcctgccaccatgcccagctaattttttctatttttagtagagacggggtttcactgtgttagccaggatggtctcgatctcctgacctcgtgatccacccacctcggcctcccaaagtgctgggattacaggcgtgagccaccacgcctggccagaacttgtctcttttcaagtctaaatcctctgttggtttcccatctcatacacggtggaaacgagagttcttgcaatcatctaatccctggataaactcaaacattcctatctttctgacctcatctctcatctttttttttttttttttttttttttagacagaatctccccgtctcccaggctggagtgcagcggcacaatctcggctcactgcaacctccgcctcctgggttcaagcgattcttctgcctcagcctcccgagtagctgggactacaggcrcgtgccaccatgcccagctaatttttgattctttagtacagacagggtttcaccatattggccaggctggtctcgaactcctgacctcgtgatctgcccgccttggcctcccaaagtgctgggattacaagtgtgagccaccgtgcctggtccctcatcttctttttatttattttgagacagggtctcactctgtccaacccaggctggagtgcggtagtttcttctcagctccctgcagcctccgcttcctgggttcaagagattctcatgcctcagccaccagagtagctgggattacaggcgcgtgccaccacatctggctaatttttgtatttttagtagagacggggttttgccgtgttggcaaggctggtcttgaactcctgacctgaagtgatctgcccaccttggcctcccagagtgctgggattataggtgtcagccactgcacccagccttgacctcatcttctattatttctcttgcccactctgtgccagccatactaacctttttagctgttcctcagaaaggccaagcactcctactttgtagtctttgcactgttaccccctctctggaatattctagacatccacagcacttgttcagatcttttaaaatgtcactttactagaggctcttcttggctaccctatatgaaataaattccttcattttactccattgcacttagacataccatatatttacttcatccatctctaccatacaatataacgtgcttgagggcagggatattttattaacatatatatctctagtacctgaacaaagtgtgaaaaaagtagatggtcaataaaatgctgaatgaccaaatggaacttgttggggactctattaaatacaaatcaattaagctaaattaatgtactttcagtccagagaaaatgttgcaaaaagagttacagaagaaacagaaggcatcatggtacatcccaaccaggagcctgcagtgatagctggacaagggacaattgccctggaagtgctgaaccaggtaaaatagctgagttcttcctgtttagctactggtaaagctgttgggctatattcaattattttatatgtatacattaaatataaarctgcttacagtttatattttcactaaaggttcctttggtggatgcactggtggtacctgtaggtggaggaggaatgcttgctggaatagcaattacagttaaggtgagcagcttctggaggattccctgcttcaagcagaggatttactttacatcctaaatgttctgtatacacgtgctcaacattctgcacacattaccattccttccccttattcctttgggacttgagatgaaggcccatctctgcctcactactctatttactattattattattttttgagacagattctcgctgttgcccaggctggagtgcagtggcacgatcctggcccactgcagcctccacctcccgggttcaagcgattctcctgtctcagcctcctgagtagctgggattacaggcatgagccaccacaccccgctaatttttttgtattttttttagtagagacagggtttcaccatgttggtcaggctggtcttgaactcctgaccttgcgatccacccgccttggcctcccaaagtgttgggattacaggcgtgagccactgcgcccggcctatttattatttctaatatttttattttttttaagagatggggtcttgctgtgttggccaggttggtctggaactcctgggctcaagcagtccttactttggcctcccaaagtgctaggattacaggtgtgagccaccgcacccagccaactctcttcttaatccatgacaattttacagcacaaaagcagttacaagtgacaccatcatagtcttttccctgaattccatgtcatcaagctactatccataccaaggggctacccttttctcaaattaccaggacaatcagatgtgatccaggcaatggaaggctagtatcagacatataatttatttataaagtgcttgaagatattttcattacatccacaaaagggaaggctcttacttgggcagaaatgtattacttattgtgcctattttctttttttttttgagacggagtctcactctgtcacccaggctggagtgcagtggcacgatcttggctcactgcaagctccacctcccaggttcacgccattctcctgcctcwgcctcccgagtagctgggactacaggtgcctgccaccatgcctggctagtttttttttgtttttttttttgtatttttaktagagacggggtttcaccgtgttagccaggatggtcttgatctccctacctcgtgatccgcccacctcggcctcccaaagtgctgggattacaggcgtgagccactgcgccccaccccattttggtgtgatctcagctcactgcaacctacccctcccaagttcaagtgattctcctacctcagcctcttgagtagctgggattacaggggtctgccaccacgcctggctgattttcctatttttagttgacactgcatttcaccaggttggccaggctggtcttgaactcctgacctcagctgatccacccgcctcgggctcccaaagtgttgggattacaggtgtgagccaccacaccaggcccatattttcttttagacatgcaggcaatgttgtggtttgttgttaagatgtcttaatattcctcttcccaggctctgaaacctagtgtgaaggtatatgctgctgaaccctcaaatgcagatgactgctaccagtccaagctgaaggggaaactgatgcccaatctttatcctccagaaaccatagcagatggtgtcaaatccagcattggcttgaacacctggcctattatcagggaccttgtggatgatatcttcactgtcacagaggatgaaattaaggtgaggctccagcaagaaaagaaatagcaaagcatggtgtaacttcttaggcagaagaaacttcccttaggagtagcaagtgacccacgggaacctgactaggtaacttcatgacatgggagggtaccctagatgtattaatgacaaccctcttgacagaagcagagtcagaattaaagaaaagctttgggaagcgtgtgtacacagtgataagaaaattcaaactggacacgtattctcatctgaactttataggtaaaccaactagactcccctttcactaattcctactcccttccatatcaacagtgtgcaacccagctggtgtgggagaggatgaaactactcattgaacctacagctggtgttggagtggctgctgtgctgtctcaacattttcaaactgtttccccagaagtaaagaacatttgtattgtgctcagtggtggaaatgtagacttaacctcctccataacttgggtgaagcaggctgaaaggccagcttcttatcagtctgtttctgtttaatttacagaaaaggaaatggtgggaattcagtgtctttagatactgaagacattttgtttcctagtattgtcaactcttagttatcagattcttaatggagagtggctatttcattaagatttaatagttttttttggactaagtagtggraaaacttttatacttaactgagacattttgtcaaggctaaaaaaaagtcttgcaaaatggggcagtggactgacaggctgacatagaaaataaactttgcccaatcacaacttgtgcctcccatccctggagtactgactggcaccggtaagacagaatctctttgaatccattactccatgcccccttgaggcactgttgaagaaatctcacttttcagccagggtactggttctggtacatatggatcataagtccatttggggaagactcgtttatacaggttcatcagtactgtgtcttgagattttagcttcccatcaaagctgcatttcatktggccatgggtacctagaaagacatcagaacaagtcggtcaaattaaaagtagaaaattttaaagcaatgacttccaacccaacagtcatttagcaacactgcagaaatgcagacatggtctcaaatcccgtgtttccttacctaaaggttccttgatatgtcctctccggccccacttcgttctcagttccactggttkaaaccacagcacatcctcttagaatcaaacacattaaagaccaagatgaaacatttacccacaaaatgtaaacccaacctttataccacaaaggcaatcagatcccatcctcctccttcatacccacctctgytgaagaacatgtaacgtactactgccatcttagtaaaaattttgaaaggatgaccactcagaacaactctcttgatgaccattctgtctggatctactgacataagatggcctgtagcaatgaggctgtgcattcctaaaggacaaaagcaaagaagctatttaggaatttacaggccaaagtcttcatttattgcccagtccatttaaagacccatgcaagagcctggtttgtcatccctgccctagcccaatctgaggctaagattggtaaactgtaagcccacacttaaccttgtcaataggttcttgaaaacttgtacttcaagagaaatgatgtataacaaaaccatactttttctcatcagttgttacaaggaaaggatgttgaacaaaaggcagttatttgaggactggctatacactgtttcacgtaaaagttggagttttcattgttctattaacaatgttaaatgaagacttactgtattttgaaaaccatcattaccttctccataccatttggctcccaaatttaaataaacaagagaaaacggtgttcatctattaaggacctgcagggtctgttcatctctgtggctcaacttaccattgcttttttgcttgaaaagcagcacagatgcaggaggaaaagtgattggcgcatagactgtcgccaccagggccatgtcagcagtcaggaatctctgcaatttatgtttgtccgctgccataagggttaaaaaatgaaaagcaaaaccattttgagaaaccagaggtgatagaggcctgtgaaaagctgtattagtgcaactcttaaacctatggcagcttctacttctctaaaccaccagttctcaaaaattttcgctgcctcaatgcacctaaaagatacgatctagtcctatcagtaactttttttttttctttttttttgagtttgagtatcgttcctgtcacccaggctggaatgcaatggtgtgatctcagctgactgcaacctctgcctcccgggttcaagcagttctcctgcctcagcctcctgagtagctgggattacaggcacatgccaccacgcccggctaatttttgtatttttagtagagaccgggtttcaccatgttggccaggctggtctcgaactcctcaccttgtgatccacccacctcaatctcccaaagtgctgggattacaggcgtgagccaccgcgccaggctgtatcagtaactttttatttatttatttattttgagatggtgtctcgctcttgttgcccaggctggagtacaatggtgccatctctgctcactgcaacctccacctcccaggttcaagtgattcttctgcctcaggctcccgaatagctggaattgcaggtgcctgatcagtaacttttttatctggagtcagaatcttggagcctagactgtatttgatgttctaccttcaaggtagccctcacctcctttttaaaatactaaacttaaaggaaaataaaatattttaaggcaaagaaaaattaatctcacttagagattgtgattctcacaattggtgagaataaaaattatccaaaacaccattaatactgctttcttcatattcctcctgccactgctgagagtgagtgaactaggacgatgttcagaagcccccaagttagtgggcaacatatcttcctgctcctactgtgtaggagacaatcatttctgctgcaagtcccgtccagtagtctctcagtatctcaggacccctacctctgctttacccaactatgagccatacccagcctccattccttcacccacactgcccttggcacactagacatcaaagtttccacactttatcacacccttttaaattctgagagacagtgtctcactctgctatctaggctagactgtatttggtgttctaccttcaatgtagccctcaccccccttttaaaaatactaaacttataggaaaataaaatattttaagggctgtggtgtgaacacagctcactggagcctcaaactcctgggcccactggctcaggcaatccctcttgcctcagcctcccaagtagctgggactgcaaagcacatgccaccacacctggctaattaaaaagaaaaatttttggccgggcgcagtggctcatgcctgtaatcccagcactttgggaggccaatgcgggtggatcacctgaggtcgggagtttgagaccagcctggccaagatggtgaaactctatctctactaataatagaaaaattagctaggcatggtggtacacgcctgtaatcccagctgcttgggaggctgaggcaggagaatcacttgaacctaggaggcagaggttgcagtgagccaagatcctgccactgcactccagcctgggcaacaagagtgaaactccatctcccaaaaaaaaaaatttttttttcgtagaggccgggcatgttggctcatccctataaatcccagcactttgggaggccaaggcacgtggatcacctgaggtcaagagtttgagaacagactggccaacttggtgaaaccccatctctactaaaaatacaaaaagtagctgggcgtggtggcagacacctatggtccgagctacttgggaggctgaggcgccagaatcacttgaacctgggacggggaggctgcaatgagctgagatcatgttactgcactccagccttggtgacagagttggactctatatcaaaaaaaaaaaaaaaaaaattgtagagaccggagtctcacactcctgacctcaagcgatcctcctgcctcagtctctgcaactgagacttttatttagttccagttctaaggatctgcctttacaaaataagcaaagaagtaaataaagttttatgcatacagatctagtttagagcaaaacattagaaatagcctaagtgctcacccgtagaagctcaaataagtatcagtacatcacatacactggaatatatccaaatgacaataaagcattaaaagtctcattaactaattaatcttatggaaaattgatcaaaatcaattaagtgataaatgcaatgtttaacaccatatttacaattacaatccaaattgtgtaaagaaaaaaaatgagatctggatgaaaatgtataaaataaaaatgaattttctctaatataaggtaattttacttttacattattccttattttcccaactgtataaaatatgaaaatagttcatcctaaaaaaaaaaatcaaaaccattttgaaacaataaaagaatgactggccaggcgcagtggctcacgcctgtaatcccagcactttggaaggccaaggcaggaggatcgcctaaggtcgagaccagcctggccagcatggtgaaaccccgtctctactaaaaatacaaaaattagctaggcgtggtggcgggtgcctgtaatctcagctactcgggaagctgaggcaggaaaactgattgaacctggaaggcagaggttgcagtgagcctggattgcaccattgcactccagttgagcatcagagtgagactcggtctcaaaaaaaaaaaaaaaaaaaagaggccaggcacattggctcatgtctgtaatcccagcactttgggagaccgaggtgggcggatcacctgagaccaggagttcaaaaccagcctgaactcctggtcttggtgaaaccccatctctactaaaccccaacatggtgaaaccccatctctactaaaaatacaaaaattagctgggcatggtcgtgcatgcctgtagtcccaactactctactcgggaggctgaggcaggagaattgcttgaacccgggaggcggaggttgcagtgagccgagatcacgctattgcactccagcctgggcaacggagtaagactccgtctccaaaaaaacaaacaaacaaacaaacaaaaaaaaacaaaaaaaacaagagggggcgcggtggctcacacctgtaatcccagcactttgggaggctgaggcgggcggctcacgaggtcaggagatagagaccatcctggctaacacggtgaaaccccgtctctactaaaaatacaaaaaattagctgggcatggtggcgggcgcctgtagtcccagctacttgggaggctgaggcaggaaaatggtgtaagtaaacctgagaggcggagcttgcagtgagcctagatcgcgccactgcactccagcctgggcgacagagtgagactccgtctcaaaaaaaaaaaaaaaaaaaaaaaaaaaacagaaacaaaaacaagattaaatcttaccttttttggtcttcaattccccgttctaatgccacaagtgttgggattacaggtgtgaaccactgcaccactgcacccaccctaataccctttttataaagctgccaacttctattcaaaacctgctatggaacaaatactcatggcaaaaaagcctcagtatcacacagaagttgcatcactgggatgcttcagacaggttcagacattttgaataaaaacatcattggctcttaagccagagtactgaaaatacctctaacccagagatgtaagattttgaaaccatatattttggcacccctccaccacaagtcactttcccaaaagacaagatggacaagaacccagcttccccattgctaacctgcagtgtgctgagagaataaaggtgaggctcggaagcgcctgaatccacagtgaaatatgagctcttccttggctttcacaggttcagtgttgccagggtcacgcctcaccaccatattcaatactgacatctggggaccaagtaagaaaaacaaamatcttcatagtctaggaatacaattgcctaaactgaaagaaggcaaaccaaactagcagattcagactcattctaagaactgacaatgctaattaatggtggagtgtagatgctgaaacacgggttcatcctttacctccaccaatgactggcatttaagccaaacacaggctgatcagagctttcatgcacccttcaatgctaacctaccttcctgcacctaacagaaaagagctcaacatctgccacacaaaaatcagtggccttcaaggcattcactcaccacaatctcaaaaccacactcattcaagccccttcttcttgagcccttaccaaaaccgatcaaagaactatcacataccccacaacatacacaactactggccaccaagagaaaagagatctgcactttggcataaactttttttttttttgacataagagtttcgctcttgttgcccaggctggagtgcaatggtgcaatcttggctcaccacaacctccgcctactgggttcaagcaattcttctgcctcagcctcccaagtagctgggattacaggcatgtgccaccacgcctggctaattttgtatttttggtagagacagggttcctccatgttggtcaggctggtctcgaactcccgacctcaggtgatccacccaccttggcctcccaaaaagtgctgggattacaggcgtgagccgccgcgcccagccaaacctttatttttaaggctgccaacccttattcaaaatctggtctgaaaaacatacttggagaagtctcagaaccacacagagattgcatcactgagatgcttcagacaggttcagacgatatgaataaaaccatcattgacttctctattattctccaattcctaatcataaaggcagactttttgcatcccaatgagcaaaattttagtcacacataaacagaattttagactgtcagaagcagctggaaagtttcacaaccccccattttcccacaagacagcaatttaccttctgttcatgaggtagtaaagaaaatgcaatcaagggtgttccttgcctgaagcactcgaccactgagacggggacttcagagacatgaagtgtgacataccagccaacctgccacaagaaagcagaaagcaatcatggagttacctttcaaagtcccaatagcgaggaagctttctccaaatatgttgagtctctcagataaaatttttaaagccaaccctcatccttcaagatgcttcatttacccagatcacactttttcatttaacatagctgatacctctttgttcccagtatcattctaatcaatgactcaggggctcccctaatccccaaatgcagcatattttcatgccaagagaaggaataaagtagggagcatgttgacaaatgaaagcaacatacaagatgaacaaggaggatagatacctcagctccttcaacctctttttcttcaacctctttaaagatgcttttcctagtgttagtaaagttctgaaactgaaatattcgagcataatcttgaggaaggttttccttaggatcccatggagatgtccggaagctcttaaggcctctgtatttctgaaatctagaatattgaagatttttaaagacattaagtcagatttatatggtgctatatagactcaagtcactgctaaaatggctaaggagctagctgaaaagaactccaatcatcctctctccaaacaacccaacagcttaaaccaagacgacr

SEQ ID NO: 95590 - DNA, 13002 bp, Homo sapiens
actctgtaaaatggacgaatcagcaggacgtgggcagggccaaataagggactaaaagctggccacctgagccagccctggcaacccgctggggtccccttccacgctgtggaagctttgttctttcactctttgcaataaatcatgctgctgttcactctttgggtctgcactacctttatgagctgtaacattcactgcgaaggtctgcagcttcactcttgaagccagcgagatcacgaacccactgggagggacaaacaaccctggacatgccatctttaagagctgtaacactcactgcaaaggtctgtggcttcactcctgaagtaagcaagatcacgacccacccggaggaatgaacaagtctggatgcgccacctttaagagctgtaacactcactgcaaaggtctgtggcttcactcctgaagtcagcaagaccacaaacccaccagaaggaagaaactctggacacatctgaacatctgaaggaacgaactccggacacaccatctttaagaactgtaacactcactgcgagggtccatggcttcattcttgaagtcagcgagaccaagaacccactggaaggaaccaattccggaaataaaatgactgaagtagccattacatgaccacgatatttattattatatgtaaataattaagtatataaatgtctcttttttcagggttcaaaactaacttcggtgctaaatggagaactgagacaatcatacaggcttggcagattagtgtagggcaaacaagagagggaaaaacatggtttgaattagcctatgaattgtttctatatcttctctcacttgagcatgattaaataaacatttgcatattcacaatagcaattagaagaaaacattttaaacatgttgctttaaactaaaaaatctaaaaacatgcaaacaaccattccaaccactaccttgaacctacaagtactattttatccttcgggatcccaagcaacacataaatttaaagcagagagcacacaagaaccccagtagaaaggaaacagctggttaacagctgcatagtgataccatacgccagttttcaatgaaaaataacacgtttgattagagcctataagctaaactcttatccctggttatctcgtggctaaacaaggttctctcatgttttattcccttcacatttgggccccatcctgcagccctagattaaaggcaaagaagaaacatggatttcagtcacattatctgctttctaaatccaaattcaaaactattattcattcaaagtaaatatgcatagcatatcatgagagagaacattttgttcaaggagacccaaagaaagcatgttaattataacttgtattcacgtagcacctaacttaggaggagttcaaagcaaatgcacgtgtggaaaaggtcaaacccaccagtgaaacaggaaagccatggagcttcttttccattccatgtcatccatataaggcggggtttccttttatgtctaagtttagacatcatcagaaaagtcaaaccacaagagaatgatgaaaattgtgctaaaatgtggttgatgtttatgttttctgtaccaacacaaccctttggtggaaagtctgaatcagcttctctgagaacttacttatgatacataattagaagcgtttactcttaaaaaaaattttagcactcgataaagctcatcatatagtctgtataagcagcatacaaggttatagcactatgggagttaagaaaataaatgaagctttggttctgtggtgggagaggtcaattatatccacaggttgaaggcagttgttactcaataggcagaaataaggaaaaaaattgagacctacatacaaggagaataaaatgacataaaacatgataatgaagagaaaaaagtgagggatataaagggagtggtgagtagccccatacgtctaaagatgggttagagttagaaaatttatgacatggggagtattgtatagggcttaaaagtgagggtgtgaatcccagatctaccacatggttctcttgtgaccttgaataagttacataaactcttcaagcctttgtctcctcttcattaaaatggagttaataatattacatagctcatatggtttccacaaagattaagtgagataatccctgtgataatcacaaagggagaaagtaggttctattattcatctttgtatgtttggaagtaagcacagtgcttgttatatagtaagtgctcaataaatgttagcttccatgatgattaagaattttaagataagaaaagaaaggtagatccagagcaacaagacattgggctatcacattaagggacttggattgtatataatgataaatggagagacaatagtaaagtttgtgatcagaacattgcttaagttaatctagaaaataaattgtaaggagactagagttaggattactacagaggaggctaaagagagcccaagctagatgggtgactgtgcttctggaaagaggagaaagaagaaatatcttggaggaagcttaggagcaacccacaggaaagccatagaatattttctttagctgggtgtggcggcaagtgcctgtagtcccagctactggggaggctgaggcaggagaattgcttgaaacccggaagcggaggttgcagtgagcagagatcgcgctactgcactccagcctgggcgacagagcgagactccgtctctacaaaaagaaaaggaaaagaaagccatagaatattttctacatcttcataaaaacaaaagggctgaattcataaatgacttaagctcaacattagactgaccactgggacaatgaaacaaactctaagactcaaatatcctgaagatacaaattccagataaattagacatttactggcaggaagttagaactttcatcttaacgaagaaaaattcaggaaaacagaccatttctatgacttagacctcaatcaaagtcccgagggagatatttatttaataaaatagttaggagtgctgactgggtagccaaactgcccgagttcaatttcagcaccgccactttctagttgtgtagcaagctactcaaccactccatacctgtttgctcctctatacaatgctcacccctgctggtatctaattaataacagtatttattttaaaaggtttttgtgaggattaatgatttaatacactttaaacacttagaactgtgccaggtacataattaaccattgataaatgttagctttttttttttttttttttttttgagatggagtctcgctctgtcacccaggctggagtccagtggcgcgatctcgaatcactgcaacctccccatcccaggttcaagcaattcttctgcctcaccctcccaagtagctgggactacaggtgcatgccaccatgcccagctaattttttgtatattttttttagtagagagggggtttcaccgtgttaaccaggatggtctcgatctcctgaccttgtgatctgcccacctcagcctcccaaagtgctgggattacaggcgtgagccaccgtgccctgccaaatgttaactatcttaattcctgtgctatttcgatttgatttgggccaagatttactggtggcatgtggatcaatcccaaatgctatgccactttccctgtgattcacaatgatgacccatacaccatgatataccactgcccctaataaaacagactcatttttcacttccccaatctcccacataccaaagatacaaggtttgacaattttgcacatagtatgaaatgttactcttccttgcatgcatcatgcatgttcacatcataaagtggaatggctctaaaaaccaagtgttgtggcttcagatgactgataacagatgttaaaacaaattcctgatttaggttaaaaaatctcaaatactttcaatatttgtatgatttttttaaaggagacatttttcaaatatgagttacaaaaacaaaatccatattcaaagtacattctgtatagggatttaaaagaaaattagccgggcatggtggctcatgcctgtaattccagcactttgggaggccgagatgagaggattgcttgggcctgggagtgtgagaccagccttggcaaaacagtgagaccttgtctctccaaaaaaaaaaaaaaaaattaattagctgagtatagtggtgcatctgtagtcctagctacttgggaggctgaggtgggaggatcacttgagcctgtgaggtggaggttgcagcaagccaagattgagccattgcatttcagcctggacaacagagtgagaccttgtctcaaaataaataaataaaataaaataaaccaattttgtgttatatttttagaaagtgagtttaaaaataataaaaagtcttctgtttatcatcacagagtaggcaatttctccataactactatgtaaaatataaaatgtagacaatgaactcataaaaaataaaataattatactgtttatcaccacataattgctatataaaattatgaaatatatattaattcaagtgtcttattctaacacacaaactttctgttgcacataatgggccatttcaagcctttgatgtttaattactatttaatgatagactactaattccaaaccagttcacaaggttgaaactgtttcttggatcagttcagcatccactgcaattttaactaccctgaattactaatttagtatcatcatggacatgctaaattaattatttcacttaatattgagcataagctaagtgcattggaaatccgcatttcttgatatctgaaagaaataagaaactaagagctacagatttttaaaagagcattcagaaaacttcagaatgaatcagtgcaagtaatcacaagtctctaatttctaggcaatactttatttcattaaacatggaatctttgaaatattcctttaacacagaatagagttttatgtatcccaacttgtcccatactgatcagaaagtgacaatcatgaatgcctaaagaaaccctttaaaagtcaagatgacctttccagaatgtacactcccattttgtgcataattattctacatggcaaacaaaaagaccatgattattttataaaaccacatctgtctagataaagcaaaccatatttttatgycactccataatattaagcaacgtgattaagtattcacatctgtcatccttttattcttctcctttatcatcagctaaaaagaaaacatgaaagaagtgaattgatctttaaccagaggaaaaaggaaaataccccacctttggcttatcaacactggcaactgttaccaagctctgggctcaaaagacctaataattaccttcagggtaagggacagtaacaacatccaaattcctcccaacagaccttccatgcaatttatcttattgcctcctggaaacaagatgtatatgttaggtttgcagtgtcagtgtgatcctttccattcttcaatgtgagaaataaacaggtagcaatatgtatcatggctaaaaactcaggcttgtattagaatgccgagagttcaaatctcagcaaccccacttacagaatgtatgatgctgggcaaactatttctctaaacttcagcttttttatctataaaataggtccacataaagggcttagaacaaaccctggtacaatgtaagtcctcaataaatagtaaacaataaaattattatcacaacttaattaagagtgacagatacattctgcagcaaaggcatgaatgatgactgtatttgtgtgactggacaagggctttctgtttgttactttcagtcagaggagacagcattagagaaataagtgaggccaggattcagttcttagaagcatagaataagccctattttggctcccttctcccattagagacagccgcattttcttgtgcagcacagcgcctgccacatccctgagacacaacggtgaaggtgaaggccagagtcaacgaatttggctatactgggtgcctggtcactagggctgcttttaactctggtaaagtggatattgttgccatcaatgaccccttcattgacctcaactacctggcctacatgctccagtatgattccacccatggcaagttccatggcaccatcaaggctgagaatgggaagcttgtcatcaatggaaatcccattaccatcttccaggagtaagatcccaccaaaatcaaatggggcgatgctggcactgagtacgttgtggagtccaccagcatcttcaccgccatggagaaggttggggctcatttgcagaggggagccaaaagggtcatgatctttgccccctctactgaagccatcatgttcatgatgaaagtgaattatgagaagtatgacaacagccttaagatcatcagcaatgcctcctgtaccaccaactgcttagcgcccctggccaaggtcatccatgacaactctggtattgttgaaagactcatgattacagtccatgtcatcactaccacccagaaaactgtggatggcccttgcaggaaactgcggcctgatggccacagggctctccagaacatcatacctgcatctactagcactgccaaggcaatggtcaaggtcatccctgagctgaacaagaagctcactggcatggcctcccatgtccccactgccaaggtgttggtcgtggacccgacctgccatctggaaaacctgccaaatatgatgacatcaagaagatgatgaagcaggcttcagaggatcctatcaagggcatcctgggctacaytgagcaccagattgtctcctccgacttcaacagtgacacacagtcttccacctttgatgctggggctggcattaccctcaacgaccactttgtcaagctcatttcctggtatgacaatgaatttggctacagcaacagggtggtggacctcatggcccacatggcttccaaggaataaggcccccggaccaccagccccagcgagagtataagaggaagagagaggcccccagctgctggggagtccctgctgcactcagacctcacaacactgaggatctcccctcttcacaatttccacacagaccacctgaaaagggaggggcctagggagctccaccttgtcacgtcctattactaaagtcccctgtgctcagtcaaaaaaaaaaaaaagaaagaaaaaggtcctactttattgagcagccattattttttaaaccaggcatgtaaataataaaaataattcaagcagtgagggtggagtatgcagtcaatgaagaagagattggtatgctcagtaagaaatcaattgtaataggctgggcacaacagctcatgcctgtaatctcagcactttaggaggccaaggcaggtggattacctgaggtcaggagttcaagaccagcctggccaacatggtgaaaccccgtctctactaaaaatacaaaaattagctgggtgtggtggcaggtgcctgtagtcccagctactcaggaggctgaggcaggagaatcgcttgaacctgggaggcagaggttgcagtgagctgagatcgcgccactgcacgccagcctgggagacagcgagactccgtctcaaaaccaataaataaataaataaaaagaaatcaatcgtaataatttaaactagagaagcttaggacctgaactaaggtaatggaaggaatttacattgcaaaaaccttgatgcatctccaacattccagttgttattacattctgggtttttagccttaagcctgcaaggagggttggtctgttttatggagcaggaaaaaaagcattgcccatattaaggctcattttagctagagtttttatcctaaagagataaccaaatattaactaattttatagttaatttaagaccagtacacaatagttgcttttttaataatatgaataacaagactagggcaataaagtgatgtttttgttatgtattctgtaaaattagaataataatggtacccaccttatcatgttattgtaagaattaaataaattaatatatgtagaatgtcaatacctgacacatcctaaatagttttagttggtaataatagtaatggtagcagtgttgtttagaatattatgaaccagataagcccatatctaaatattagttttctgacaacctcaactcttcagaagtaagaaaaagggcagcaggttaccatagattttatcttagcactccttcctttaagacctttgttctttttttatttaacatgtgattcttaggaagcttctaaattatcctacaacttagtaaacttgacagattaaaggagtgctaaacatgaaacctaagggcctgatacttaggaaatggataggaaagctaaaaaccaaatgccacagggaaagaaacatttgttaggttcagttgcttagtgtacattaattcatttaatcctcataacacttcttgacggtagtgagaattctatccattttctagatggcaagcctgagatgctgagcaactaagtaaggagcccatatgtaaagagagcctttgaacataagtcactctgccttagaaaaagactccatcacatttcatagagcatcttgccaacaaggacaagatgttttgctgaataaataaataaataataaaggctgcatccaaccagataaggacataaacaagcatactattctactatcagtcctcaccagaggactgtggccgtaaaaagagctcagaaatttgtaaacaactccattgggcccctttcccaagcttctccctctgtgctatctctttcctacttactggttcctaggagctcctcttttcagtcctgcagccaaaaagctggggttttatttacccccttctctgccacctacttcctgccgctgcatccacactaagtgatgggaggatggagatagaaaaacagcatgaaagtttgctctgccatcttgggaccagatttcctcaaatcaaagttctcttccttcagaatttaaagcctctgagagcgttcactgccaccactgccactaacaagaggtcactttcatgctctttgagtctgaactaaatggcgtctgcagctgtgtgtctatgacaaggtgctctctcaggtgtcaggctgccttgagtctaagccagaagataccagaggaaaaaatgaacaaattctggtcttcttcccactacatctgctattatttattttttagattcctcaaatatctgctttatgtattctgtccaggatgcatagtttcactcagtgggagagacagagtaaaatgtattttaaacaactctcatcctatttacccctattccaaaatacggcaataaagaattgtgcttccatgatgtctcttagtgttgttaaatgatactaaattttcattttagagagcagaaaaaatgtgaatattcatcaagtacaaccaggtacaacagtaattaaactatccccccaaaatacttcctatgcaataaattatatatatatattttagagagaggatctcacactgttgcttagactagtctcaaactcctgacctcaagtgatcctcctgccttggcctcccaaagtgctgggattacaggcatgaaccaccacacccagcccctatacaataaatatttcataaagaatgatgggtggactatttggaggtgggaggcaaatcatcaggagttcataattaaattcttttcaattgtcaaaatttagttcaatggctgttaaaaaaattacaatattagtgattaacctgtatactttgtccttataaaacgtcaagttgttatagttgtgttattaattattattattttctgatgccttggtgatcctcctgagaaataaatttccagataatttaatatgtgatttctgtgacataaacatttagattgctggaaatggtaaattgctaaatgtcacccaagttaaaaaaaaatagtttaatggtcaaaatatagtatttcaccttgttatataatcagtaatactatattttcacagtaggacttgttaatatagtgaaatcctctaaactggtgacattgatacataaaataatgttaaagtcactgctcggtcagtaaatgcttctaggtgcccccttcaccaacaaataacaatgtttgtttggttttgagtcgtagagcaggatatttcgagttctagagcaggattatgagaaagaggccgacgagatctgaggaagatcctcctcatgtacgttttccaatttaggtaacaggcaagaaagactaaaattttcctagtggagaatcatctgttttgacttacacttcaccccctctccccttattggttgataacacaaaatccacgaggctgatatgctgaacacccagtggttcactgcccagacggccactttgggatgaagtcctcatcttacccagctactgagcatgtccactgccttgcccaaggcaccctataccaaactaaggactggtcaatgggagtggcaggaggaagttggattcagagatgtatttcaattcaagaacactctgagggtccttctgagctccagagctcccccccttgggatggctggagaccttcctgttattgcacctgagttcagcctctcctgctcaacccccttcccttactcccttaattgtattgttgctgacaacattccccactaaatctcctgcaaataaacctctgtctgtggagtctgcttcccaaaattggtctaggacagctgagcaagggaaaggggcaggaaaacacgtacaagttaacaacactgtatataaattagtttttcagatcactttcttactttgcagaaagagattaaggcaagcaaaaggtactaaatcacataagagaaggcagagtgtgggaggagatgtgaatctttttactcagtgatttaactccaaatgaagtatgtaaggcagttaagagaaaaccctatgattatttattttcaaaaatgttcatcacatcattatatataacagtgaaaaatatgaaaacaatctaaatgtctaagaatgaggaatttattaaatagtgaaaacatcatatgatgaattttccactaaccattagattatacattattgttaagagacaagtagtaaatgaacttataaatgatcccaattccattaaaaattattgtttatagacatgtacttttaagataacaatgatttgctggctatgaaaatatggatgatttttatattctatgtatttttctgctttataaatgtttttaatgaaactgcatcattttataaccagaaaaacacaattttattaaaaagtttcaccaaatatatacctatacaaaattccttgactaataaaaattactcaaatggaaggtaaaaatatgtgcttttataaaggattatgttttcatatttttaatagctaaaggcatagaaacaattacttaggcaagataacacatttttagaatattcaatgattgaaattcattatttgcacaactttatcaagagaagatacctcattttgcaaggctaagtaggaactaactttattttgaaattgaatccttcaaaaatgtggtctgtctgtgtgcgttttttagttcaaaagattctttggtggatagagatgtttgagattcatgattttaaaatacagaggaataaatatcccaagtaatccattacaagactatattaggaatatcaaaagaagatgagcagggactaactacttgtgaaattgttctttataagattggataagcaaatataaataaatatacatttaaaagttgtccaaagaaagtataaactatcaataaacaaaaaaggtacagagatgaatgtgtattctttgtactcaggacaagagagtacaggtgacaaaatataaataaatgatgaaaatcaagtattatacaggatttatgacgaaccatcacttaatagattcgaacttacaaagacagtatacatgagcacaatgctacaaagtgtgaaagacacagggaaaagaaaattgcaaaatgttattcaacacagccagatgagttttgcctgaagtttaatcaatgaaaagacaaaaaataatagtggatttaagaaaaaaagcaaataatacagttgtatcttaatatataactactgttgtttttactaaggaaataaattggcacccccaaaatggcaagcagaatcaagaagggacagaaaatagagtaatggggagaagggactgagtcccacttcactgagacccgtagatgctgtaacacaaccagtaacattactaattctatcaaccctaactaattgtacatgatctcaaggtgattccaacagtacaggcaggataaatattcatggaagtaactgtgagtcacacagagcagacctttcctcaggagtggcaaaatggactgattttggttgggaagtgctgagagacaatgaagcgcctcacacataatcacaaatcccaccttgaaaaatggaattttaaaactacattttagaacaatggcaatacatttgcatttctaatattttttaaattggcttagctagaaaaatttggctcatggctaaaaaataatataaaaggtaggagaagggttatgtcttatccagtttcacataaaagcaatttagcaattttgtagaacaccacagagcatcagcagattaaagccacttttacatccatgataactttgagaagttagtaaatccagattaatgacaaaaattgattttgatcactaaaaatgtgtagctatttctaggttgtttgtcacttctaaactttcagtcctctcaatttgccttctatagagtgttttttctttttttcttccaaagtttgcaaatatataaatactcatgaaattatctcccatgccaagatactaaaataggatatataar

SEQ ID NO: 95591 - DNA, 31191 bp, Homo sapiens
agtgtagtggtgcgttctctgctcactgcaacctccacctcctgggctcaagcgaatctcctgcctcagcctcctgagtagttgggattacaggcacccaccatcatgcctggctaatcttttttttgagacggcagctctgttgcccaggatggagtgcagtggcgcgctctcggctcactgcaagctccgcctcctgggttcatgccatttttctgcctcagcctccagagtagccgggactacatgcgcccgccaccacgcccagctaattttttgtatttttagtagagacagggtttcactgtgttagccaggatggtctcgatctgctgacctcataatctgcctgcctcggcttcccaaagtgctgggattacacgcgtgagccactgcgcctggccatgcctggctaatttttgtatttttagtagagatggggtttcactatgttggccatgctggttttgaactcctgacctcaaatgatccgcctgccttggcctcccaaagtgctgggattacaggcgtgagccactatgcccagcctaaaacactttaaaacagataatatttcacatactttcaaataaagacaaaaagggtacacagatctagataagtggacacatcaaccacagtaagaaatgatcagaatcatggatgcacccaatcatcaatattaagtattgagatggtaattggatggagtggaaggcactaaagaggacatcatgttacttattcttgacaggctttgttgaagaatgatttaaaattcaatggcgaaaagcaggaaactttgcaagagagaagcacatcttagtttgctagaaggaatgtttctttcataaatgccacttaccagtccaaaagcttaagaaaaactacatgttttgtttcaaatgaaattcctgggaaaattttaagagttctttatttagctaatatggctattttatattttatagacttatggatggtagtgctttgccacctgtactatttcttcatacttaagtcggaaattaaaatttgacaaaccatgtgtatgcactattaaaaaaataaataaaatttgacaatcataccagaagcactctcattttgtagcaaggttttgcataaaaaattagagagtgcgtcaattggggaaacagtactgatataagactcacagagccaacatcacatggaaataggcaagctactgaaaatgcttaccaaggaaacttacaaggttgcaattaacttcagatcaactgcacttacccataatccactttcatatgctgcccattgaagaaaaagacagtagatggaatataactgatgtcaaaatactgtgtataaactgcagtttggtccacatctaccaggtatatagcagccattttacttaagtcagaagaggtcttagaaagctgcaaatgacgagagagacaaaggttacaatatgagaggcagcttaatgtttcttctgtgaaacttgttactacaacagagtgttttgtttgaaaaaactcctgggccaacaatgcagcccatgtggctcccacattagacaaagcataaccccatcctccagagtctcattcactgcaacggggttaggagggaatcttggggaaaactgtatgaggttaggaagggaccttggggaaaactgtgtgaggttagaaggggaccttggggaaaactgtgtgagtttaggagggtgacagcatgggagtattcctgtctattcattgtggagagagacctaacccagaactaagacctctacccgccatttctactgctgccatcccgtgttaagagctgagcatacaaatccttggggaaaactgtgtgaatctatttcttcctttaatttctttctttgaatgcttttataaaagtagcccatgctcatttaaaacaacacaacttagaaatatgttatgtggatactgaaattccctaacgtctccttcctcccaatcctcccagaaatgaaaaccacgataattagtagcagacacttatataacattactatgtggtaactgtcctaagtgcttaacatttgttaactcatttaatccttacatcattcttataaggtatatgctatcagagtccccattttatagatagggaaactgaggcacaggaaggtaaagtaatttgccccaggtcacacagctcctgagcagtagggctggggtttgaactttggcagtgtggcttcagtgtctacatcactgacctctgtggtatttcctcctgcctatgactgagggtagaatcctctggtccttttttccccaagctaacacatcacaccytcattgtaaccacggaaatgaggatttgtacgctcagctcttacacggtatggtagcagtagaaatggcggtaagaggtcttagttctgggttaggtctctctctgcatcaggcacatactggaggcagcacactagaaaagattatttgcagctacagaaaactgagttcaaatctcaactctgcaatatagtggatctgcacctgtgggaagttacttgacctctctggttttttttttcctactgggaaatggggctactattatcccactactgcgagcactgaaaagatagtgttcacagatgcttgttaatagttttctgctcttccatcaccttgttggtgaaacagcattgacagcttctagtgggtaaggacatccaagacagattcagcacacacagatttgggggcttggttcagggcaggcacacaatcagctcttagtgaactaacaaatgaacagctatatacccaaccctgactactccctctcatgtactactcagatgctgaagtgagaatatacagattattaataaaaaccaattattttagacattcacttacaatatcatctagctgcagacagacaggatcttcatctctcccaaacctgagaaccaacaccttctcagcagtactttttatcgcctggtctacttcctttttgctagtcagcttgggcagtaggaagctcatcttgaaataacccaaatgtgaatcctcactgtcactcctgaaataaaggtgcaatgtttaaagacagtttagattaagtgcgtgagccctcattaaaaaaaattaattcacagagtagctaatgtattcacatggtatgaaagaaacatcatagaaaggtaacactgtggagtttccctctctttgtccctgctccttggaaccagttttcattgttccctcccccgggccagataactgctttcattagtttctcatgtatctttcagagttttgttatgcattcaccaaaaaatacaaatatgcgttccgatattttttttctctctctccccacccccaaaagatagcctattgtatcagtgttccagcaggaaagcgatgacactctcaactttggtaatttgaaggcagtttaattaaggcaggtgtagaaaaacaatacggtaaagtgtactactttggggctagtaacagcgggatgctgtacccatccctaggccatgggaggaagaagccacggtaggaagcagttataagaattgtgtggcagaaagaggtgagtggagaggacagtgtataggagggcagcctgctgttaggtgttgcagccactctcctccctccctctgacctttgctcatgcaaccaccggctgactccaactggaaccagagggcaggggcctgttgaggcaggcaaacctccctgtcccagagcagtctagaggaggatgaagaatggctgtggagggaccaatggcagatgttcagcacacacactttatctactcttcagcacttttcattatttcaaacctaacctatgaagattgccccatatctctatatagagaacatccatattctctgtcatggcagcatattatttcttgcatgtgttacactttttaaacagtcctttattgtatactttatattattacaagtcctggcttaaagattcttcgtgtgcaccttactaggtgcacctcattacacggcaaacagatcaattaagagtgtgtgtgaaaactacaataccataaacaaataataaaatactgaggtacaagggacctaatacaaccccgtcattttacaaactagcttgcttacagttgcactttctactacaatgacaaggactagaatacaggccaccaaatttctagtccaggggtccttctactacaataatctattttcatgattggtagaaatttcatttttgagaaactctttgacaaagaagcttagttttgtggtcatctataagagactccattgagatggtcggtattttgaattcagttccaaatatgaaaagggaggatttcttttcctattttttttgtcacaagtcacattttaagatacgaattaggccaggctcacccctgtaatcccagcactttgggaggccaaggagggtggatcacctatggccaggaattcgagaccagcctggccaacatggtgaaaccccgtctctactaaaaatacaaaaaattagctgggcgtggtggcagrtgccacctgtaatccaagctactcaggaggctgaggcaggagaattgcttgaaccctggaggcggaggttgcagtgagctaggatcgctccactgcactccagcctgggcaaggcaacaagagcgaagctccgtctccaaaaaaaaaaaaaggaattatttaactaaaattcacataggaaataagattgttccagctataggtcatactttaaacagggacattgatggcccaaagggacgtcatcagatgtgagcagcagaacaaattaccaatgaaagggaaggtcaaagagaagacggatctgtcccactagaattcaaacaaacagcaattcctccgtgttactgatcgaaaggagaaagtaaggggagaacaaagttgttagtggtgaggctaggggtgcaactggacaaacgttggaagcaggagaggaaaactgagaccacatctaagaaaatgtccatagtaaatgatacccacagagaattcccaaaagaagacgtacaaatggacagtaaataaactaaaaagttaagctttaccagtaagcaaagaaaagcaaattaaaagatatgtttacaaagtcactgaattggcaaaaattaaacaagatagtggtaggggcaggcacagggagttcctgctggaatgcagacacaaaacctttctggaaagaaaactgacatactctttgaccaataactccactgctttcctctctccctctctttttctgaggcggggtttcgctatgttgcccaggctggtctcaactccccaggctcaagcaatcctcccgcctcagcctcccgagtagctggaacctcaggcgcgcgccacaactgcagaaacaccaaaaaaagaaaaaaagcttgaactcacttttgtacagaatcttactacaatgtattccagaaaaacaactggaaatcagtggtcatctctgcgtgtgaacgcatgggtgatttttatttacagccgggcgcgcatctccattttccaaaatatccgatatacatatttaaagtcacctgtgttgcgctgctcctggcccacaagcgctaagggaccccagcacttaccttactcgtccacgccgcctcactccctttcactttgtggctgtcagcaaccacttctcggaagagcccgggcgcggacagctcctttcatcagccccaagccggacaggaccctaagaccaagtcacccaggggctgttgcctagcaaccctcgtggccccgctagcgggaaggaaaccgaacagaaaacgcacaagcgcagaaaagaaactcctggccgtcggtcggcccccgctcaacagcccaataaacggaagagcttctagtcaccgcccaccttgctcggctctgacsggaagctaggcgtcacctccgcccgtattaaagatggtcgacctttttcccctccttttcctgcccccagactagaggcgggatgtagtctcttaggctaagagtgattggtcacaaggagactcggaagtgtctgatcagagccccagaggaggccttgagagcctgttggcgtaccgttccacacttggatccaggaatcgggcgtgttccaggctgctctctatggtagctttgggcggatagagggggcgcgcaaagtattaagggacaataatggccgctttcaaggtgtggattttggctccttgagcctgtctgagcgaggggtggcagcgccggcgccccagaatccgggacagaagggtcccaagagtcgcgcttggtgaggtgagagtcccttcttccttcctggcctgcccttctgtaatcatggcggctctaggcggcggatattggtcccctgctcaggtccgggccccagtttggggagttcctctgtcgtccctgtcacccaccttgccttactcacctcagggatgctgcatccgtcctggccgccttggccttcctccttgctctggtcaaatcctgctgcctggagcggcctcgctgagatccagggatgctgcctggagtggccttggtccctctcccaggcctccgctttaacccaccccagactgtcaccgagcccgagtaggactccttgtgtcttcctctgctctctcacagtgtcatttataccaggcaatctggtgggcgatctcttctactagaatgtcagctccaggtgggcggggatttttgtcttgttctctgttgctatcgccgagaacagcaattggctcagggacaccctcagtgaataattgttgaatgaatgaatccaggttctttcttccctggctttctcgtacgccttgtagtttctttgccattaatccttctcaagaatcttgctctttagctccttatttgttcgtctcagcagctaatgaagttctctctggctgtctccttgtcctgtgttgctggaatcttcccttgctgtctccagaaatgtttgggttcctgtcctcctttaataagtttaaattaattcattttttaatttatcaaacgcttattttgctagacattgagctacagcagtcaacaacacatccagtgttctctcaactgcgtagaatggcagtccagggtacctttcctagtttagacaactattgagtagagcctgtatatctttaccttcttgtgtggatttcctcacatgcgcacagatgtcaccaatatgcagctttctttttttctgttctgcctgatggcattttcaaaatgtaactcttgtttctgcattaatattatgtgtccagtctgtttggcaatactctgtagagctgtgcatttaattagagtttggtaaacaattctggattctggtggcatctcctttgctttgctaacttgttggaatgagaggaattatccaagcatccagaactgatatatgttgatgagtggcagatgtgtagtgagaggtaaagaggagcttgttccaacttgagtgccagaagtcttgtagccacttaaatacttctcagtaacaccttttcctaacctggtgtttctcataaatatttttggtgaacatggattgttattaaactgattttggctgctgtgagtaaattgttttctgtaaaacgcagctaggccaagaaaagccactaaagtatggagaacatggacggtagccttctgccccatctctgtgctgctgtacctgttgtttaaagagaggaagaggtagaactcatgtaaaaaaatgggtgagggaccaacagtatataggaggatagcaaataatacaatgtagcagttacatttatgttaactgttatggttacataaagagctactctttatggtttcacatacactttttgtttgattctcacaatagcttcatggattagataaggtaaaaattttttccatttaatagatatgaaattatggctaaacaaagattaagttatttgcttaccatcatacaggtagaaagtgtcaagagcctggtttctaattgaggtttctgattcaaatttagtggtgttttccctacatccctgttacagctgctgacatcaggctctagaaagtgtcccttagtgagacyttttattgcctcttggatctttgtgggggctggggaggaatgtatggggtgtgtgtgtgtgtgtgtgtgtgtgtgtatctattttggtgtttattgggggttggaataggagaatctttggagataggcagtgacttgatggaaaggtcttggagagagggagcaaaagtagtcctggtcttaaggggagatggggaaggttaatcacctacatataaccataactgcatttattgtgggatatagtagagctgagccttctctagtaccaaatggtttgccttccttccagagaaatcccagatcctgtgatgggggacaccagtgaggatgcctcgatccatcgattggaaggcastgatctggactgtcaggttggyggtcttatttgcaartccaaaagtgcggccagcgagcagcatgtcttcaaggctcctgctccccgcccttcattactsggactggacttgctggcttccctgaaacggagagagcgagaggagaaggacgatggggaggacaagaagaagtccaaagtctcctcctacaaggactgggaagagagcaaggatgaccagaaggatgctgaggaagagggcggtgaccaggctggccaaaatatccggaaagacaggtaaaggccttagtatgggttagcccagagggaagcgaacggaggctggaaaataacagctcatgtttatctctcagttttcctgttggagatttagagctttatgattttattatgattctgtaatactgaaggtaggtaggaatttgtggggaaaaacaaaggtgaataaagackagatggtagaggttagaaatgccttgggttgttgccatatgtgagcctgcgtcccagggagagaaagtggaaaaggacagatcacttgtttggacagccaaaggttttagggcagagtttttctcctatggaggggcctttaccagttgctctccctgtttcagacattatcggtctgctcgggtagagactccatcccatccgggtggtgtgagcgaagagttttgggaacgcagtcggcagagagagcgggagcggmgggaacatggtgtctatgcctcgtccaaagaagaaaaggattggaagaaggagaaatcgcgggatcgagactatgaccgcaagagggacagaggtaaactgtcyagcacagttcctattgtccattagcattcgaataaatgtgtcagcctttttcttgttgcaggagtttttgcaacacccatttgttagggagtcctatttgcatgatgtccgcctgagtggttttgaccctgctgggattgggaatactagtttaagaaaagagctgttgcctgtaacatagctgctctccttgagtgtgtggtcttcgttttattatgaaaattgatgataaaggagataatgggtaaatatgtataagagaccagcatttctaatagtattggtgatagagaaaggacagtgctatggaacaaagctagacaaaaaaatccaatgctgtccttgctcagtattaagttttatagctgatagaattgtaactattaaaaaaaatgattcactgtaaactcgcactagtattttttgaattcttgctggaaaataactgttactgtgggtttgaaattttctaggcagtaactatttttcccccttgggagaatggggataggtgagtttcaggagtccacggatcacattygagcagtgcaggttgcacctgtgagtgagtgggcagcctgtcctttctctagggtgaagatgtgtataccttaggatgggatgcatgtttttaagcttcgtgtgactcttcatagatgagcgggatagaagtaggcacagcagcagatcagagcgagatggagggtcagagcgtagcagcagaagaaatgaacccgagagcccacgacatcgacctaaaggtagactcactgttttggtggcttgtgaggattcaagtgtataaaaggcagagtgagtgactygtcttcagtgagattgctgaggcattgagtcagaattcccgattctaccatgaacatcttgggatagttggttctgagtcaggtgggcacagctctgcacttggggtggatatggttcctgtaaggtgagaggctggtttgctgaatggccagttttccaaatggtaggaaagaatagggagctggaggtagaagaagtgtttattaaaaagaactacttatatccaagaagggtgtgtttgtagagataaagtaaatatcccttaaaatgttgtcataaacacagaatgcaaactggaccattggctaggtgcagtgsctcatacctgtaatcccagtactttgggaggctgaggcaggcagattacttgaggtcaggagttygagaccagcctggccaacatggtgaaaccccatccctactaaaaatacaaaaattagcctggggtggtggtgggtacctataatcccagctattcggtaggctgaggcaggagaatcacttgtacccgggaggcagaggttgcagtgagccaagatcacaccactgtactccagcctgggcgacagagcaagactttgtctcaaaaaaagaaaaaaaggaaaaatacatcctggaccattaaaaattgagatatctttaaaaactgtcaaaaccgatcttaaccgttatagatacatgcaaggtttagaaatagtaaaaggagtaaatttggggaattgacttttggcaactggttctagaccatgtcatggttaagtgagatgtttcctgtggatgtgtcttttgtggcccagatgcagccaccccttcaaggtctacctgggaggaagaggacagtggctatggctcctcaaggcgctcacagtgggaatcgccctccccgacgccttcctatcgggattctgagcggagccatcggctgtccactcgagatcgagacaggtgatgttctgggcagagcagyccagtttcgctgggtgggcggtaaggagcctcggcagggagagcagatggtggccaggaggacgtggcttagctcagtgacagttttgtgatgctggtgctgctgttcccaggtctgtgaggggcaagtactcggatgacacgcctctgccaactccctcctacaaatataacgagtgggccgatgacagaagacacttggggtccaccccgcgtctgtccaggggccgaggtgaggcctgtggggcagcaggcagaagagcaggcttgcttgccctagcgaggatgagcaggggctgcccttctggagctgcatggccctgcagatctgtctggggccgctggggacaggccagggcatggactgacctgcttcctgtgctcctccaggaagacgtgaggagggcgaagaaggaatttcatttgacacggaggaggagcggcagcagtgggaagatgaccagagggtaaagttttatacctctgaggggctgatcgrggctggtggccgtctgtagatgggtgaccctctagcaggactgggctttgatgagggtacacctgagccctgttcagacccaatgccctggagtctctttgcagaggcatagayggcacggtgaaccctgtcactcactgcagtaggctgacctaactgttctgttatgtgttggtgccaccatgtggtaaatctaagaagtgctatcgtgatgggctgccctccagtcctgtgtagttgcccactgtggttctcyagatggcatgtgtctgcagggaggcytctcctgcacccctcacaagggtagctccactgcagtagtgacttcctaccaagcgtcccttcttctgttggccatgtctcgtgcataaacttgatctgtccctcactcccttgctttgcctcctgccctgcagcaagccgatcgggattggtacatgatggacgagggctatgacgagttccacaacccgctggcctactcctccgaggactacgtgaggaggcgggagcagcacctgcataaacagaagcagaagcgcatttcagctcagcggagacagatcaatgaggtgaggctgcctgcagaagttggagcagattcagagctggaggtagagcacgtggggaagcagcaggttatccccaagtgagggcagcacagcttgtcccctgattgccgagaagcccagatcctctggaggtggaagaggagtgggtgatgagccttttagtagcttaaggaaagccccggctcgtacttctctcttttgcagtacttccttgaggggaagtactgttgatgggaacaggtgcattgggacctgcctctgtggtctgtgttctttgtgtctctgatgtgggctagggacacttaccatttgtgtgtccctctagaggttctgatttagatgaaaggtgctgctgcttggaacaaactcctgcaggtgatttgggatcagcacctcttctgtctttggagctgtgggtagaggcctgtgayatctttgcagctaccagtggccttctgtcaggacttgatgtgtggacttacctcataacctttcaggacgacctttggggtggcaatttgagtgtggctcccattgtgtcctcacaggataacgagcgctgggagacaaaccgcatgctcaccagtggggtggtccatcggctggaggtggatgaggactttgaagaggacaacgcggccaaggtgcatctgatggtgcacaatctggtgcctccctttctggatgggcgcattgtcttcaccaagcaggtgaggctcctctgtggccagggacaagacagctcagagagacctgatgtgggccaggtgcagtggctcatgcctgtcatcccggcactttgggaggctgaggaggktggatcattggataccaggagttcaaggcctgcctgggcaatatagtgaaaccctgtctcaaaagtacaaaaattagccgggtgtggtggcaggcacctgtagtttcagctactcgggaggctgaggcaggagagttgcttgaacctgggaggcagaacctgcagtgagcagagatcacaccactgcactccagtctgggcgacagagcaagactctgtctcacacamaaaaaaggcctgatgtggagacagaaagaagagaagggagaaaatagccctgtaccatgagagggtagcagtccctttcacaagtagggatcttatgaacrtggccttcttgctgattttaacgggcatcgctctttctccccactgctgcagccrgagccggtgattccagtgaaggatgcyacttctgacctggccatcattgctcggaaaggcagccagacagtgcggaagcacagggagcagaaggagcgcaagaaggttggtttcttggtttygtggctgggaagtttatgtgtatttttttcttttttcttctcttcataagtcttactaggcccacagatagaagttaggagtcccctctatcaagtccttaggcccgacagctgcggggcctggtgttgggagagctggaggcttgaggattggaatgtggctcggtgccaccagcactctgggggagtttaccacctgcggggtgaagyctgctctcccgtgggattgattttccattgctygcagtcatgtggcaggatggagcagactgacctttttccttttcaggctcagcacaaacactgggaactggcggggaccaaactgggagatataatgggcgtcaagaaggaggaagagccagataaagctgtgayggaggatgggaaggtggactacaggtgggcagcctcagccagcagcacatcagccttgctccaaagatgggggcccatgtgggcagttgcggcagaacccatcgactttgtggctcctgagtgggagactcttaggatacctctctgcatcttccattctctctggtcccttcctcctggtctcttcactgtcctccacttttcctatatgtgattcctsctccctcacactgcttcctctggtgctggtgttgtgagaggaaggaggcccagggaggttaagtaacttgtctgaggtcacccagcttgtcagtgagggagttaggatcagacccaggccgtctcacatcagagccactctgctgaagtacctcccaggtgttcagcatgggcagctgggttttagtcccttagatttgagttcactataagaactatttttaaaagaggttccaaaatagaaagggttatcttattggccagtgacttctctgctcatagaggcatctaagcagatgctgagttgggattcctgcattgggcaggtggctggacttatctgtcccttaagatcctcatccttcgaatgcccttatgttctactgaacggtcatctgagttaataattctctccactcctgtgtgaaatgtccatacgagaagttggtactattgatcagcccttattcwtctctagttaacttaattcctcaggtattagttattgggtgaccaggagggactgggtgaaattagaaataggaagctcagcagagcatggggcggcacatcagacaggaagtctctggggagggggttggggaggggtgtgtggactgtgtggagcactgaactggtgtctttttgccrggcagccttgagaaagtgacagtgctctgcatctcgggtgtgtacatgtgtcagacattgagagctttcagtagaggttgcaggttactgtttagtggggctgttttcacagttctttgaaaacaaaaccgtacagactatgctttcctgctgtcctgccaagaggagggaggaagtttgacccatgtcccgtgctctgcacccttacctcctcacaaggcctgtgtggctattttagccctttagacgttgtgctgaaattgcccgagggtattttctacaagttagtgacctggggattgatttccactcctcttctgctcactctgttttggttagagggtttgctaatatggtgatctgtaaatcctccgatccatgttcagctagctctgttggaccctgtggtgtygagtgtgttgtggatgatggattctcaagtagcagtttcagtcctgaggtcgatgagaaccatctcagattccctggctgctttggtgtctcagactcttgccgaagtcctcattcctgagcgtaggaaggagggcagcaacccaatcaggaaggacagcatggggcaccatgcagggtgtttaggctgctgtgtgttcctaggacagagcagaagtttgcagatcacatgaagagaaagagcgaagccagcagtgaatttgcaaagaagaagtccatcctggagcagaggcagtacctgcccatctttgcagtgcagcaggagctgctcactattatcaggtaacttcacccggggcccaggaatctagtgtcaagtcaggggtgcccttggtctcccatgtttacccaggagctctttttcttttgtgcatkgcacccagtggagaagggaaatamttttttcctctgacctcatgcctggggtacactgcacaaagtaacgggatggcaccattttgttttagctcacctgtttaaacctcaccgtattccagatgtttcaggtgttatctcagtaagaggctgttgtcccagtgaaattctcccttctaaaccggcatgctccctggatagctagtcatggggataggaggtagcggagtcttcttggaggctgggtgttggccttccacttcggctgataagccctttgcctgcttgtccttgtagagacaacagcatcgtgatcgtggttggggagacggggagtggtaagaccactcagctgacrcagtacctgcatgaagatggttacacggactatgggatgattgggtgtacccagccccggcgtgtagctgccatgtcagtggccaagagagtcagtgaagagatggggggaaaccttggcgaggaggtgagtgggcgtgggggctgagccatgtagttattccctagtagcttccacccatttttgctaaagggtgtgatctgctaagactcggaccccagtacggggtgtgctggtggtgagccgktggccagggcatctgagccatctctctgacctccaggtgggctatgccatccgctttgaagactgcacttcagagaacaccttgatcaaatacatgactgacgggatcctgctccgagagtccctccgggaagccgacctggatcactacagtgccatcatcatggacgaggcccacgagcgctccctcaacactgacgtgctctttgggctgctccgggaggtgagggctgtgtggtttggtctctctgcgcatggggtgttgaccagtgcaccaccagtagctagtgggttgctccaggtgtgctgagggggtctctggtaggccagaggttcctgaggcctctggttgcagttcagactcgggttgtagttcatgctgttcttgctctgctgagggtggcttggggttttctgggcagtggctccattgcttcagtcttcatgattggtaagaattgaataggcccatttgtcagctttggcttgtgtttcctcgggggtggtgctgatgggactgggggacaggagccaagggtccccaccatgggggcctccgagccgcctcttctctcaggtagtggctcggcgctcagacctgaagctcatcgtcacatcagccacgatggatgcggagaagtttgctgccttttttgggaatgtccccatcttccacatccctggccgtaccttccctgttgacatcctcttcagcaaggtattgaggccaccatgttacgaactgacccttccatgccacgcacttctctgatgcgaagccggctggagggtggagggtgggtaggggactgggttggagaagatttcctggggaccatggggcaaatggggcagcctgcagctctgggactcggggacaaaggactctgctctgggtgaggttttgtttcattatttctttgaggctgaagtacagggcccagggaggcactgtgccctcttgtagaggcctcgcagtcaggcccatgtggaggtgtggtggccctcaaagtccatggctccattccagagcagtgcctgggccactgggctcccaggagatgcccggcctgcgcttctagtwcctccctctgactgtgtccccactgctgttgcagaccccacaggaggattacgtggaggctgcagtgaagcagtccttgcaggtgcacctgtcgggggcccctggagacatccttatcttcatgcctggccaagaggacattgaggtgcgtgccttggtcacgactgtgatgagcgggtgtgtcttgcatatgagaggttagggttccagtgtctcacagctcctccctgggctctcaggtgacctcagaccagattgtggagcatctggaggaactggagaacgcgcctgcmctggctgtgctgcccatctactctcagctgccttctgacctccaggccaaaatcttccagaaggtgtgtcagcaggaatgtccaggagtggctcttggagttctctaaaggaagcgagaggggatgtgactgtcctggcagggggtgggctaggaggtaggcttttccccctcgcggagcctttcctgtctcgagggactcatttttccctycctgtatgtcctgctctaggctccagatggcgttcggaagtgcatcgttgccaccaatattgccgagacgtctctcactgttgacggcatcatgtttgttatcgattctggttattgcaaattaaaggtaagagaagacaygggaggcaaggcctgggtgttcaccagaagctaacttagctgcggggtgggaagccagggcctcgctcctggccctgggatgtggggagcgcgtggaagtggtggtggtggtgggaggctcacattgactcactgtgcttggtttgtttaacccttgtaatactcgatgaggtagataatttaacagtagagctcagagagctggtgtttgtggggaagacttcttcaggtgttcatgagaacatttctagagcctcctggctcttcctctgccatgtgtagcaaccagggcttgcctttgtctcaggcctacttccactttcccctcactctgtccttcgtcagctctttgccgtcccctcctaggtcttcaaccccaggattggcatggatgctctgcagatctatcccattagccaggccaatgccaaccagcggtcagggcgagccggcaggacgggcccaggtcagtgtttcaggtaggagccctgtgctagcctgctttctggggcagcgctggggttgctgagcgtggagcccgggcgggggcgggcaggatgctggctctagagctggtccccaaggctggaagctgctggcagggctgccacttgttagtcctttcatcctatgctactgagtggaaggaaggagtggctttccagggatttcagaggtctgaggccaacctacgtggatgtaggtacacatgcaggtaattacagcctgcctcccttcagagggtaggtctggacagatgatgccattggttctttttatttctattgttctctttccccrttttctttctttcttttttccaattagagacagggtcttgctctgtcaccccaggctggagtgtggtggtgcaatcacagctcactgcagccttgatctcctgcactcaagtgaacctcccacctcagactcccaaggggctgagattgcaggcaggcaccaccacacctggctaatttgttcatattttgtagagatggggtcttgctatgttrcccaggctggtattgtgaactcctggcttcaagcgattcttctgtcttggcctcccaaactgttggcattataggtgtgagccactctgcctggctctcttccccttttttgttccaattaaaaaaatyaatgtattcactatagagcgttagtgaatatagaaaaatatcaagaaaataaaacccagccatgattctagtcccaggcccattggttctagaaatgaaacagatggctgggtgtggtggctcatgcctgtaatcctggcactttgggaggccgaggcgggccgatcacaaggtcaggagtttgagaccaccatggccaatatggtgaaaccccatctctactaaaaatacaaaaatcagctgggcgtggtggcggatgcctgtagtcccagctactcgggaggctgaggcaggagaatcgcttaaatccgggaggcagaggttgggcaacagagtgagactctgtctaaaaaaaaaagaaatgaaacatgtaagaggctccagaagaagggctaaattggcagattggagttttgaataggtggaagtcagtgattcactgaagtagtgggtggggagaagaaatgagaatttcctccctccctgtgggatttcatctgtactggctgctgtggggtttccttgtggtgagaagatggggtcttctccccggcaggctctacacccagagcgcctacaagaatgagctcctgaccaccacagtgcccgagatccagaggactaacctggccaacgtggtgctgctgctcaagtccctcggggtgcaggacctgctgcagttccacttcatggacccgcccccggaggacaacatgctcaactctatgtatcagctctggatcctcggggccctggacaacacaggtgaggcggccccgggagcctcatgggtgctggcgcttgacttccttctttcctctactgtcccgtcaaatatccgggtttgctcatctctcctaggtggtctgacctctaccgggcggctgatggtggagttcccgctggaccctgccctgtccaagatgctcatcgtgtcctgtgacatgggctgcagctccgagatcctgctcatcgtttccatgctctcggtcccagccrtcttctacaggcccaaggtggggcagcggctggctcccctctccccggagggctcgaggaagtrttggggaggggaatggcttctctctgtattactgaaatggaacagagggcagaatcagagtttctgaagaatgattttgctgttctcggttaagcaggttggggwaggggaaaggaagggctgggccagtggttctcagggaatgctttggaaatttgcaagagcattttttatcttctagtatggttgctcttgagccctcatgttttagagtagacctttttaaaaattattttaatttttctcaaattgtcagggcaacctattgacatgtttgaagttctatgtgtggktaggtggtagtgttagaacctctgggatgtgctyagtgggcctggacccccctgtacttagagtgaaggttckttttcccttcctagggtcgagaggaggagagtgatcaaatccgggagaagttcgctgttcctgagagcgatcatttgacctacctgaatgtttacctgcagtggaagaacaataattactccaccatctggtgtaacgatcatttcatccatgctaaggccatgcggaaggtagagtggtggatgagcaggatgttgggatgaggggagggtcgagaggaaaggagggctccctcctggtgcctccgtctcctgccctaggtccgggaggtgcgagctcaactcaaggacatcatggtgcagcagcggatgagcctggcctcgtgtggcactgactgggacatcgtcaggaagtgcatctgtgctgcctatttccaccaagcagccaagctcaaggtgaacccaggagcccagtgagcccctcccagcctgatacctgtataagggcaaagttcttcctttgtcctggtgtggttctgcagatmtgggcttccgccaaaggctgtgtcaagagtgttaagggatggggtcgctgcccaaatgggtgttgttttcctgatgtggctgcctgttgtgtctcctccctagggaatcggggagtacgtgaacatccgcacagggatgccctgccacttgcaccccaccagctccctttttggaatgggctacaccccagattacatagtgtatcacgagttggtcatgaccaccaaggtgagtcttttccaaggcacttgcataatgcaggccccctgtctggccaggctttgaaacccttcactgcsttctggcatgagcttttagcctgggagccttgaggccacatgcattgttttgcggggcatgtgaggttggttttcatttggggacttggggaagctctgcacagggttgacctctagactgcattgacctcagctgcatgggcacgattgttccccacttgctgcttgggatgagcaacccctcttggtgtcattagaaggattttcggaggggttgggccttttcttttagatactgggggcattttctcaagtgtggaggagtttggatgggagtatctggggtttttcctttccttttttcagccttgcagggccagggattgggcccttcccatgtggctcctaattgtggaaccactctgggagggacattggccctcctgtgaccctcgcctccctgcccttctgcccgcaggagtatatgcagtgtgtgaccgctgtggacggggagtggctggcggagctgggccccatgttctatagcgtgaaacaggcgggcaagtcacggcaggtgargattctgtgctcttcgcaggggtgctgtttgcctgtggggtcggtgttccctccgcttggtattgaagacttgcggtcatccaacccacttacttctctctgcaaacataaaggctgtgatccagcaggctgggtctgtctgattccccaccacccactccagttgtttggtaggctgagcctttaaaaacaaaaccaaaaaactcattattgaaaagtccaaatattcatgaaagtgggaaaaacagtacaacaggccaccatgaattcgttgccttgcctctataattgtcaacgtttgttcaatttcactattcctaccccactccacacacatccattttttttttctggaatattttaaagcttatctcatacattattcatccataaatacttgagtatgtgtctctgactaaaaggacttaaaattttaaatataacctctgtgccgttatcactcataaaaaaatgaatacttaatgtcacctaagtctccagtccgcatttggatttctccatttatctcaaagataacttcttatgatcgatttgcttgaattaggatccaggcattgcaactgcttatgtgtgttaactgtttcattctagaacaggctccaccccacgctttttttcatgacattgatttattggagcagccaggtcatttgtcctgtcgaatagtccatatgatgtatttgcctcattgcttgctcacagcggtgtttaacctgtgcctgtgtttcgtgcacttgcygtaagctggcgatgagtccaaccgctcaattagatcccggctgagctgcgtgtggcagagatgcctgcatgtggcactgtgaacctcctcttagatgccttcaggaggcrtgtgaggtctggtggccccacctttgctgatgggaggatggatgaggggccccagtggtggcagcctgcctcttccctgataggtttccactgctcctccatcttgaggttttagcgtctgttgatggccattgcctagatccatatttagggttgcaaaatggtgctgggctttggcttaccccttttcgtagcataattctccccayaccaggctcccttgcatcttatgcctgtctcttccagccagcaggtaatcacatcttccctgtttttctgtacttcctagcatagttgtgaacttgatttttcaaaaaagaaggaaatgtaagtacttcctggactgagggatgactgagttaggactgattgtccagtgtcttgagtcagtgaaaaaagcaggcctcagctgcagaagagaaggcggctttggtactggggcaggcagccatgtggagcactggcctggtggatgcagcacctggtttgtggcagggacttgggtgccgacgaggcctccttccttagtggtccccagtaggctcagccaggtctgtccctcttcaataggagaaccgtcgtcgggccaaagaggaagcctctgccatggaggaggagatggcgctggccgaggagcagctgcgagcccggcggcaggagcaggagaagcgcagccccctgggcagtgtcaggtgagctccggccttcgggctctggctggggtggcacccatcccaggaggctgccagagaccaggccctgatgcagggtcaggatttatgggaaggtgcatgtgtgaaggcaaactggtgacagaagttgcttgtgcatttggtggtcacatggatgtgtgggaggagttcctgacagctttaaaggagcgacagtacacctgcagggattcagggcctgaggcagcctggagtagcaggatgggtttcacagctttactcatgagcgagggggttggaaaccccagtgcagtggtgagaagtgcgccttgggcttctgcgtctgtgctggtccctggagttaggccagacttgacaggtcgcaggcacaggcctccgtgagaacgccctcacttcagataccagctgcaggtgtagacaccatcctyactggtgtccccatggacccctgcaggttcagtatttgctagaatgactttcagaactccggagagtgccgtacttaccattatagctttattataccaaaaaggtacaaattagaaccagccaaaaggagagatgcatagagcaaggtctgggagggtctcaaatgcgaagcctcgtttgtcctcaggaccacgtccccccgtggcacactgatgcatgacagtatgacaggttattgctagccaggaagctcacctgaacttcagtgtccagagttcttatcattggggttctgttacttaggcatgaatgactgaatcattgtcatgtggtagagctcagcctccagtcccccctcctccccagaggtgaggctgatagcacgtggctcagagcaccagtgctaaccccggggcagagaggccagcctgccttgagtcatgttgttagataaactcaaggggttcaccaagagtcacctcattagcataatctctcaaacgagggctgaggggcccccatgaatagcagacactccagtcacttgggaaattccaagggtttagagttggctcctaggcactggggacaaaggcaggctgctacacagttggagtggcgcacgtgaggtggagggaagctgcttttgtagctcccctagggactgtgggaggagttgttaaaatccgatctaaagcatatcggaatgagtgagcttccttgattacatcgccagtcgaacatggggacggcagaggagtgagaatgtgccggggaggagatccctcggcccagagctccccaccatgggttaggaacagtaagtcctggggctctgcatcctcctgccctcctggctgtgggtgagggcacggtgtttcctgatctctcctgctgtgtctccaggtctacgaagatctacactccaggccggaaagagcaaggggagcccatgacccctcgccgcacgccagcccgctttggtctgtgagctgaggctgtccccagagaggatggcagcaggtattgggtcctsagccttctggcgggagccctgaggctgcggacaaagccctttcatctgaggactttcatctgtgcatatcacggccccccagggcagttcctgctggaccagactctctggcagaggaggtggagttcytccatgcaggagcacggcatggcgggagcggggctgcagagtatccgaggtgctgccggggcagcggraggtggctggacccatcgcatctaaaactggcccaggacacttggtgtatgcgtgacttggctgtggctgtcttttttaatccttgtgtaaagcagcaaaaaagacctaaagggaattgtaatttggttataattcaggatttggaaataaatttattatttgtaaaacatgactgcatgtctgactttttccttcaccctcttaaatcatgtaataaaggtggggggtgcagaagcctgccctgacttcctttgcatgggtcgtcctggaactctgcccttatttctgcacaaggcagaccaagctctgagggtgcccagctgctcctgaggctggggggcactggcaggtctgccttgatggccaggtcatgggagggaagtgcgcaggagtccaccccagccttccctggggtggtttggctgcttgaaagaggtccatgtgattgctctggatggcagagggtaagggttgtccattgactgaaaaacagtgtaaaatgttgcttattgattttcacgtaaaaggtgacccttacaccagaatcaccagtcttttctctttttaagcagtctcttaagtctgctgaggtggctttttgggtgtttggccctttccactaaccatggtgtatatgttgtgattcctccaggctgggcttctgccaggtgtgctggttggcaggttctgtgttggggttgagtcacagacaggattggggctcggaagcaccttgataccaggccagtgccggcgtgagccctgtggtgcgtggcctgctgtgctgttctgatccctttctccctctgttcctgggatttgcctttccatgttttataactcaataaatgttaaaatgtaagtcaattttgtgggtgagctcagaagcctagctttgccagccagcaccagctaccacctctgcctccattcttccctctagcccccttgggggaatgcaggtggaaatgggcttctcagggctctgtagtgaagagagggctgccagcactttgcctaggaagcattctaatcttggccctaggttggaggactagaagttggctgatgtgtgacctatttacagaatcaggcaatggagtaggaaaaagattgaggttctacttaacagttattattaataagctgtgaccttggtcacaaactcactaagtcccttagataaaaaaataaggtcagagaggctattaaaacaatgggtccaactcaaccatcgtatttacaagcaaggaacacctggtaaaggatacttggtacatgtgggtgctacaagaggaatggaggggtcccctgcccacagcagctccccctgaatttgccacggtactggagcttctgctcaaggctctgtctcttcctgtgtttccagtgtttttttaaattacagatcctttccattccgatcttccttaaagttccttcgagctttaatattctgattctcactgtcttttcttcagatggcaactgattgtttttctagaggtacaaaagcatacctatgacatggtctctagcaccatggccccgttgtggactcctgagtctggctgacccttgttattgtctgtatttttttagtgtaaccatcctaatggctggtatctcattgcagttttgatttgcatttccctagtatttagtggtgttgagcatcttttcatgtgcttattattggtcatttgtttatcttctttggagaaatgtctcaagtcctcttcccccccscttttttttttttgcattagtaactttttaaaaatttttaaatttcaacttttattttagatactgagggtacatgtgcaggttcattatatgggtatactgtgtgatgtggtaggtttggggtatggatcccatcaccgaggtagtaagcatagtacccaacaggtatgttttcaacccatttccctctctctattcctcccaaccaagtagtccacagtgtttattgttcctatatttatgtccctgtgtgctcaatgtttagctcccacttataagtgagaagaagtagtatttgattttctgttcctgcaagaattagcttaggattatggcctccagctgcatccatgttgttgcaagggacatgatttcattcttttctatagctgtgtagtaccccatggtgtgtatgtacatttcctttatccagtccaccattgctgggcacctaggttgattccatgtctttgctattgtgaatagtgcagcgatgaacatgcgagtgcatgtgtctttttggtagaatgatttattttcctttgggtatacgcccactcatgggattgctgggtcaaatggtaggtcgattttaagttctttgagaaaccttcaaacctttgttcacagtggctggactaatttacattctcaccagcagtatataagtgtcgccttttctcaccagccttgccggcatctgttattttttgactttttagtaataaccattctgactggtgtgagatagtatttcattgtggttttgatttgcatttctctggtgattagtgatcatgagcattttttcatatgtttgttggctgcttgtatgtcttcttttgagaagtgtctgttcatgtcctttgcccatttttttaatggggttatttgttttttgcttgatttgtttaagttccttatagattctagatattaggcctttgtcagctgtgtagtttgtgactgttttctcccactctgtaggttgtttattctgctgatagtttcttttgctgtgtagaagcgctttagtttattaggtccctcctagcaatttttgttttcgttgcaattgtttttgctgacttagccaaaaattcttggccaaagccgatgttgagaacgatttctttttttttttttttttgagacagagtcttgctctgttgccaggctggagtgcagtggtttgatcttggctcactgcaacctccgcctcctgggtttaagcgattctcctgcctcagcctcccaagtagctgggactacagatgtgtgtcaccacgcccagctaatttttgtatttttagtagagacggggtttcactatgttggccaggatggtctcgatctgttgactttgtgatccacttgccttggcctcccaaagtgctgggattacaggtgtgagccaccacacctggcctgataatgatttctttctttctttcttttttttttttttgagtagtactctcactctgttgccaggctggagtgcagtggtgcgatctcggctcaatgcaagctcygcttcccgggttcatgccattctcctgcctcagcctccctagtagctgggactacaggcgcccaccaccatgcccagctaattttttttcttttttttagtagagacggggtttcaccgtgttagccaggatggtcttgatctcctgtcctcgtgatccacccgcctcggcttcccaaagtgctgggattacaggcgataacaatttctatagtctgaggtctgacatttaaatctttaatccatctggagttaatttttatatatggtgaaagataggggtccagtttcattctttggcatatgctctgcccatttttgaactgggttgtttgttttcttgagttttaggagttctctatatattctggatattaacatcagagatatgatttggaaatattttctcctattctgtgggttgcctttttactctgttgatgttgcttttgatgcacaaaagtttaaaagtttcaggatgtctaatttgtctattatttcttttcgtgcctgtgcctttggtgaactaatcactgccaaatccagtgccatgaagggtttgttccatgttttcttctatgagttttatagtttcagtggctacatttaggtctttgatccattttgagttaatttttgtataaggtattaggtaagggcacagctttattcttttgcatgcaaatattcagttttcccagcaccatttgttggaaaactaaaacaaaaactatcctttccccatttcatagtcttggcatcgttgtcaaaattatttgaccatatatgtgagggtttatttctgggattctttctagtctattccattggtttgtatgtctgtcttttgatttatatggcagtaccacactattttgattactgtaggtttgtagtaagttttgaagtcagtaagttcttcagctttgttcttcttttttgagactgttttggctgttgggatcccttaagattccatgtgagttttaggttgagttttcctatttctgcaaaaaaaaaaaaaaaaaaaaattgggattttgacagagattacattgaatctgtagatcactttgtgtatactgacatcttaatattaagtctttcaatccatgaacatgggatgtgtttctgtttatgtcttctttaatttctctcagtaatgttttatagttttcattgtacaagtcttttactgccttggttaattcccaggtatttgtttatttttttgctattataaatgaaatgaaattatttttataatttccttttcagattattaattgttgttatataaacctgcaactcatttttgtgtgttgactttgtatcctgttactttgctgaattcactattagttctaccaggctcttttttggggtggggtggtctgtagagtctttagggttttttacatataagatctgtgaacagagataattttacttcttcctttccagtttgaatcccttttatttctttttcctaattgctctgcctagagctgccagtacgatgctgaatagaagtggcaaagcaggtgttcttgccttattcctgatcttagaggaaaagcttttagtctttcaccattgagtataatgtttgttctgggtttttcatatgtggttttattttgctgaggtagtttccttctaatcctcatttgttgaatgctttttaaaaaattcataaaagagtgttgtaaccatttctttttaatatcagctgttcgaactactttttaggagctcaattccttggttatttcttaacaaattataggcaggcaacactcagtttccctgcccttcctcctgtctttagagaaactgcacttctctaagtccatcccctgtactcagccaggtcttctgcctagctgggctgtcacagtcggatggctgggtaatatgtcgatgtttttctggctctgctaccaattagctctccataactgactacctgctttgctctggtgtaatcactccacaggaagtgaaagataactttggaaagatgtacaacattcaaagaaaccagagattgtcattttggccaacgtatatgaaatattttggtaaattatagagataaaatccctttttagtagactaggctggggattttaatggcattgaactttagtttgaataaagcaagccacaggctagatgagtactagatttttcaatctttgttttctctagaaaacaaacccatattctaaaccacatgggggaacgtagttcaaagagcttaaacagacaacaactatcataacagaaactaccagagatgcctgtcactcctagctcacactgcatttctggaactgcccttcccaagttctgtcaggggcatcctatgtaatatgttagtgttcctattagcagtgaattttcttggcctttattaggcccaggaagaatattgaagaatcattgctaaccagtgggtttcttccttcacttttactgcccccctcagaagtgtaagatctttcatttctttcccttatattaatattaccctagtagtgagttgtctccacttcctatagactagaaatataaattctagacatgtactcagtttaacaaaatcctaccagaataaaatattagctgtccttagagtttgtcataatggaatttcacttgtattgaggtggctggggaggaaaataaaattgttagaaggaggaatggaatgtggagcccggtggtgggcggtggggggcaggtggcgtgctcttgctcccccacttggaaaatacagcccttattgctcttcctttctttggggtctcaggattacttcctctttggagtttttagactttctctttttaagtttcagatagtaatggaaagaaaaaaa

SEQ ID NO: 95592 - DNA, 30914 bp, Homo sapiens
  misc_feature (1)...(30914): n = A,T,C or G
gaaggtttctgagcagagtagtccaccctttcaagagtttgtgacaatggaatcatctggatgtgggatgcttttgttttcaaagttcacagagcctcaacttctaaacatcttcatatacatacataaataaatgcatgatacatccacacatatgtttcaagctttttttccagattaaaaaatgatactttattataatttttaaaattgcagaacgtcaggctgaatatcattagacacatacacaaaaccactcatctctaaagtcatcttctataccctctcaaaatttggccaatgaattatgcctcagggaattttccagttcaaccccatacataaatggaaacactagccttttggttttgcccacagttccaaagtgctattacaggtggagtatctgctgcaggaggtcattcttgctgctgtgggtgtgagtaaaatgtctatctgtatgcctctggtcctgcaggctttgttctctttctccttgtttggtctccttctacaggggttaccttacatactgcaatcaaaagacatcttctgctcggaatcaaaacagatagtgagaggttcaagtgagaagtaatgttacatagtaagttactgaatttacaatgagaaattgaactctggggttacaactcaaatatgatttcaaggtaaagaaaataattacttggctggctggtgaaatgcttagttccttctaaaatcataattgcaatatggacttctgcttcatgctgcattccaaggcaccaatcaggtaacctacatctcccaaatgatcaacagagcgttccttcctattttaccctcagtgctgagaaattactcctgagcccagaagttgttgtgtaggtgacttgggtgacttggtgcccaggcaacaactgccacaggccccaccttgatgaacaccattgatttctttaaatatgatgatactaagatggaggcccctgctcagaggaagcaaggacgtaaaagccaggacaggctgcgctgagggtcactacactaacagacccagacgacacgatggaacgtgaatactgaagccaacaatcttctggaactctcttttccaaaactcatatgctgttttttctaattgggaaatcagggacagggaaacattcgcataattacccaccaacatgttcttcttaacagaaatgaagattattattattttttttttgagacagactgttgctttgtcgcccaggctcgagttcagtggcgcaatctcagctcactgcaagctccgcctcccgggttcacgccattctcctgcctcagcctcccgagtagctgggactacaggcgcctgccaccacgcccggctaattttttgtatttttagtagagacggggtttcaccgtgttagccaggatggtctcgatctcctgaactcgtgatccgccctcctcagcctcccaaagtgctgggattacagacatgagccatcgtgcccggctccactttggttttttctaatcggttcaggatctcatttactttcttctccattgtcacaatttttacatccttctgcctgtgaaagcctatctgcctcacatccacgtcagctgttttcttcaggttagaccgtggagtatttaccacattaacgttgttcttgcagccttgagtgctattggccttcacaaggtgggcgcagtctgtcagcacttcctttggaatgtcctctatattctctcccttatgcaattgaaggtatacatgagccaaagagagtctgtccgcacgaaaccagatatattcaggccagccatgcttcatcagatcttcatgatgatttatgggttagtaggagagatataaaactcaagggccgggcgcggtggctcatgcctgtaatcccagcactttgggaggctgaggtgggcggatcacgaggtcaggagattgagaccattctggccaaaatggtgaaaccctgtctctatttcatatttatcctttcccatgtaaatagcgcaggcagatgaattaacgctgctgctggtgaagtagaacaccatgatgctggcgggggtgcggtgactccaccgtggagcagcagcgttcaactgtggcggttgcctggtccccggaactctcctctttttttttttttaatgcattatggaaacttttttatgtgatttttgtacataaggaatatgagagtaactcttttacaaatgaaactaatttactagaacaaacagtgacaaaactgaactgatatttgatgtgaatccataggagtttaagcttcaaatccagccaagaaatttgttacaactccatcagctttgcatctgagtcttctgagatctttccatcagccctgatagtgcccaacagggcttagcgctggctgacaacatgagacaagaaagcattctcaaactttgtaatcttgctgggctccagtttatcaagatacccccttacacccgcacagataacagccacttgttgttcagtaaccatgggaggatactgtccttgcttcagcaactcagttagacgcacaccgcgactcaatagttgttgagtgggagcattgaggtcagaaccaaactgggcaaaagcagcaacctcacgatcctgagccaattccagcttcatggtacctgccgcctgcttcatagtcctggtttgggcagcagatccaacacaagacacagacagacccaatgttaatggcagagcggatatctttgtagaacaattctgtttccaagatctgtctgtcagtgatggaaatgacattcgttggaatgtaagcagacacatcatcggcctgtgtttctatgactagcaaagcagtcaaggagccaccaccaaaagcatcattcattttggctgctctctccagcaaccgggagtataggtaaaacacatcaccaggacaggccttacgaccagggggttcggtggagcaacagagacatctgacagtaagcgacagcctgtttggataagtcgtcatagatgaccaaagtatatttgccatcgtctctaaaatactctcccatggaacagtcagagtaaggagccaggtactgaagtagggcagcatctgaggccatagctgacaccacagtggtgtacttcacggcatctgcatctgtaagtctcttcaccaactgagcaacagtggatctctttcgaccaatagcaacatagatacagtacagcttcttcttttcttcagatctatcattgaaatgtttctggttaatgattgtgtcaatagcaattgaggttttcccagtccttcggtcaccaataatgagctcatgctgaccacgaccaattggcaccaagctatccacagccttaatgccagtcggcatgggttcccacactgaagttcgaggaatgattctgggggctttcagaccgactcacttatgggtcttggaacccattggaccctttccatcaatagcattaccaagggcatcaactacacgacccaacagctcctcaccgactggaacgtccacaatggttcctgtcctcttcactatacctccttccttactttattattttcaaacactacaatgccaacattgtcagtttcgaagttcaaggacatatcctttaagcctgaagaaaactctaccatttcttctgcttggaacattcctcagcccatgtacatggacaataccatcaccaatacttaagacatgcccagtttcttcaaggtcagcagaggtatcagctccaagaacatgctctttaagaatagaggacatctcagcagtcccagtcttctgaagatgagtgttagaggcatggaggttccttgcagcaatgaaagatgaacccaaagcatttctggagaccagtcctgcccaccgagtgaggtcacgggctacggccgcggagacacacacagacagcatctttgcagtttctccacaggtggtacctccacagccgcagcctctggactgactgggaccgtttcaagcatttttaaatgaaacctgatgttgatgaaatctctgaaagtcaagtcaggtatcttacacaatgctgtaatttcatttcaatccttttcataaagggtaaagtccttgtatatattctttcaatacatgctttatctaagacacaagcactctatcaataaaagttttaatttaaacgaccaaaaaattggtgagagagtgctcagaactgaggataaacatgtaagtagttttttgtcccagatgagcaatgatttatgttgactaaggtgtgctgaattaacttattccattaaagtgtaaagggaagacaggttgataagcataacttttaccttgataaatgttttcaatgatttctattgcatgtagactgaaacacctagcatgtaaattattgcagtagaatctgtctctaagtctcagctgggtctgtgaatttgttctaatttgatagcttcatacaactgatgaagctcaaaaatggcttgactcaagatatttcatacacctttcttttgctctaatttctgctacgacaataacccagctatttcagctgatggcgggaacactgcaactggacaaaaatgacacggatgggtgtagagcctccaaacaataagtatctgattaatgctgttgacacctaagtctacagaggctattctccaacggccaggacatcattaggtaagacatttcaaaattcttcgtgagggcacgattgcttcagaggactacaaagtgacacattaggtcgtcataaatcaccgcagtaccatcctggctaacacggtgaaaccccgtctctaaaatacaaaacaatgagccgggcatggttgcgggcgcctgtagtcccagctactcgggaggctgacgcaggagaatggcgtgaacccgggaggcggagcttgtagtgagccgagatcgcgccactgcactgcagcctgggcaacagagcaagactctgtcaaaaaaaaaaaaaaaaaaaaaaaaaaatcaccgcagtaaaccacactccaacgggcctgcacactcagggtcttgattagaaacagtatttaaaaaaatacctccacatctgttgcaccacaatgccaaggtataaccagggccactttctccaggaggcacaacaggcgcagggccagggaagggcctctgacacttttaggatctcaagaaattttttttttttggttatttttctttgtttgtttttgagacagagtcttgctttgtcgcccaggctggagtgcagtggtgctatctcggctcactgcaacctccaccttctgggttcaagcgattctcctgcctcagcctcccgagtacctgggattacaggcgcctgccactacgcccggctaatttttgtattttattttattttttagtagacacggggttttgggtgttgaccaggtctcgaactcctgacctcaagtgatctgcctgcctcagcctcccaaagtgctgggactacaggcgtgagccaccatgcccggcctcaagaaaatgttttaatttccttaaaaaaccttaagaaaaatcaacttttaagttgaaaaagtttatatattaacatattcatctttatatcaacacagcagtaaaatttattttttaaagtgataaaaactgtacaaatatttctggtgtgaaacacagtgttttgatgctcgcggactcttggattcgaggctgcggtagtacggacaaacaccgtgcagcggcatctcatctccgccaacagccggcgaycaagtgggcaggccgggagagggcgggcggaagaggcgtggccgccgctactgcgcacgtgcacccaaccagaacctgggggtggtgccgggccttccccgctgcgcggaggcgtcctctcaacccttctgcccggcgactggtgggttggcggctaaggggcggagacaagaggggccgccaccatctcctccaatggaagggagrcaggggcgggcttaatgacggaaggagcatggcgtggagacacctgmaagtgagtcccgcgagtgagcagtgtggatgggggaccagggaccggggagggcgagaacggagagtcaggccgggcgaggcatggaccgaaggcggctccgggagtgtgggcccccctgggacgtgtgcgtgtttccggggkctcctgcaaatgctcgtgcgtgtgcatttgcacgtggactcggtcaggcgtgtgcagacagcgcctgcaggtctgggtgggtgctgatctgagtgtctgcgcctgggccatgtttttgagcctggcacaggggtgcttagtgaacacatgaccgcctagcgttgtgtgccggatccaacggggaatgaaactagagtaggacatgctcccaacycttttaggtaaagttttgttaggggcgggggtctctgtgaaaagttcttagctgtatccccgtatgtaataggtgttcagaggccgggcgcggtggctcacgcctgtaatcccagcactttgggaggccgaggcgggtggatcatgaggtcaggagatcgagaccatcctggctaacaaggtgaaaccccgtctctactaaaaatacaaaaaattagccgggcgcggtggcgggcgcctgtagtcccagctactcgggaggctgaggcaggagaatggcgtgaacccgggaagcggagcttgcagtgagccgagattgcgccactgcagtccgcagtccggcctgggcgacagagcgagactccgtctcaaaaaaaaaaaaaaaaaaaaaaaaaataggtgttcagatatttgttgattgacatggtgggggggagtacagtctccaagggaggcaatgaataaccttgactttctttttatatgtttatttgagacggagtcttgcgctgtcgcccaggctggagtgcagtggcgcgatcttggctcactgcaacctccgcctcccgggttcaaccgattttcctgcctcggcctcctgcgtagctgagattacaggcgcgcgccaccacgactggctaattttggtatttttagtagagactgcagtttcaccatgttggtcaggctggtctcgaactcctcacctcgtgagcctcccaaagtgctgggattactggcgtgagccaccgcgctcggcctgagtctctttttaaaataaataaatggagagagatgggatctcactgtgttgcccaggctggtctagaactattggcctcaagggatcttcccgcctcagcctcccaaagtggtgggattacaggcgtgggctaccgcgcccagccaatgaatacttgatctacatgtctttagcagtttggaaggatccttaaaagcaaatctratcatgtcatttcctggcttagggaacaaaacccaaatctttattttggccaagactcctgctcctttctcctgcctcgtcttaagccttactttccctcactcctctgttccaaactttctccctttttcattctcttctgctactgagagagcctttacactttttcctctccgtactgccttctggttaactatttttttaaataattgaaccagaataggttcagagagacccccatcaactcgtttatcccttgagtatcagctttaagtcatttccttaaggaagcctttccttacctctaagattaggttgaatacttccattaccttatactttttatccttcatcacagttgctatgactacatatttgcatgatcattaatttctgtctgtcgcttcataagatcacactctccatgagggtaggggcaagatctgttttgtcatctttgctcaatcagtatttgatgaatgactgaactaatgaatgaataactcagcatgtggcagtgatagagaaaagcattgtgaaccacttttgatccaataagatctgaagcttctgttttatattttacacccccgttaccttgaaatggaatatatgtataatgtctttgtatgtatacatttttgagagagtctgactctgtcgcccaggtggagtgcagtggtgtcatcccggctcactgcagcctggacctcctgggctcaagggatccacccacttctgcctcccaagtagctgagaccgcaggcgcaccaccatgcctggctaattttttatattttgtagagacggggtctcactatgttccccaggctggtctcaagckcctgagctcaagcagtcctcccacttcagcctcccaaagtgccgggattacaagcatgagccaccaagtccagctatgtgcaatttttaaaagccagcataattaataccctaactggaatataaaggagaaaatgtaaaagtagtttatattaataataaaattacatgtatttcagtatgtaaatattgctatgactcccctagtgagatagttgtgtttaagtctctacttagaaatgcaggtacacaggtgtgttacatatcaggcaccccaggaaagcactgtaccattcccgatgagattttctgaaatggtgaacaattcttgggaatgytctatgtgaaactgtacagttgtccctcaatttacaagatatttgtactgtatgtgaaaaccatgtagaggctgggcacggtggctcatgcctgtaatcccagcactttgggaggccaaagcaggagtactgcttgagcctaagggttcaagaccagcctgggcaacataaagaggctctatctcttcaaaaaattggctgggcttggtggcatgtgcctgtggtcccagttacttggggaggctgaggaggggaggattgcttgagaccaggaggtcaggaaagacagtttgtgtttatgtggtaaaatatagtttggcttagataatatgaacggataatttttacccacacaaatgtcagaatgttcaaaagtcacacaggaaatggggcagttcatgtcagatagtctcaagccaagaaggatgtctgactttatggattcctgcccaccacatctattagcattaccctgtcactgtaaccagtagcagtgtccaccacgatcaccctaggggacagtactgtccctctttaaatttctggcctggagtcccaggacagcctttagggcctgaagaaggtgtgtaggcagaagtatagatacagcctctgactgtagagaccagtgtcagcggaaggctaagggcgtctgtttcatgtgacctgccgttatgccctctgtgtacctsggtgtgaagggctcaggaagggtgctgcagcctggcctgggggacccccctaatatgctcttttttgcagaagcgggcccaggatgctgtgatcatcctggggggaggaggacttctcttygcctcctacctgatggccacgggagatgagcgtttctatgctgaacacctgatgccgactctgcaggggctgctggacccggagtcagcccacagactggctgttcgcttcacctccctggggctccttccacgggccagatttcaagactctgacatgctggtagtgctcccagacaccctatacattaaatacaaaggcraaggctgcaktcccctaaacttctcagctgggactgatctttttgaaaaccagaaccccaagtgagsagtggggatttggaattcagtctgagcattattattttatgtcatgtaattagcaacgatgattatctattacgtatatgggattgtgttaggcggtgttcttgtttgatcctcccagctgctccatgagctggatcctgttaccatccccagccatggatcaggaaactgaggaacagattagcaacataaaggaactcaagtcacacagctaggaggtagcaggaccaggattcaaacccacagagtctgacgctggcttcccgccccttggccactgtcctgccttgctgaggtcgtgggtagctcagtcttcccctcagctaaatggggaagctgccagagtcattaagcactggtgagaggcaggagcatcgtgtcccagcctcactcagccacgtgttcagcacacgggccctctccatatgcttgaaatctttggcctagagtcccaggaaagcctctagggcaggaagagggtgtgtaggcagaagtgtagatacagcctctgactgcagaggccagtgtcagcggaaggctaagggcctctgtttcatgtgaccttccgggcttagtgcagcaaaccgaataaaagagtccccatcctcatggaagctgcttcctcatggaagccttggcagtttcctttcgagaggcttcttaccaaatgggaggacatcagaatgatgagtgtgaaaatgcaaacaagaagccctcagaactctggtgggaagggtcactgttataaattaaaggggccttcaccgcattttctcttcctaccttagactcctcttcactatctgattatatggtgttgagcagacgtgtcatttcccctgactggccatgctcacacactaacaggcactgtaggctcagaaagagcactccgttaagghgtcctcacctcagactgctagtttgagagccctggaaccagtgtaaaatgggagtgaataatgagtggggtgcagagatggggtgaatttagaaggaagtgcggggtgcctgaggrtgcaagctgtgtctgtataaacacagatgacagagacaggcaaacctgacctctgaggtgttgtcctcaacacctctgcgtgggcccacacttgcagcagctcatttagaatgtgactcagactttttaaccggtaaccaggattcttgatttcacaactttcctggtttggctctccacccttcacctatgtcaggcatgttagaatcccccgggggtgcacttggaatattcagatgccctggcctggtgccagaccagtttcaccgccacatctgagagcaggacctgaaagctgccaggggcctttgtggtgcagctggagctgagaaccacggtcctggaggaaggcccctacacatcttgcctaccagtctcctgaggtgctgtgagcattctcaccttcatttgttgctcttccttcttggagcatctctcttaatcccctgcttccaggatccgacggtgttcaccccgggaggcctttgctagtctcctgaaaggtcgctggagcccatcagtcagttctgcccagctgaacatcttccttcctctggttccccgtgggaggctgggggacgtggctggggcttcttgccagcccggatgaggagggacacagctggagctgatgtttattaagctgattaaagggttttgctgcttgacacgccttggtttcagggaagcactatctagggcctgacaccagcgagctactccctcccaccaaggctagttgataagaaggtatgaaccttaaccacaattggaaaagacagtgctcgtctcckcttcaacccacggtggaaacaccatttctccccccaggcttgctaataataaagccccgtggttttcaaactctagctggtgtcacagtcccctggagagccagcactgttaaaaatagttcccccagtgctccattccacccccaaagattttgaccttgggggtgggccctgggatctgaggtttcacaagcttcccaggtcattctgatgtagctgtgccaggaaccatgctttgagaaataccgggayagccttagcgtgcctctgactttgtcttcctcttcccaggaagtgagagttctgggccataaattccgaaatccagtaggaattgctgcaggatttgacaagcatggggaagccgtggacggactttataagatgggctttggttttgttgagataggaagtgtgactccaaaacctcaggaaggaaaccctagacccagagtcttccgcctccctgaggaccaagctgtcattaacaggtaggtgagcggcccagagttaacrggggatgccctctttccagctgggggcgttcagagrtataagatctgcctctgttttttttctctcatacaatgtggacattcttctgtcatttggaatgttcaggaaccctgttcagcatctactatgtgccccaggcatctatcttgaaaagcatgctttgttacgtccatttaacagttgggtagatggaggctcatagagctaaataactccgcttcggtcacggagataataagcaggagagcttgggcatggcctgggcttattggacttgagagtttgtgctctgtccatgttgtttctccaatgctcttactcgacactgtccaggagaaatgtaatgtgagccccatatgtaatttaaagtactctagtgaccacattaacacagtaaacagaaatgagtgaagttaatacttacttaaaattataatttatatttaatgttacaagtatttaaaaaaacgtatatttaaaacaccataaaaagtattaattcgctgtttttaccttcttttgcctgtaccaagtcttcaagagccagtgtgcattttacttccagcacctctccctttggaccagctgcattcccagcagccagtagccacatgcggccagcaggcttgtattggctagcacagccccagcctttagcaaacagggaaatgtaatattcaacatgcacagctgctcttagtaagagaaatccttctagactgtataaagcccttccctttgtcatccctgggcaatttttactacagcaaacccaaaaggtgaagaagtgcttactttttggtaagaggattttgaagagcctccttggggagatttcgatgggcatctttggggccactggtggcctcctgggagacggacctgtaggacatttacttggccgtgcttcctgctttcttgtgcttgtttcagggaaattctccagcattagagatcaagttattgatctttctgctgcattgcaggtggggatcaatatcttcagaattggccaggcaaaatayatttgcttaacattcagctgctacagataactgcaggtgctgggatgatggtacttggtgaatcctataggtgagcaggggtgtgagatcctgctctgagccctgtgtgtgcggcctcctggttgtgtggcatgtggtaagtgtgtagtaaacacttaatgaatgggtgaagttatgaagtcatcagatatgtgtgccagtgtgtctgttattatggatgcttttggctctaacaaagtggcttaaacaacaggcacatttgatattattttcttctcataacaggtgcaatgggcaggtccagggttggttgagcaccagggcagtgttgagactctggtccaacttctctgggcgttttctttttgcttgtcagagagcgacctcggctgcaagtattatgttcttacacggacgcccaagagcagaaaggaaaaagggcagggatgttctcagaggctcccagtaggtctcacttgtgtctcagtgtctacacttggcatacacttacgcttcccttgccagcaaggctgggaaaggagtcattagcatttttaccctgtatcagggcaggtgggtttcactggcaaagaggaagaggaaggggactggccactaggtcaaaacccacagtggggctggggatacagggatgaaagagagatgaggctcctgccttcagggagtgtctagtgacagtgacagagggatgagagaagtatgagatgttgctcaccctcaagaagattgtaacctagggaccttaagcatatatgtatgtatctatcccaagccaggagaaaggtggggccaaagctctgtatgaaggccagggggatgagggatcctttgcagctgygagctctgtgcaggaggagagggagcgtttgctctgagctaggaagagaggtgattttcagacagaaagcctagagagatggagtggctgcaggggcttcaggaggctgtttgggagcccaggcagaaggtggcaagtgagtgtgcaattctcagagagtggctgggtaaggagtggggatccagcaggtctggggcagctgctgctgagtctgggctgtttccagtgctagctggctgagcatttgcaaattttaatctttccctgggtattggatggtgttctggcaagttctctaggagtcccagtggtgtttagaccctggaagtgtaagaactgactgtgatttttttttttctcttgtttgaaaaagtcctaagtgtatgggaagtggctatggtgccctctcactctgcccctcccntgtgcttgtgctctgcaggtatggatttaacagtcacgggmtttcagtggtggaacacaggttacgggccagacagcagaagcaggccaagctcacagaaggtaaagtggggttgtgtcagtgggcctttcttatttattaggaggraacgtgggagaaatgctgggaacatttctagtgaaataaacatgattgagcaatagcaaaaaccactgaggacctcaggacacctctcctagagcgattttcctggtcccacacagcttccaagagtttaactggattttgcaatttagcaaatactcactttgcctctgccttgttatgtaacctgttaccgtaactagggaggcctgaaagcaagcgaagcaaagcggctgggcaatgatcacacaggcaatgagggcaggagcaggacttgaatgtcatcctcccgtggcccactctgtcctcccttttttgtcrtccattgtgtaaataatgttcattaattatagaagacttagtaaatacagagaagcgtaaagaaagaatgttcaagaaacagatactcctccctactcaaggctaactaatattagcatttgggaaaatattcttcatgagttgttttggaaactcatttttggttcgggacagttcacacctgtaatctcaatactttgggtgcccaagttgggaggatcacttgaactcaggagtttaagaccagcctgggcaacatggtgagatcccatttctctaaaaaaaccaaaaacaacatgcttttttttttttttttttttttttttttttgagacggagtctcgctctgtcgccccaggctagagtgcagtggcgggatctcggctcactgcaagctctgcttcccgcgttctcastattctcctgcctcagcctcccgagtagctgggacttcaggcacccgccgccacacccagctaatttctttttgtatttttagtagagacggggtttcactgtgttagccaggatggtctcgatttcctgacctggtgatccgcctgcctcggcctcccaaagtgctgggattacaggcgtgagccaccgcgcctggccacaacatgcatttttgaagacgcctccggcgatgcggtgttctctgtggcctctgcctcacttgctctcaggatgcacttagtggtcgcagccctctgttgtcctgaccctaatgcccctgggaccctctgggattgtgtggggttgtggctcagtagcgaccattttcttctttgggtccctctgaaactccttccaggatgtcttagtctcagatagtcctggtagcaggatgaagaaaccaatggatatgggattcatttcaggaagtgaggtggaaagggctgaggcactcagcagtgtcagatttggggaataggaaattatcttttggaaacccctgggttgggtggaaccagaccccgctgtactgcrgagccgcccacctggggagctttggaggtcatcacaggacttgcatggtttgtgatgcttgcccgccttcgtgcttgctttttcttctcctcggtgtctgcagtgcagtgtcctggctttatctcctgttcttcctcacccagccctccctccctgtggccctcctggtctacggagtgaagcggagcctgcagcagtgctctgcacggatgtgtctgccagcagcttaggggccttcatggcagcttgttgttagcaccatgccaaggaacacgcgttgacaaaagctttggtgccctctggggacagagtaatccagcaatttctgtctaactcccaaatcttgtcagtttgggcagatgactcctaatccgttagctacatgaaagtgatattctccttcaagtcagtttacttgtgaggaaaagaattcaagcttacagatgatcttggcttgatgggtgctagactgggaagcttggagaccttatgataaaccttttgtctaattggattctttgtttcttttgagacagagtctcgcgctattgcccaggcaacagtggtgcaatctcagctcacagtagcctccacctcccaggttcaagcgattctcctttctcagcctcccaagtagctgagattataggcgcccaccaccatgcctgactaatttttatatttttagtagagacagggtttcaccgtgttggccaggctggtcttgaactcctgacctcaattgatccacccacctcagcctcccaaagtgctgggattacaggcgtgagccgctgcgcccggcttctaattgggttctgatcccctcctccagtccccaccctggaaagtagctacactcatctcatttgctgatgatgcgagagtgtgattggggttgggaaggtggtgagcagtacaatagatgttgtttgatcctctctggcctgacaacacattttgtgagctacttggtgttctaattcttcccccaactctcagatcaaaagtacagcctgtaccattgatgtaccactccccgtgcagataagatagtaaacttagaagaagtcaagtagagacaacccgtttcttttacacatagtgtgtttctgaaaatgtattttttctggaggtccaaaatgcaagtccattgatagtcctgtggatttttaagtaagctgacctaattgcttacatgtaaactgagaccctcttgagagtaaaaaggggcaggtgttaacaatgatgcccaggctaggggagtaatcaggttgtccagggagcacctaagatacagggtaccctcagttattatatgagggagagtccctttcctcagagaactaaaattataagttagaaaacaattacacctctacattttaggcatgataattgaaaacatttggccgggcatggtggctcacgcctgtaatcctaacactctggaaggccaaggcaagcggatcatttgaggtcaggggtttgagaccagcctggccaacatggtgaaaccccttctctactaaaaatacaaaaattaggccggttgcagtggctcacgcctgtaatcccagcactttgggaggctgaggtgggcagatcatgaggtctggagatggagaccatcctggccaacatggtgaaaccccatctctactaaaaatacaaaaattagctgggcgtggtggcacatgcgtgtaatcccagctactcaggaggctgagacaggagaattgcttgaattcaggggacggaggttgcagtgagccaagattgtgccaccacattccagcctgggcaacagtgagactccatctcaaaaaaaaaaacaaaaaacattttccagtatatatatatgtgtatatgtatatgtgtatatatatatatatatatatatatgtgtatatatatatatattttttttttttttcttttttttgagacagagtcttgctctgctccttaggctggagtgcagtggcgcgatcacggttcattggagcctcaatcctacttcagcctcccgagcagctaggactacaggtgtgcaccactgctcccggctgagttttcaattatagagatagggtttcaccatgttgcccagactggtcttgaattcctgggctcaagcaatcctctgcccttgaccacccaaagtgctgggattataggcgtgagccaccgcacctggcctgtttttcagtattttatacatgttctttcattttgttttttcttcgcaactgtacatccagtcaaccgagccaaggccaacaagcattccttgaggtgagagttgcgggcctgatgtgcctactgagttctctctgttctcagttttattcaatttatgaggcccatcttttgccccacaagtatttgcagtaatttgtccattttccatgaaaattttaaaaataaaaagggcaaaatgcagcaaaacatcctcgtagctgcccagactttgctagacaaagccagtgagtggttttggtcagcaggcgggcccaggccgcagttgagcacctgtcagccggtgtcgggcaggtcaggtttggagggaaggcctgcgcggctgtccacaggtggtttggtcaagggcagcctcagaaggtggcacaggaaakggtgtgcggggtgcaggcctgaccagcgatgtttgcagatggactgcctctgggggtcaacttggggaagaacaagacctcagtggacgccgcggaggactacgcagaaggggtgcgcgtactgggccccctggccgactacctggtggtgaatgtgtccagccccaacactgccgggctgcggagccttcagggaaaggccgagctgcgccgcctgctgaccaaggtgggcagctgcacccctctccaggccctgtcccaccagcctgtcccacctgctccccttcattctccagggcgaaccttcagcatcaccctcagaagctgtccttagcacctagaccagtaggamccctggctataccttcccagagtcccctctgatcccctctcatgacactgattatatgcgacggtgacaaattatctgtccctgctgctataaatcacggggtctgtaagagcagacaccacgtctctctcatttgtcactctgaccctagcgcccagagctctgagtgaactgaaggacttcatcacccagtacmtgtggtaatatttcctggktatcttttaggaataaaagtctaaaaaacgttggacaccgtggctcatgcctgtaataccagcactatgggaggccaaggcaggtggatcacttatarcccaggaatttgagaccagcctgggcaaaagagcaagaccctgtctctacaaaaatttaaaaattagccaggcacagtggctcaagcctatagccccagctacttggaggccgaggcaggcagatcacttgagctcaggagctgaccagcctgggcaacttggcaaaaccccatcttacaagaaatacagaaattagctgggcatggtggtgcacacctgtagtccctgatactctggaggctgaagtggaaggatcgcctgagcccagggaggtgcaggctacagtgagccgtgatcatgctactacactccagtgtgggtgacagagtgcgaccttgtctcaaaaaaaaaaaaaaaaaaagaaaagaaaagtctaaaacacccttgagctattagccaatgtccacgggatcccttggcctaaaagaatggaatcggatccatctcgactgtactcctcacgtctgagggctggctttcctgaaaagaaattgtttctgctttagtttgatcgctattgtggaaacccactgacctgcagcgtaggtcacagctgcactgcagggctgtggtctgcggggtccccagctctggccgtgtgtcgccctaggtgctgcaggagagggatggcttgcggagagtgcacaggccggcagtcctggtgaagatcgctcctgacctcaccagccaggataaggaggacattgccagtgtggtcaaagaggtttgagtcrgggcctgggcccagggtgtgcctcccatggtctgcagaggccgtttggccagctgggctagcccagaatggcgttctttgtgatttcctctccttggtattcaaggctggtttggtgtgtgtcatggtgtaactcaccctgtggtcaaaagcgmatgttggaataagtgcttgaaggagtttttctaatgcctcttcctctcttttgtcaactgcatccagcaagtttaaggcttgagcttggctccttggccagtcttgactgggactgaaaattctttctctcactcctctctccagcctgtctggacagcgggtctctgtggcataggagagtagtggaaacagactgagcccggccatcgtgggttcaratcctggttccaccacttactacctgggggcctcagacaagacactgtaattgggttgttgtaaggactggaccctgtcctaggggaatgttgtgggtggtcagcgtgtgatggctgctgtcgtcatgttatggctcattctaaaacttgttgaggaaaagatgagtagtgaggtctggtgtagctcttgctttgggggctgtaggtgtgggtacctggcccggctgctgccttcgacctccagagaagcgcctctgggtccttcggtgctatgactcatggctttttctctatctcgcactgcagttgggcatcgatgggctgattgttacgaacaccaccgtgagtcgccctgcgggcctccagggtgccctgcgctctgaaacaggagggctgagtgggaagcccctccgggatttatcaactcaaaccattcgggagatgtatgcactcacccaaggcaaggtttcccgtgtttgtgtcttcagatctgcgtgtggcttgggctcctgggtcgtgatgggratcatcattccctaatctgtcttgattgtgggggactctggggctgaagccacatccttctttatggtgtcgccatgtgcttctctgtaggccgagttcccataattggggttggtggtgtgagcagcgggcaggacgygctggagaagatccgggcaggggcctccctggtgcagctgtacacggccctcaccttctgggggccacccgttgtgggcaaagtcaagcgggaactggaggcccttctgaagtgagtgaggtcatgtgtggcttgaaacagaagttaggcagaggttcatttagatcactcaagtcaacgagatactgttgatctgtttcttattcattcaaaaaggagttgaggggtacactctgaaggggagagaaattctgggttactcttttgatgaaggacaaacaatgccaaggagaactgaggattaacctccaaggcaatggtgtttctaaggtggagttgtccatttgctcaagggaggggagcctgaggaatcccatcagcattcccattaattaagcaacactggttcaatgttgggagctgtcaatacttaaaagcaatttccttcctgctctgttcctacctgggtagaaatatccctaggtctctgggtgaagagtgtagaggaaaccagatgtgcctgggccgggatgatgcgtttctgggtgaacgtgggcttcctgtaagagcagggcctgttctccactgttkgctgaaattgctttgtttgctctttttccagagagcagggctttggcggagtcacagatgccattggagcagatcatcggaggtgaggacagcgtctgacgggaagccygatctggaaccttcccaaggactcaggcaagcctttgtggctggatcatgagaggagggactccatcttgagccatgtcccccagccatggcatggctgcactgtaaacgccaatcggggggtcaccaggatcaaccgcaggctttcttcagtcccttggtcagaccataaactgcatttttgattctttgtggattcaaaccctaggatccatcagtcttgcaaggacattgaatattaggaggaaaaagtcatggaaaaaataaagccatttagaacctgggtttcaacgctagccctttctggtttgccataggccctgccaagatactgcaggtccatccaggcctctgctatctgcatctgcagtgggcttcccaggaacttgactgtctttcatttgatctttatttttgtttatttaatattttaaactttattttaaaaatatttcaaacataagggcggggtgtggtggctcatgcctgtaatcccagcactttgggaggccgaggcgggcggatcacctgaggccaggagttggagaccatccaggccaccatggtgaaaccctgtctctaccaaaaatacaaaaaattagccagatattgtggcaggcacttttaatcccagctactcgggaggctgaggcaggagaattgcttgaacctgggaggcggaggttgcagtgagccaagattgcaccagtgcactccagcttgggcgacagatcaagactctgtcacacacaaacraacraacaaattttcccgtttctctctgtccctttctctataacatggataaaatattcacgtcttatgtatttattattgctgagtcattggtgccttattcttcagtgtttcagtctgtatctcctaagcatcctgatgttagttttttgactataaaattgacctgcattctttactagcaattcaaacggtacagcactcttgaagtgtaaacattcctgttcctcctcaccccactctgcagacatgcctttctgtctgtcctcccrgacttttcccctgcataaagatgttcattttgtacatacactcagacatacatgtggctgtattttttgtataccgatttctggatggaatgcacactgttatctgtttagttactttaygttttcatacaaatgacatcatcccacaaatagaattctgccatttactttcttcactattcttatgtggcatggttcatgctgggcctcggtcttttgagtggggtctgtttacccagtcccctgttggtgatcacatcgctaacttccggcgttttcctatcaccatcggtgcctccgtgaacaccttgtgaatgtgcctgtgccttcgttctggtgtcggtgcagagcagggtccaaggggcgtgacagctgggctgaggggctggcatgtttcacattctgatagatagagccaagttgctcctatcaggttttcaagctgcccatttcccaccgtggagacagcaacagaggggacatccccagctcctctggctctgcctgttcaaagctaccctgtgaggcctgaagacagagctgccctgaaggcagctcatgtccactgaacactgactgtgggctggatgctgtgccaagggcttgacgtttcctctttaaggatgaggaaacgggcagagaagcggctgattgtccagtccccctgcgtggaggctgcttggctgggctcgagcccagcggtgtggtcatagagcatgttgtgctgaatggctctgccatggaccaagccttggctgctctaaaagccggctcattgccttctgcttctccggattcgttccttactccaggaagagcagtgcactgaaggagaaatgggaatgggcaaaaggaaccacatgctggccagacccctgcggggtcactttcctcagcctgggctccgacatgccacgtcaggtgccagcgcacatactctggacaccctcctcattctctctgggctttgatgctctctgtgagtcatctgccctccctttcccatgctacaggcatctaccttgctctgtcccacctaatagcttcaggactgaacaattcaggaaagggaagggaaggggtggaggagaagagggaaragtcggcccttggaaggttctccacggaagactgccttttttttttttgagatggagtctcgctgtgtcgcccagcctggagtgcagtggcatgatctcagctcactgcaaactccgcctcctgggttcaggggattcttcagcctcagcctccagagtagctgggactacaggtgcatgccactgtgccctgctaatttttgtatttttagtagagacggggtttcaccatattggccaggctggtctcgaactcctgacctcttggtccacccgcctcagcctcccaaagtgctgggattacaggtgcaagccaccgcgcctggctcgagagactgacattctgtctcagcacagctggaagaggctgcttgagcaccaggataaggagttgtcttgcattcaggggccatgtggtgtgcggatacctatttttctttcttttcttttttttttctgagacagagtctcgctctgtctcccaggctagagtgcagtggcatgatctcagctcactgcaacctctgtctcccgggttcaagcaattcttctgcctcagcctcccaagtagctgggattacaggtgcccactaccacacccagctaatttgtgtgtgtgtgtgtgtgtgtgtgtgtgtgtgtgtgtgtttttttgagatggagtcctgctctgtcaccccggctggagtgcagtggtgtgatctcagctcactgcaagctccgcctcccgggttcacactattctcctgcctcagcctcccgagtagctgggactacaggcgcctgccaccatgcctggctagtttttttgtattttaagtagagacagggtttcaccgtgttagccaggatggttcgatctcctgacctcatgatctggccgcctcagtctcccaaagtgctgagattacaggcgtgagccagcgtgcctggctaatttttgtatttttagtagagacggggtttcaccatgttggccaggctggtctcgaacccctgacctcaagcaatccacccaccttggcctcccaaagagctgagattacaggtgtgagccaccgcacccggcccaaggatacctatttttcttaatgctggaagccacactcagacaccagagcagctctcaatgctgggaatcctgggagactgatgatgaccgcgtctccctctgggaccaaggatggtggaagggtgtgcagaattccaaatgttatttacatcactcactcttgtgtggagtgcataattgtctttgcttgccaatttcatatcagttaaatataagcagtaagctaatcctattctgtgacttacttttctcacgtgtcatcataatgatatacgtcaatattcatccctcagatcggccttgctctaacagcccttttcacggcataaatgcatcaatgtttgcttatgggaaacacaaaggatattttcaggttttcacatcagacagtgcttcagtgctcagggcttatgtatctttgtggtcttctggtagaatttctgtagattcccagaagtggtattgcttgggcaaaggttatacacactgaacatgttgatacttactgccaaattgccatgcgagagggctgtccaactttgtaagggaaggcctctttcctcttatgttgttccacatgggaatttcaatttcactggtctggaataagctgttcttccttctcaacttttccactaggaatggcttgcattatggctctcccttggttaaaaaaaaaaaaaaaaaaaaagagaaaagaaatggagggtttagcaggttactttgggctgcagccagagtgattgccacatgcatttctctctttatctcctctctctcctaccataggctcagttctgtatcagaaagggctgaggttcctacatgcaccaccttccttcaaaggggcaggtacgtcaggtcacatacactcaagtgttttgaaagaatccatttccccactgactttctgataggctgcttctgggtcaagttctgtagccaatactttttttagtctgttttccccgtgaggaaaacatccagtcagaatggcagtctcaaggacaagtggggaactgtggtggagacgatttgcttacttccatcttggaggccaagggtgtaacttggctacctcagtagctccttggtggtgcttactcagtgcccctgggtaggaaaatcaagttgtcaggacaccgaggattcactcagctctgctctcagcagcagatgggaggcacgggctccatctggaagaagaccttgctcttgcactccagctagtttgctgcccacaacgctggccagcctttaataagagaaggcaggccgggcatggtagctcatgcctgtaatcccagcattttgggaggccaaggcgggcagatcatgaagtcaagagatcaagacaatcctggccgctgggcacggtggctcacgcctgtaatcccagcactttgggaggccaaggcaggcagatcacctgaggtcgggcgttcgagaccagcctcaccaacatggagaaaccctgtctctactaaaaatacaaaattagccgggcgtggtggcacatgcctgtaatcccagctactagggaggctgaggcagaagactctcttgaacctgggaggcagaggttgcggtgagccaagatcgcgccattgcactccagtctgggcaacaagagtgaaactccgtctcaaaaaaaaaaaaaaaaaaaaaaaaaaaaaaaaaaaaaaaaaaagaccatcctggccaatatggtgaaaccctgtctctactaaaaatagaaaaatttgctgggtgtggtggcatgcacctgtaatcccagctacttgggaggctgaggcaggagaatcacttgaacttgggaggtggaggttgcagtgagctgagatcgtgccactgcactccagcctggcgacagagcaagactccatcttaaaaaataaatacataaaaataagagaaggcagaaatctgcatgttttgtggatcatctccagtttttaagacattaactgatactgtgccagtccattgaaactggtttatgggccatatgtgaattagggcttctaatttaaatccatactgttaacaaaagaccacgagatttgcagaggcaaaagggagaactttgttttctgaaggcagtctgcagattggggagacacaggctttggtgtaaaatgaaagtgcgctcagagaatgtgtgagagagtaggacgttataaaggcaaaaaaccacaggagaggagtgaggaacagccttaagtgtcttgctttgtcacccatgctagagtgcagtgacacaatcatggctcactgcaaccttgaactcccaggctcaaagagtcctcccgcctcagcctcctgagtgtgcaccaccatgcttggctatttaaaaaattttttgtagacatggagtctcactcagactggtctcaaactactgagatcaagtgatcctcctgcttcagcctccaaaagtgctgtgattacaggtgtgagccatcgtgcctggccaggaacagtcttgattggatgacgtttaagccccaaatcaccagtctcttcattggctggttccaggtggttggtcagttgggacctggtggtctgctggtggtcagtttgggaatttccaggtacgattgttttcaggcactgttctttgacttggttgcagaaaaacagattttgcaacactttccaaggacacagtgttaccactccctcaccctgccatggcctcttggttctgcttttaacttctgagcctcagggagtccatcttgtctgtcaactgggggtataactcgtcattttcccccttttggtagaaacttgccataggcagcactgatgaccaatttatgctccatcacatattgttgccagcatggtgtggctacctgccctgggaccatctagtcccccggtgggactcatgtggctaagaaacttatgacaattgaacaacttgggccaagcagagtgtaaagtgggcagacacctgctagatatatatatatttttggagactgagtttcacacttgttgcacaagctggagtgcaatggtgtgatctcggctcactgcaacctccgcctcccagattcaagtgattctcctgcctcaacctccagagtagctgggattacaggagcctgccaccatgtctggctaattattatatttttagtagagacagggtttcaccatgttggccaggctggtctcaaactcctgacctcaggtgatccacctgcctcagcctcccaaagtgctgggattacaggcatatctagtagttttacttatatatattaactataattttaactcttagtagccctaatttctagtggaaaacttaggaagtgccgttgaattattttatatcagtatttgtagatgaaaaccattttgtttcctcaattttttattaacagatcgaagtatattgttttctataccatataggtgacttagacattctatgattacctattatttaacatagcatgattttaagatttttaaattaataatttgaaatgatgacacaggtacccttcctaatgtttttttctgttgtctggcatctcacatgtccatgtggcacccaaggacagctatgaaggacaggccttgttggggtcccaaatttacataccaagtatagagctcaggacaggacagagttgtgaagataatgcctggagaatccaacccatcccagcatggcaaagaggcaaaactgggccagggagaatggggccatattgggcttggttctgccttaagctggtggtcaggaactgaggacatgtccccaggtcccaccatggccagcctgtccagaccctagactccagatgctcaaaaccgaaaagaagctgacagtaagatatgtccaaggctttggggagcacaacagccaaccctcacaactctacctcacagacaaaacaagcaacagttttatgaccttaaaacatctacaggctgggcgcagtggctcacacctgtaatcccagtactttgggaggccagggtgggtggatcacgaggtcacgagattgagaccatcctggccaacatggtgaaaccccgtctctactaaaaatacaaaaattagctggccgtggtggcatgtgcctgtagtcccagctactcgggaggctgaggcagaagaatcgcttgaaccagggagttggaggttgcagtgagctgagatcgcaccactgcactccagtctgggtgactgagtgagactccgtctcaacaaaaacagaaacaaaaacaaaaacaaaagcaaaaacaaaaacatctacagaaattaattaaatctgtctgaccagtacattcaggcaagaagtctgagtcaaatttaatacggacaattctgaagacatttaattttattttgccaacaatttaaaccagttttatttaccagagattactagagtcacatgagctaaaaagcatttgagttagtttctatttttctgatacagtattttgatttaagcacttactttttcattaagccaactaattagagctctttcatatattttggtagtgaaatatcacatacacatgacacataaacatacagacagaagattttatagctttataagattcttcatttgccagttttcaaatagtttttctcccccctgcagacagactattaagctctaagcagttgttagctaggcaacctgaaatttgtactctccaagacaggacttctttggtaaaaatttacatatcaaagacacagaacttagatataaacaccattatttgccaagacaaaaaggggtaggtaaaagcccattcaagacaagctttccaggaaaagtgtcttaaacaaatttaaggtttgttaggtaaactttaggacatcttccttgttggaaagtttctagtggtttaagtgcggggatgcagatgcccttacaaatggagattttttatacatgtaaatttattttacaaagaatttcaaaatagccagctaaattccagaaaatattttggagaccaatctaattagactggtctttttaaattaggctgtttcttgattagattattgagtcctttaacagggtaaaagcagccttttctatgcttggacttaggaagtctatttttacctgaggacctatcttttataaacactttagttagcttgttttttcttttgaaccaaaggtaccttttcaaatagtttaccaaaagcaataacccttaaccaaggttatgacttggttagtcaaggatgaaccaggcacctccaagaggtgcaaagcagtcctcacaagatccagaactaccccaaagtcagctcaaagataaaaagtctttttagccacaaatggaatacaacttatacttctaactggccatattttctaggatctcagcttctcagctgaccacctatgcataaaggcccaaaggtcccatatgccctacagaaggaaaaagacgggaaatcaaatcatgttttaggttacgtttttgctctttaattttgtgaagagaatttccaaggctagccatgacactcctaagcgtccatggaaggaaaaaggatcagtaacaaatgggtacccaaaaaaggtcaatagtcaaacaatttaaaacaaatgggattgcttctctgactcggaattgaacctgggctacagccacaagagcccagaatctcagccactagaccacagagtggagggctttttgtaaatcctacaggggatcaatagcaggcagtttgagcataaaaaatattttaactttgttttagatcatgtttttgctctttaattttgtcaagagaatttctaaggctagccatgaaactattaagtgtctttatattttaacttaattttttttaaatacaaagaaagtatttgtttagaatgagagatctctaagatatttttaaaatttaggagggtaatttaaaggatctgttttctggccattgacatttagaattttcaatcatgtactcctttcaataatggcacaatccaatagcctctttacggaaagtccagaatgtaattttccaggtgtagagaaagttttgttttttgttttttttaaaccagttaagaaacagatgtttcctggaaagggtatagaagaggcaatgccaaatatccccctacgcaaaaaagttcactcccaggaataggctaagttggcaaaagactcttgttgccacagatggttaagga

SEQ ID NO: 95593 - DNA, 98532 bp, Homo sapiens
gaggggcggggaagggcagagccgtccaggaactctacagcgccgccgcctccgcgcctcccttcagcctgcccgcagcttcccgcctctggctgggctcggggacctcggaggcctgtttctgagcccctccccgcggactcgctccccggacgcccccagcgggctcctctggcctcggccctgcacgccgccggggcggagcctcccatcctttgggtaagagccccttccccgccccgcgcgggggaagggccccgtttcctgggctcctcctgtgctccagcacgctgcctggggagatcagcctgtaccccggcgctggcctccagacagccaggtgctgcctcgcacggtcttgcttgcaggctggggcatgaagcaccctggtatttacgctgggattggtctctcactagggttggggcgggctgtggtcacctggcccggcgcgccgcagaggctggctccggagaagacctgggggcgcaagactcagaggccagagggtgcagccgctgctgactcatttgcggacggggcggctgggaggagcgctagcccctgttgtgagcgatttgagagccagggccaaatctgggtccagacggccagctgggccagcgaggggattccagtccccacaggaggaggtggtgagagagggagagggagggcatatctgaggcccctaggcaggatgcgttcagggctgggccccacagcctgctcatccatcctgaatctggcctccgggacttggcgttcccgccctccgtccccaccaggctgtgtcttctttcctctggacacttctttccccctcccccggtttctcacagctttccttgccccaccttctccataaagaaatgtggctgtgagaagcgccacgttttgaagccaggtcacctccacttcctctagtgctggtatcactaaccccttcctctgtccttccttcctttgtccctctcccccgcatttatcccacaacttcctttattctgtcatgccatgcctaaggggcccctaggaggggtcaggagcaactgggagtttttagtttggagaacaggagggaatgagaacgttcttgcgtccactcattcatttgagcatgcatttacacatgcgtttacttccattcactcactcatacattccttcattcttttgcagttaattactcattcattcattttctggacacttactgagcatctactgtgttcaaggccctgagtgtttgsgggaggggccaggatactctgattggccagtcccatccctgatgccagctagctcaaggtcaaaaagggggaattagcacaaatcagtccaatttatgagaaaatgcaccgagaaagggctgtgaagtgtgtgtgtgttgtgtgtgtgtgtgtctgtgtgtgcacaggcgttggggcacatagggggagaatgtaattccacttaggaggggccaagaaggcttcctggaggcagtgacatttgagctggccttgatggcgggcacggtttggatgtagacttattaaacgggcatcagggtggagggaacagcagaaacaaaggacacaccaggggtgtgagggagcagtgggcagttctattcatggcatgaggggatcagaagaacgaagtctggacagcgaggccagggctgagtggaggacaggagagaggagcagccttgttctgagcagcccagagccacggtcacggcaagacccttctggctcttgtgtgtgtgtggagctgttggttctggtagaagctgtaggagttcagctaggacagtactgaaagcggaagttggtgtagatggtgtgagacgtccctcctctccagagagtccgtggtcctgtctggaaaggccaaaaagccaggagagggaattcctgggagattggttattttattcactcattcatttcctcttttgcccttaaacccactcattcattcattcttcacttagtcaccaaacccttcctctgggcaagccttgtgctggggactcagatgattcagaagaggtccctgctcatgtgagctcccagtctggtgggagagacagatccgtgcctgacagctgcaacccagaatcactgtggaatgtaaatggagataatttcattgtgttttgtcactgagtggggaggccgagttgagacatggaccagaagaattaatgcagacgtttggcctccagccagaaaggcctgatccatggggccaggtgaagaaggttgtagtttgggaaaatgagtgtttgaaagagaaaatcctctgggttcacaggtgtgaagaggcaggctttctctaaatgtgagactccccagaggcccacttagggactgggcctttgggctgaggtcaccacaaactcccctcacattagagatgaacctgcgggatttgggagcccctagagaattttctggctggtcagcataagctataagcaggttgtggagggtggtggttaaatctgtgggcttcggacttagatcagggttcaaatcccgatgttcccttcccagtgatgtgactttggacaaatgacttaatactctttgcctccattttttcctctacaggaaaataataatcatagtatcttccttttagggtgaggcctaaaggcaataacatacacgatgtgcgtgcacagtgctgggcattgaaaagggctataatgatagggttataatgacagtgactatgatgatgacagtgacatactatcaagtgctgcctttaaaatctctgggcctcggccgggcgcagtggctcatgcctgtaatcccagcactttgggaggccgaggtgggcaaatcactgaggtcaggagttcgagaccagcctggccaacatggtgaaatcccatctctgctaaaaaatattaaaaaacagggccgggtgtgatggctcacgcctgtaatcccagcactttgggaggtcgaggtgggccgatcacgaggtcgggagatcaagaccatcctggctaacacggtgaaaccccatctttactaaaaatacaaaaattagccgggcgtggtggtgggcgcctgtggtcccagctactcgggaggctgaggcaggagaatggcatgaacccgggaggcagagcttgcagtgagccgagattgcgccactgcgctccagcctgggcgacagagcaagactccgtctcaaaaaaaaaaaaaaaaaattagctgggcgtggtggcgcgtgcctgcaaccccagctactcaggagcctgagtcaggaggatcgcttgaacccaggaggtggaggttgcagtgagccgaaattgcgccactgcacccagcctgggtgacagagtgagactctgtcaaaaaaaaaaaaaaaaaaagaacaaaaaatctctgggcctcattgtccccgggtgtaaaatgggagggctgaccccagctcgccagttctccaagcgcggtccctggaccataggtatcctttggggtcttgttagaaacgcaaattcttgggtgctgcttcagttctatggaatcaaaaactgtggggacagggcccagcaatctatattttgacaagccctccaggtgattctggtgcaggctggagtttgagaaccgcagacctcttcttgatccccgttcagggctgtgatccagccatgtgtgtttcatgcctcctgcacatggtgtccaagtctgcagggtggtggggagggggcacagagataggtaagatgtggtccaagccctcagggagctcgtgggtgagttggaaaggggagacagacacccatgggaacattcactggagtaacagactgcacagagctgttgcggcgacacaggagtgagctctgtaatagaaagcgcagagaggagagggacctttgtgggttggaggggcacctgttgaaagatctagctctctgctgcttgttcctaacactaagattgattcagcctttctggaagtcctctcgtaagtctaactgaagcctctctcatttcatgccttgctgtgtggggggtggacagggctctggacttgaggtcaggggtgtgattctagccaacttcctcactgtgtgtctttgggagcctcactttcctccgggcctcagtttagccatctgtaacatgcaggggtgagccaaatccagtgagtgtgggacattgcagttgtctggagagagggtaggcttgggagccaggagctctctgggttttcattcctccttctgcagagggaggattctgaaattgccctggctgcctgtcaagttagcttggggacccataagatgagatatcccctctttgggctgacttccttaccatccagggaagtctcatgacacctgtcctgtccgcctcacgtggctttcctcatgtcgagcgtgctcgtcattctgtcattctcacaggctccttgatgcctaaagcccaatgtctggcattcgagccctccatgacaggttcccagctttcctgcaaggccatgctcctcacggcctatgactgcctcctgttctgcgcctgtcaggtcttccacctcacccctcttctcagcctatccaagcccattcagtcttcaggcgagctctagcactatctcctccaggaagtctccaggattgctccaatcctcagggccatccatgggccatcttgcagtctttaaggtgtgacttcaatttctcatttgtagacacagaatggctgaccactaacaagctgtttgagggcaaggcctgagctcatggggatggacattattagagtccttgacttgtggagcagggaggcccagagaaaggagggaacttgcccagagtcacatggtacactagtgaaagaaggagaactcaggcttcttaggcaagacaggcctggaggatgcatgattagatctgtggtgaatgagcgagaggccctgaggatggaaggaaggctgtgccctcggaatccagcgggtctgtcccagctggtctgtgctgtcactggctgtgccacctggggcatgtcacgtacccttcctaaggaatcttcccagtggggttggaggaagaccagcccgaggcctgtcacacggcaggtgcttggttattatggggtgcatgctattattttccatctacttgtccatcccagcccccatgcctgaatcctttccctgcccctccacttcccaccccccacttcccttagccaccaagcactcattgtcctgtccttagtccaacgtgagtgtcaagacctcctgatcaagcctgtgggcagaagtcagagggagaagggaaaaccctggtggtctctcagttggtggtggctagagagaaactggagtgggtgccccaaggggctgaagcctgtgtggccatcggggtggaatttggcaggtgccacttttagaaaagtcacactgcctatttaaaggaagtgaggggtgtgtcctgtccccaaccagcaactgctggatgcctgcggcctggagctgaggagctggtgggcagcgctcccggggtgaagaatcctagcaggtgggtctggtatctctccgggaggttgctggcagctccttggcctcctgccaccttccagcctgaccccttgtggacggatggaagcctcatggctgttttgcccatctgctggctgggatcagggacctggacccccaccagcccccttccctgggagtgatcacagagccaagagacactgttggcaggatgatgagctctgggactgggggtgcctggagtttggctggggctgggtgcccagtgggcgggcacaggccccttgacgtggctgtggcctagctggcagcctcgtccttcctctccgctaggcgggcactggagctttctgtgcagggctcctaggagaaggggggtagagggcagtctgaagagaggcgggacgcggggtgataacagctggctctggtgggcgggcgggagctggggaggaggagcaggagaggcccacaggcttcatttggagtcaggcctggctgttgctcaggtgaccagcttgtgtctctgggagggcrctgctttccccggccacccggcgcgatgatccagaatgtcggaaatcacytgcgaygggtatggagggtgggctggggcagcgggagggctctggaagctgggcacccagaaagagattgatgtttccattttaactyagayrcyctgcatctcctyacactctccacgggccattttctagctctctttggaaggagaaatygcagaacccctgggctggtttattatcagcagcaatctccaaacaagccccaggggctgtcagatcccccacgggctggctgtgtrgagtggaatcaccttcagcaagtgtcggcctctggaattctattcggtgggtgtatgtttctccctgcagagttctgtgtatgtttctgggggatgtctgagctccatggccttgtggtgcttcatgctcagagctcaggaccccaaagccacaaagctgatgggagtgacagggtgtgaggtatgggtgtgagtgagtatgtgtggtggggtgaggtcggcgttcttggggagcagaacctcttkgggagagcaagcacaggatcacatgacggctgcggaaagctgtcctgcaaggtgaccttgaagagaacttttccctgcgctttggagctgagattagttgctsaggcacacggcagacccaagtgcccagcagcgcctggcagtggatggagtgtatggagatgggctcaggacagactggcagaggttgtaagactggcagaggctgacctctgaggatattttcaggaaaagcctttttttaaaggggctggaacaattaaatgtcttatctatcctctccctccatctgcacagccactgcacaactcagcatcctcaccgggccctgtgcatcttgtctcccctggctcccccattccatgtcagcccctttcagtccactctccacactggagggatgcttctaaaaagtaaatgtgctgactcctcacctgctcacacggctacccgaggatgattttcacatcccttacttgagacgaagggatgttggcactctggctcctgcccatgcctccctttttcttccaccatccccacccctctgctgtccctgcttcagccatagtragctgctctccgcggcttcggtgtcccacttttgttctctcctccaggctgttgtacytgctatgtcttctgccggagttacccccagccttcctgcatctccccaaacttgtgtccccagcaagttccttctgagccctcagatctcagctcaggtgctgcctcctctggaagtccttctcagatttctcatgacaccatgagcctctgtgttagccccttttcacactggattgtgtgctagactggcacatacatccctcccaccagccagggagcaacacgaggctgctcttggtatacccagcacrgggacgggtgtggccagaggccagggaatgcttaatgaatgaatggggacaggcagcttttcagcagcgaggctaagggtgggatctgagtagcagggccgcttgctcttgtcacctgagtgcagggcagagtgtctcccaggagggaggggctcctcgtatcttctcttgtgccctgttgtatttaaccctttatgactttttccttcatcagtaactgggggcaaggcactggggaagaggcatatcgttatcactgttttacagagataacaatagtaacaaatcttcacatagctctttgcatttatgaactcattcagttctctatgaggtaggtacagttatcatccccgtatcccagataaggaccctcacagagggtaagtgacttgcccaagatcacactggtaggaagtggcagagctgggattagaacccagcagtttggccccagagtctgagctcttaaggagcctgaggctcagccagatgaaggcgcagatgtgggattccaacccacacgtcctgactctgagcccagctggcattcagcttccttgcactacctttgttgagtctgggggtgraggtgggtattgggagtggaagttgggctcttgaggacacaggtagcctcctgtcagctaagaacactctggccttgattgccacctctgcaccattgtctggatggcagatctctttggatttctcttgaattcccttagttcctctggaatacaagagggtttgggaacattttctggcttggtaccaaagctgtttttaatgaaaagcaaacaagcaaacaaataaacaatccctggccagctgtggtggctcacacctgtcatcctagcactttgggaggctgaggcaggtgaattgcttgagctcaggagtttgagactagctaggccaacatggtgaaaccccatctctaccaaaaatacgaaaaaaaaaatagctgggcatagtggtgtgcacctgtggacccagctactcgggaggctgaggtgggaggatcacttgagcctgcctgggaggcggaggctgcagtgagccaagatcatgctactgtactctagcctggatgacagagtgagatcctgtctcaaaacaaaaacaaaaacaaacaaaaaaccccaccaagctgggtgtggtgacccatgcctgtaatcccagcactttgggaggccgagacgggtggatcacttgaggccaggagttcgagaccagctcggccaacatggtgaaaccccatctctaccaaaaatacaaaaattagctgggcatggtggcatgctcctatagtcccagctactcgggatgccgaggcaggagaattgcttgaacccaggaggcagaggttgcagtgagctgagatcacaccactgcactccagcctgggcgacagtggtctcaaaaaaaaaaaaaaaaaaagaaaaaaaamcagcaacagcaacaacaaaaaactcaccaaattgtctttaatagggactaaactgggaacagaagagggggtctcagataatccacaagccccactttgcatggttgggggccattttcagtgtcctgtggcactgtagacagagtcagcattggagttcaagggctctggtccctactcgcccctgggtacccagcaagtgagtgggcgactgaatgaagtggtcagcctgctgccaygctcggggctgggagaactgctgagtgcagtgtggtggtgcgggaaaggtctccctgtcccgcttcaatccttgcctctccccgtggagagctcttctttccctttccaagatgtcagtctacactgggcactgagtctcacatttctgggctagcagggacccactggtgccctcgtaggaggtgggcaagggtcctgggaagcctgggaacctctgcccagcctcaggtctagcctggcccaggtcagctstcagtggggctcagaagctttttttactccagaaatggtgatggggctggctgtttttgttttgtttttgtttttgttttgttttgtttttgtttttgtttttgtttttgtttttgttttgagatggagtctcattctgtcacccaggagtgcggtggtgtaatcttggctcactgcagcctctgcctcctggattcaaggaattctcctgcctcagcctccggagtagctgggattacaggtgcccaccaccacacccagctaatttttgtattagcctccaaccacacaatgcaatcctactgttttaccttgaacctgaggacagctggagggctccccacaacctctcagcttcataaggggtctaacccagagtgtggggaggttcaggcacaacagttggatgttcaccccacggttcacggtgtgacctttggccaggggttcctctctctaggccttagggtgctgggtgatccctgaggtccccaccagcctggacatcctggggctctgaatgtttgtgaagggtttgtctgccaccatgaagttgatcctgacagtgagaggcagggtcccgtctctcttgaggaccctactctgtgttggaggtggggagaccttagacataaaatgatgggcctatcatatacgaggagtcccaaaactgctgaatgaatgagtgaccacaggtgctcagaagcaggctgaggtggtcctagaaggcttcctggaggaagaggtgagacttgaacatgtagcatcagcctgttcaggagccatatgtgaacccccagcctcagccatgggcagacactcttagtgttttttttgtttgtttgtttttgaggcagagtctcactctgtctcccaggctggagtgctggagtacagtggtgccatctcagctaactgcaacctccacctctctggttcaagcgattctcatttctcggcctcctgagtagctgggactacaggtgcgtgccatcggctaattttttctatttttagtagagacggggtttcaccatgttggccaggctggtcttgaactcctgacctcaggtgttctgcctgccttggcctcccaaaatgctgggattacaggcatgagccaccatgcccggcccactcttagtgttgttgttgttgttgttgtttgtttttgttttgttttttttttttttttgagacggagtttcgctcttgttgcccaggctggagtgcagtggtgctattttggctcaccgcaacctctgcctcccaggttcaagcgattctcctgcctcagcctcccaagtagctgggattacaggcatgtgccaccatgcctggctaattttgcatttttagtagagatggggtttctccatgttggtcaggctggtctcgaacttccgacctcaggtgagccacccgcctaggcctcccaaagtgctgggattacaggcgtgaaccaccatgcccggccagtgttcttaatttatctggaggactctttttttgctctccaaaattttattttaatatgcatagcataagggaatgattacctcattaaaaaawttttttttaatgggccaggcatggtggctcatacctataatcccaacactttgggaggccgaggtcggtggattacttgaggtcaggagtttgagaccagcctgaccaacatggagaaactgtgtctctattaaaaatacaaaaataagctggatgtgcccagttgaacctgggaggtggaggttgcagtgagccgagatcgcgccactgcactccagcctgggtgaccgaamaagactctgtctcaaaaaaacattaaaaaaaaaaaatggacaggtaatattctatgtttttatcatgtacaaatgatgttttgaagtacgtatacattatgttatgactaaatctaattaacagatacattacctcacatagttttcatttttttggtgatagtgcagaacatctactctgcatttttcaagaatacaatatattgtcattaaccatatcaccttactgtataatagatctcttgaaatttattcctcctaagtgtaattatgcatcctctgactaagatctctccatccccccaacaacccctgcctctgataagcagcattatactctatttccatgaaatcaactttttaagattgatgtctgagtgaggtcatgtagtatttgtctttctgtgcctggcccttatttcacttaatataacatactctgggggaggtggctcgtgcccataatcccagtacttcgggaggctgagatgggcggatcgcttgagctcaggacttcgaggccagcctgggcaacatggcaaaacccgatctctacaaaaaccacaaaaattgccaggtgtggtagcacgcgcctctagtcccagctagttgggaggctgaggtgggaggatggcttgagcctgggaggtgaaggttgctgtgagctgaagttattgcatttcagcctgggcaacagagccagaccctgtcacacacaaaaacaaaaacaaaagaaaacaaaaaaaaaaactccaccataacatactccaggttcatccatgtagttgcaaatggcaggattttattttatttttatggctgaatagtattccatagtgtgtgtgtgtgtgtgtgtgtgtgtgtgtgtgtgtgtgtgtgtatatatatatatatatattttttttttttttttttgagatggagtcctgctttgtcacccaggctggaatacagtggtgcaattatggcttactgcagcctcgagctcctgggctcaagcaagcctcctgcctcagccacctgagtagctgggaattagaggtatgcaccactgtgcccagctaattttttttttaagtttttgtagagatgggttctctctatgttgaccaggctggtcttgaactcctggcctcaaactatcctctccccttggctgttgggattgcaggtttgagccaccacacccagctttataccacattaaaaaaatccattcatccactggtggacacttagttggttccatgtcttggctattgtgaagagtgctgcaataaacacgggagtagaggtatctcttcaatatactgatttcatttcctttggctatatacccagtagtgggactgctggatcatatggtaattctatttttaattttttgaggaacctccatactgttttccataatggctgtaccaatttacattcccatgaacagtgtcaaaaggttgccttttccccaaatccttgccaacacatattgtcttctggttttgtttgtttgtttgtttgttttgagacggagtctcactctgtcgcccaggctggagtgtagtggcacgaccttggctcactgcaacctccgcctcccgggttcaagtgattctcctgcctcagcctcccaaatagctgggattacagacattgcgacaccatgcctggctaattttttgtattttcagtaaagatggggtttcaccatgttggtcagcctggtctcgaactcataacctcatgatccacctgccttggcctcccaaagtgctgggattacaggcgtgagccaccacgtcyggctctggttttttgatagtagctattctgacaggtatgagatgctatttcattgtggttttgatttgcatttccatgatgattagtgatgttgagcatttttttcatatacctggtggacatttgtatagcttcctttgagaaatgcctattcaggtcttttgcccattttaatttttttttctattgagttgttttacttctttgtatattttggatgttaaccccttgtcagatatatagtttgtaaatattttctcccattctgtaggttgtctcttaactctgttgattggttcctttgctgtgcagaagtgttttggtataaagaaatcacatctatttttgcttttgttgcctgtgcttttgagaccctatccaaaaaattcttacctagcacaacgtcatgaagtgtttcccttatgttttcttctagtaattttgtagtttgggggtcgtacatttaagtctttaactcatttttattttttattttttatttttttttgagatggagtctcactctgtcgcctaggttggagtgcagtggcatgatctcggctcactgcaacctccgcctcccaggttcaagtgattctcctgctgcctcagcctcccaagtagctgggatgacaggcacatgccaccacgcctaactaacttttgtatttttagttgagatgggatttcaccatgttggccagcttagtctcgaactcctgacctcaggtgatccacccgcctcagtctcccaaagtgctgagattacaggtgtgagccactgcacctggcctgatttttttatacagtgagagataagsgattgatttcatttttctacatgtgggtttccagktttcccaacatcaattrttgaatagactgtcccttccccaatgtgtgttctggcacctttgttgaaaatcagttgrctgtaaatgtgtagatttattttggagctctctattctgttccattggtctatatgtctgtctgtttttataccactaccatactgttttggttaatgtagctttgtagtatatttcgaaatcaggtagtacagtatgatgcctttggctctgttctttttgctcaagattgctttggctatttggggtcttttgtggttccatatgaattttaggcttgttttttctgtttctgtgaagaatgtcattggcactttgatagggattgcattgaatctgtagatcactttgagtagtatggacattgtcaccataattcttctgatccatgaacatgggatcttttcatttatatcttcttcaatttctttcattaatgatttatagttttcattgtagagttttttttttttgagmcagagtctcactgtgtagcccaggctggagtgcagtggcatgatcttggctcactgcaacctctgcctcctgggttcaagtgattcttctccctcagtcccccgagtagctgggattacaggtgtgtgccaccatgcctggctaatttttgtatttttagtagagacagggcttcaccattgttggcaaggctcgtctcgaactcctgaccttgggtgatccgcccaccttggcctcccaaaatgctgggattacagacgtgagccatcgcatctggtctycactgtagagatctttcatctcctttatttattttttaagagacagtgtttccctctgttgcccaggttggagcgcagtggtctgatcatagctcactgtggctatgaattcctgggctcaaatgatactcctgcctcagcctcccaagtagctgagactacaggcatgtgccaccacacctggcagattttttatttaaaaaaattaaaaaaaawttttatacttaggccaggcatggtggctcacgcttgtaatcccagcactttgggaggccaaggcaggcagatcacaaggtcaggagttcgagaccagcctggtcaacatggtgaaatcccatctctactaaaaatacaaaaattagtcaggtatggtggtgcgcacctgtaatcccagctactgaggagrctgaggcaggagaattgcttgaacccgggaggcggaggttgcagtgagccgagatcatgccactgcactccagcctgagtgacagagaaagattccatctcaaaaaaaaaaaaaaaaaagaaaaaaattaaattatttatctacccttgtgtgcactgaaaaaaacattttaagagatagagtcttgctatgttgcccaggctggtttcaaactattgggctcaagcaatcctcccacctcagcctcctgagtagctggaattacaggcatgagccaccactcctggtttttacctccttggttaaatttattctcaggtattttattttattttatttttcgtagctattgtcaatgggattgttttccagatttcttttttagatagtttgctattagtatatagaaagactactgacttttgtatgttgattttgtatcctgcaactttactgaatttattattcctaccagttttttagtggaggctttagggttttctatatataggattatgacatctgcaaacagggacaatttaacttccttctttccaatttggatgccttttatttctctctcttgcctaattgctctggctaggacttccggtattacgttggatataagtggtaaaagtgggcatctttgttttatcccacattttagatgaaaagctttcaacttttccctgttcagtggaggactctttttcatctttcaaaacccagctgggctatcrtttcccctttgaatcctcatcttgtctgtccctagagttaatgacgtctcctcaggatgttgtatatacttcactcgttccctccacgggtacttactgtactgggggattaacagttagccagtgctgggtatgctgtggccaatgatatatatagcctgtttcctggagctgacagctagtgcaggagagatagggagaaggtattcaaataaacaatgatgaaaatctgcaataagtgctatgaatagtagtaataacagtaaatgccatacaagtgctagctgtatgccatgcctgcagtaactcattattccttataacaactctgtgaagtagataattgtgtccgtattaaagatgaaactgagacagacaggttaagtaagttgcccgaggtaacacagctagtaagtagcattgctgggattaaattgagactgtctggagaacagggagctgtgagagaatgatgagggggtcaggggagagctctctgagcagacgacagctgagcagaaagctagcagctgagaaggcagccttgggaagatctgagggaagagcattccagccaaggggaacagaatccattggcaggctccaaggctggggcgagcttggtgcatctgagcagctgaataggggcccagcagcccctgctgctcactcctcactccacttggagtggagggagcaaagggaacagctggaagaggctgagggcaggcttccaggacctgcaggctgggggtccaggccttgtaggctgagtttgggctttcgagcgctgtgggtcatgttgtcttgcctacctgcctgtgagagccatgagggctcccttgtccccaggcttagtgccaagatatgcagttcccgcacgctgggctcagcgacccagggaaacacatcatcatggttccccttctttgtatggccagcaccttgaaggtctcagctgcctccccattcaccccctgactcctcacaacagggaggtgggtaaaaggctcagcccccgtgagagacgaggcacagagaagtgaggtgacatgcctgggtttgcacacctggcaagagacccagagctctcatctgctagactgggtccccgtttccagcccttgtcttggctagcggggcatctggaacttccgtgcacctagaatgtggcctcactgttacatgtggacccaccccatcccagcctcctctgcccaccctcacacactgacagtgtagattcagggccccaggctgagctgaccccaccccacacacctcagggtcgagggaggctgcccactgcccctcacctgtgcctgggctggagcagggccaagctggcatcccgggagccttcggagagctgctcatcactcggcccgatgacgaaaagggtgctgccttagaggcactcactcacctcacctctgtgggcatcagtttcctaatatgaaccagttctcttcctgcagatcatgccaaattgttgtcaggaatagagatgttgaaaaaatggagaactcggcacataattggccatggtgaatagttttctttttttttttttccatctcatgtgaacctcagttttctcagtggttcaatggtagggtcagttggtcagatgagatggtgaaagcaaacttttctgttgaggacctactaagtgtcgggcatatttaaacttcccaacagctttgcaaggcttctggtatttatctggctttacaagttagaaaaccaaggctctggtatgaagccactgtgatctaattagagaattcaaagcctcatctgaccccaagctccagctgggcaggggccctgggtgctgaagctcctctccttgtcctgggctgacctggctgagccaaggaactgacacctctgccttatgcctgctctgtcctgtggctccagggacagatggtgctgctggctgggtcctctgccagctccctggctgcaggcctgtgtgctcctgccattcccaggggcagccttgcgggttagaggtgacattggggcagtgacggactggggcagaccagagtctgacactttggggacacagggatgagccagactagacgtgtcctcagatgccctcaggttgatggagagacagagggaggtacaaacctactatggcagcacagcacagcacagccaggatgtgacagagggaagcaccaagatagcccctcaccagcccagtggtcagggtgggctccctggaggaggtgatgggttaggttggccctaaaagcttttctgggttaggaagaatgatccaggcagaggcacctgtatgtaagagatgtgaaggagccaggtccacagagaaatgagggagttaagggcaccctccttgacccccttgtccatgtaatatgtatatcctgcctagggcttcttcagtagtaataatttgtcctcagcaaatgatatattaactaattaatatcagtggacgtgaattattaagcatctgtttttgttttctcgagacaaggtctcactctgttgtgcaggctggagtgcagtggtgcgatcatagctcactgaagccttgaattcctaggctcaggtgatcttcctgctgtagcttcccctctcagcctcccaagtaactggtacacctgacctagcaaccaaaagaacaatgtgtcaactatgcttggctatttttttttttttgagacagagttttgctctgttgcccaggctggagtgcaatggcgygatcttggctcactgcaacctccgcctcctgggttcaagcaattccccttcgtcagcctcctgagtagctgggattacaggcgcctgccaccatgcccggytaattgtttgtatttttagtagagacggggtttcaccatgttggccaggctggtctcgaactcctgaccttaggcaatctgcccacctcggcctcccaaagtgctgggattacaaggcaatccgcccaccttggcctcccaaagtgctgggattacaggtgtgagccatcgtgcccagctgcttggctgattttttttttttgtttgtttgtttattttttaaatttatttttttattgataattcttgggtgtttctcacagagggggatttggcagggtcatgggacaatagtggagggaaggtcagcagataaacaagtgaacaaaggtctctggttttcctaggcagaggaccctgcggccttccgcagtgtttgtgtccctgattacttgagattagggattggtgmtgactcttaacgagcatgctgccttcaagcatctgtttaacaaagcacatcttgcaccgcccttaatccatttaaccctgagtggacacagcacatgtttcagagagcacagggttgggggtaaggtcacagatcaacaggatcccaaggcagaggaatttttcttagtgcagaacgaaatgaaaagtctcccatgtctacttctttctacacagacacggcaaccatccgatttctcaatcttttccccacctttcccgcctttctattccacaaagccgccattgtcatcctggcccgttctcaatgagctgttgggcacacctcccagacagggtggtggccgggcagaggggctcctcacttcccagtaggggcggccgggcagaggcgcccctcacctcccggacggggcggctggccgggcaggggggctgaccccccccacctccctcccggacggggcggctggccgggcggggggctgacccccccacctccctcccggacggggcggctggccgggcagaggggctcctcacttcccagtaggggcggccgggcagaggcgcccctcacctcccggacggggcggctggctgggcaggggggctgaccccccccccacctccctcccggacggggcggctggccgggcagaggggctcctcacttcccagtaggggcggccgggcagaggcgcccctcacctcccagacggggcggctggccgggcggagggctgaccccccccacctccctcccggacagggcggctggccgggcggggggctgacccccccaacctccctcccggacggggcggctggccgggcagaggggctcctcacttcccagtaggggtggctgggcagaggcgcccctcacctcccagacggggcggctggccgggcggagggctgacccccccacctccctcccggacggggcggctggccaggcggggggctgaccccccacctccctcccggacggggcggctggccgggtgggggggctgacccccccatctccctcccggacggggtggctggccgggctgaggggctcctcacttcccagtaggggcagccgggcagaggcgcccctcacctcccggacggggcggctggccgggcggggggctgatccccccacctccctcccggacggcacggctggccaggcggggggctgacccccccacctccctcccggatggggcggctggccgggcggggggctgacccaccccccacctccctcccggacggggtggctgccgggcggagaggctcctcacttctcagatggggcagctgccgggcggaggggctcctcacttctcagacggggtggttgccaggcagagggtctcctcacttctcagacggggcggccgggcagagacgctcctcacctcccagacggggtctcggccgggcagaggcgctcctcacatcccagatggggcggcggggcagaggcgctccccacatctcagacgatgggcggccgggcagagacgctcctcacttcctagatgtgatggcggctgggaagaggcgctcctcacttcctagatgggatggcggccgggcggagacgctcctcactttccagagtgggcagccaggcagaggggctcctcacatcccagacgatgggcggccaggcagagacactcctcacttcccagacggggtggcggccgggcagaggctgcaatctcggcactttgggaggccaagrcaggcggctgctccttgccctcsggcccygcggggcccgtccgctcctccagccgctgcctccygggcggcgctcgctggcgcggcggcaaagactctgattttttaaaaatgtattctagagatggggtttcgccatgttgccaaggctggtcttgaactcctggcctcaagtgatccttctgccttggcctctgaaagtgctgggattataggtgtcagccactgcacccagcttaagcaacttggagaggcagcccagtgagtagaaatggctttggtattgagaaaagcgaaatctcagctccatcgctcaccggcagagtgccattagacaaggcttttataacccaagcctcagttcccttttctgtgcaggaggaataattgtccctcacagggttttggtgaggatgaatggtgttatggatataaagcaattttatataatgtatagaaaagcctraaacttagtaggtgcttagtaaggatgcaccaggattccagagacacatgagatgtggcccctgtcttcaaggagtttcttattaccacatgtgtgtattcttttacagcctagaaagctctatgggccaggctcagtggctcatgcctgtagtcccagcactttgggaggcagaggcaggaggatcccttgagcccaggagttccagaccatcctgggcaacacagacctcatcttactaaaaataacatttaaaaaattgggcttggtgccgtggctcatgcctgtaatcccagcactttgggaggctgagggagcggggggyggatcacttaagatcattagttcaagaccagcttggccaacatggtgaaaccycatctccactaaaaatataaaaattagctgggtgtggaggcttgtgcctgtaatcccagctactcgggaggctgaggcaggagaatcgcttgaacccagaaggcggaggttgcagtgagccgagattgtgccactgcactccagcctgggcaacagaatgaaactccatctcaaaaaaaaaaaaaaaaattagccaggtgtggtggtgcgtgcctgtagtctcagctactcagctactcaaggggctgaggtgggaggattgcttgagcctgggacgtagaggctgcagtgagccatgatggcgccactgcactccaacctgggtgacagagcaagaccctgtctccagaagaaaaagaaaaaataaaataaaaaaagaaaaaaagaaagaaagctgtgcacagctttacgtcgtctgttattcagaagcctggtaggtcagtgcttggctaacagcacccgggctgtggcccagagaggaccaggttcaggttgcctgcggggggtggggaatctcaggtctctccactccttggcattgtcttatttacgacctctagaataggctgtgatctgccctggggcgtggccctgcccaggtgtggccctgtgccagacgtggactcggtgagaggtcggaaggggagtggccttgggacttcctttcagcagcctctggtttccagcaccacacctgggccgagctgaagcaggtaggtctgacttttcttttgatcccttagggagggtgtggagagacccaattcctctttttcttctccagggatacagccccgtgagtggtgggagggacaagtgggaggtccgaagtcggaagactctggctggttcttgaccggctctcttccccagcctcagcttcctcattcataacatagggatgtcggggttggggcggtggggggtgataatggtccctgcaactggagcctgcttcgtgccrggtagcttaatgccatggcaggtatttacagagaaggggtgttaagagatcagatgtacatgtgcctataggctttgagagcagggcgaacatgggagaggaaggggcccaagcataaagtgactttggggccaagggaggggccctttctgaagagagtccaaggggaaaagcatagccttgcatctcagcaccgtcttcccccacaccaccccaggccctccttggcctttgagtttacttggtccccaccctccccttgcttttgaagactgaactggagcttccaggcagcaaggcaaggagaaggtgtgtctgtgcagactggttctcagctgggaaaacaggaaggcaggccttctggatggggagtcgaggcagtgatactctttacccggcagatcccactgcctgggtgggatccacaggtcggaaaccacttctgcagtgagctcttttcctataggctcatatcatgcagaaggtaggagtgctgggaggcaactgataacaaggtgtccaaagtcccaggctgtgtatcagaagttccagttgttgggtgacctgatcgccctccagctgatgtcccctctgctgcactcctgccaggctctggagtcagaaggacccaggtccagtctcccctttgccttttactggccaggagtgcatgggtggccctttccttgttccctgtccatttcctttctcttatctgtaaaataaggaatgaggaggattcctgcttcagagtgagaattaaagggcccccaagaacgagamctggcatacagtaggtacatggtaagtagcagtcatagatttctgaaaagggatctttgagcttctgcaaaggcaattcttagcccccgtcctgtagaaagctctcttgtctcagtaggatccctcctactggatctgtcccaggaccagatgaaccaaccagctttagtatctcccagactctaggcaracaaagccccttccaactgctaccttgtttctttgctgccttttcccacacacattttggaaagagttttctctgttcccatggtattacctctcattctttccctaattcactctaactggactcctctcttccccctccctccctccttcctaccttcctgtcaaaaatcagtgatagcttgtttccccatctgccttgactcagagctcacgcaccagcagggcccccttccctctggagagccagactctcctggggtcctcccacctcactgactgcttgctcgcagactcctttgcagattcctcctccccacgtgacttctaaatagctgagtgtgagggcaggcatggtggctcacacctgtaatcccagcattttgggaggccraggcaggcggatcacttgaagtcaggagttcgagagcagcctgaccaacatggtgataccccatctctactaaaaatacaaaaattagctgggcatggtggcgcgttcctgtaatcccagctacttgggtggctgaggcacgagaatcgstagaacccgggagrtggagattgcagtgagccgagattgtgccactgcactccagcctgggtgacagagcaagactgtctcaaaaaaaaaaaaaaaaaaagccgagtgtgaatgtctctgtcaacccatcttcttggatgatgtctgttctagttacagtggctgtgtaacaaactaccccgaaccttagtagcttaaagcaacaactggtttctwtcatcttgtgattctatgggtcaggaattctggcagggctgggctgggtggtttgtctgctctatgtggcattgatggaggctgcttagtggaacttagtggtggatgggctgaactgggggctccatgatgccttcactggcacctcggtggggagkgctggaaggttgggtttagctgggactgtcatttggagcacccacgtgtggcctcttcaatatgacagtcttgggatagttagattttctacctggcagctggctccactagagcaagagttctaagaggcctggggggaagctgcaaggtgtgtcatgatctagtctcagagtcactgttgaaatgtcactaaaaatgactcagattcaagaggaggaggttagactctacctttgaatgggaggagtagcaaaaattggtggccttctttcatttaccacaacgtctcaaaatcctgtggatcttaaatacccayatatgttagtgtctccaggtgtagcctcttctccagtgagctccaggcctgagttccttgattcctctctttaaatgtttaataggatctcacaaattcttgtcccctacttatttctacastgatctccccaactcagtaaycagtaccaccatctgccagtcactcattctaagcttggatcctcctttcttatttatttattttgacttttttccttttttttttttttgagatgcagtctcactstgtctcccaggctggagtgcaatggcgcgatctaggctcactgcaacctctgcctcccaggttcaagcgattctcctgcctcagcctccggagtagctgggattataggcacctaccascacacccagctaatttttgtatttttagtagagacggggtttcaccatgttggccaggctggtcttggactccggacctcaggtgatccacccgcctcagcctcccaaagtgctgggattacaggcgtgagccactgtgcctggccttttttccctaatttttatcctgcctaccacctcccatcatctccacgaccaagtcccctagccgctcgcaaaccctccctctacactgcccgcaggtgtagctgccgcttccctcgaccaccctctccaactggcaccaccctgtcccttctcacacacgtggagtccttcagcaagacctgttgcttctacctcccaaatacatcctggctccacctctctgcccagccagccctctcccctgactgcagtggcccgctgagcagtctgcctgctgcttctctccatcctaaagttcacctccacacagcagcagagtgatcttacaaygcaggccagaccaccaccctmccctacagcctccagttcttcccctcacacttggagtaaaatccaagctccactgggacatacaagaccttaggggatggggcagagtctgctctctgcatttcttaggtccttctgtcccaacacgtccctgttcttcctctgacagccggtccctgcgcttccttggggtttttgcactstctgttctcttgycygcaaccctgcacagtcttgtgcaattgctccttctcatcattccttcagatcctagccaggaagcctcyttgattacacagcctaaagaagctcctccctgtccaccaccttctttctgttacatcccgttttttctttctcatagcacttttccctcttcttgttcctcttttgtttattgtctgttcatgtgagaagacactatgtctgtttaaggttttcccagcaccttttttttttttttttttttttgagacggagttttgttcttgttgcccaggctggagtacaatggtgcgacctcggctcactgcaacctccacctcctgggttcaagcaattctcctgcctcagcctcccaagtagctgggattacaggaatgcaccatcacgcctggctaattttgtatctttagtagagacggggtttctccattttggtcagactggtctccagctcccaacctcaggtgatccactcacttcggcctctgaaagtgctgggattacaggcgtgagccaccatgcctcyggcccccagcacctttatcttttggcagaggctggggggcccagtgtggactgaacttcatgggagtttttagatttattttttatttttattttattttttaaaagacagggtctcactctattgcctagcctggagtgcagtgatgtgatcatagctcatcgtaaccttgaactcctggctcaagtgatcctcccacctcagccttccgagtggctggggtgtggctaaaaactttttcttttaccagactgggcaacatggcaagaccccatctgtgtaaaaaataaaaaattaaaattagctgggcatggtggcmcccgtctgtagtcccagcaacttgggatgctgaggtgggaggattacttgagcctgggaggtcaaggctgcagtgagccaagattaagccactgcattccagcctgggcaatagacagagcaagactctctcgaaaaaaaaaaaawaattttttttttttttgtagagatgggatcttgctctcttgcccaagttggtctcaaacgcctggcttcaagcaatcctcctgcctcagcctcccaaagtgctgggattacaggcatgagccactgtgtctggcagtgggagtttttaaaaagatttatgttgattcccagctagaatcggccccttcctaaccttgtccacccctttggggtcttggttttacactttactaggcctctttctgtcctctaatccagccagcctttggatttgcagccagaggcctgacacccaggccacacgcagcctggccccctcactgtccctcmgacggcctggttgtcatcctgagccactccttgttccctctgttttccccttcacaggactgggcctcatgctgcctgccaaatgccagtcttgggctgtctcctccctgccactgagtcattccttcccgaaatgcacycccttcaccccccaacccctcaccacagggtgaagccttcaacagccacagggtgcccatttggttacagcaggaattkttattgttgagtgtgtggacagatgaaataataaggctgttttcccrtaaacaactattaagctggagccaccccagcatgcatacaacttaaaaaagtgatagcaacagaaaagcttaaatgcaggttgatagaatgagtctttttcattttcatctgcttggttttaagtttatgtgttacaacctttcaagtggtcatctaggaccaggtgtctcttcaggtaagccatttgatcacatgttgaatggagcaggtacatgtggtacttaattggagacagctcccaggttccattgaacacatatttactgagcacttacaatgttctgggtctatgcaaatgcaaattttgtccattcctaacccagtggtctgctcctgtgtgcccagcatgccttgttctcagtgaacccgagctgctttctagtgactgttgccttctattccaataatccatttccctcatgaggtgtcttgagcctctcgagggcctacaaaatgcaaaggcttcccagcagttgtggagtctggttagaccatatgtgggcgtctgcgggaggcttcgtagagtgccacagactctgtcctattccacatcttgattcttggttgaaatgaaccacaaaccaatgaattctgtcttggtagagagaggatgtgttcaactggcagtgccaggagggaaagcagatgccattgtcatagcccagggctgaaaggctccatctgacccccactgctctgcaaaggccatctggccagtcacagcacttacccttgggacctgtttaggcccttcctcactagaatggttttctgggtctttctacaacaccttgccctttttattttttgagacagagtctcgctgtcacccaggctggactacagtggagtgatctcagctcactacaacctccacctcctgggttcaagcgattctcctgcctcagcctcccaaagtgctggctgggattacaggcatgagccaccgtgcctggcctyttttttttttgagacagagtctcgccctgttgcccaggttggatggagtacagcagcaagatcttggctcattgtgacctctacctcccaggttcaagcgactctcctgcctcagcctaccgagtagctgggattacaggcacccgccaccacacccagctaatttttttgtatttttagtaatgacagagtttcaccatgttggccagcctggtctcaaactcctggcctcaagtgatctgcctgcctcggcctcccaaagtgctgggattacaggcctgccttggctttttaacaacatgaaggcacttcctatgagtcagatcctgttctaagcactttacatgtataatctcattgaatcccaattatgatattctctctctcttttttttttttttttaaagagacagggtctcactctgtcacccaggctgggtaactatgatattcttattcccatttgacagatgtggatatggaggttcagaatggctcaagtaaaatggcttcgggttatctagccagacagtctgaagcccttgggccttgctgtcctctttgccagcccccatgccttcctgtttctttcttctctctttctcttcacccttctgattatttcaataaaccttcttgtaggctcaaattcctctgagacagtgtaggaaaatatggggatgggagtggaattggaacaggtctgatagggctactttgcagccagagagcttgaggctgaaggcagyatctggagtgtggatggtgccgcgtagagagttgctggcacacctgctgagctcagctgcctctgccagagactagattgtgctcagctctggacctcctaatgcccagatttggcagcttgggccttagaagcagcaccacaggttcctctgctaagccttgttctgagacctgctctgcaacacctgcagtgtaagggcactccttcagtgagtaaaatcacagctcctctcccacctctctgctccgctcaggaatgttttcttgaacactcctgggaaaatgaaaatgttgttatgttgtgcaaggggaagctgggtaaggtgggaagaagagagccagaggatagcaggcctgggcaggcaggagggccctgggaaccatctggggccttggggtagtgagggggatgctgagtggggaggtgctgctgggggagctgggagaaggggccccactttctggggaggaagaggacatcatccccagcaggaagggcccrcaggaccctggagcagccgctggggccttgaaggggcccactgggctgctggtttcctggggcaggaagtcctggctgcagccagaatttggccaggggagggcagctcaggcaggaggaaggtgcacagtgggggaggtctggagcctgtcctcccttcctgctcgcctctcttctgcttgctctgttccctgccagcctctgtttttctctcgctctgacctctgcattgttccttccctcctgtctttgacgcctttcctttctctctctctgactctggtttcttctcctttccctctgctctctctcattctctctctcttgctctcctgaaggggaattgtgatgcctgtagctgctgtgcccagctccagggtaaacagagttgcttgcaggatggtagggcccgggtccattgcctggccacctgttgccatggtgacccagaggcagcacaggcagcagccttggctgtctggcaggtagggcaggggtctgaggaggggaagaggccgggtctgtccttcacagccccagaatggcccaccccaccgtcaggssctgtggcatgggggtgactgcctgtgaacatgggttctgtactgggtgctgtcaaagcagctcccctgagggggggggtcacacggaaagggcgggtcattcatacttggggtcagactcagactgcctgtgttctaatcgcttctggccacttttgtggtctgctggaggtagagggtgggaggtggcaaatagccccaagggaggaagccacagggaggcagctagtgagtgggacatagggaagaacaggcagatttgctctttagcagaagggtctcccttggaagggagtgagccctctgcttctgggagcaaacaagctcatgctggacagccaccagaggcagtgtggcgggctgagatttctgcacctgagagaggcctgtctagctgaacctgaggtttcctcccactctgagagctgagaatttataaagtacagttttcagctccctgagagtttgcaatttcctcactgacagtggcccagtgggacagtgttctggaaagtgccttgaccctggaccatgctggaaaagggtactgacaccatcackgcctcctgcagaggacataagggtagacagggaggggagcttcttggaagtcctggctccaggtatgggtcctggcctagcatgtctggttaaggaagagccggtggatgtcacagatgcctgggatgcagcagcaactgtcctgcctgccagatgagagagaagcagttgtacaaagtggtcaagcagtcttagcttttgcggtaagcagacttgggttgatgtctcagctctgccctttcctggckgtgtgattttgtgtgcatatatgtgcaagttaccttttctgagactttgtttccccatctgtaaaatgggaataataacaacattcaggtattaaggctgtgtgatgattaaaagagataatgtgtaaaaatattcagtacaggctgggcacagtggctcacgcctgtaatcccagcactttgggaggccaaggcaggaggatcacttgaggctaggagttcgagatcaccctggccaacatggtgaaaccccatctctactaaaaatacaaaaagtatccaggcatggtggcacacacctgtaatcccagctacttgggaggcagaggcaggagaatagcttgaaccccggaggtggaggttgcagtgagccaagatcacaccrctgcattccagcctgggtgacagagtgaaactctctcaaaagaaataaaaaaatgtggctgggcggtgactcacacctgcaatcctagcactttgggaggccgaggcaggtggattacctgaggtcaggagtttgagaccagcctgatgaacatggtgaaaacccgtctctactaaatacaaaaaattagccgggcgtgatggcgcatgcctgtaatcccagctactcaggaggctgtggcaggagaatcgcttgaacccaggaggtggaggttgtggtgagccaagattgtgccattgcactccagcctgggcaacaagagcgaaactccatctcaaaaaaaaaaaaaaaaaatagttcattacagtgcttggccacattaattaaatatacaaggaagaatgattgttctcaatcttacctgccgcccaccactttcggttttataaactgaggaagctgagtccggagaggttgaaacacttgctcctgttaggttgttagttttgggcataaggcagggacagcgcccaaacaatacggaggagctgaaccccggcccacccagcctggcccctgtcctgcaggttcctgtccatctgcacacagggtcagactctgctcacactctgcagcccagctgcccctcggtgtagcagatctcctagggaacttcatgttcagcggctgtctccctatctagaccttggctctgtgagggcgcggctcaggcttgcccacgctccccactccctgcaggcctgactcagtctctcagtaagtgctggcataaaaggaaggcaggaccatggcaacttacaaagctgttcatgtgttccctcctttgcacctcacaacaatctacaragtatttgggattcccattttacagatgaggaaaccggtctgtggggggtgctcacttgttgaatgaatgaatggagagaggggaagcaagttgcccagagacctccccatcatccccaccccgctccctgtactgagggtggggccgggattcaaatgcaatctacctgtctcaagaacccactgtccaccagcaaaccctctttccacatttctgtttcccaaagtgagaacaaacgctgctagagtctggttgtttaggaaagacaagtccccatccagcccagctgctgcatcctctccagcctccttgacaccgcttcctcacacgtgcacaaaactgcacagttagccaggtgcctttagcttctctcctttcatccacatgcagcaattcatggagctgggtgggagtgcttgtctttctttaaccaaggaggaaacagcttctcaataacttgcccaaagtctgcctaactaagccctttgactgaagaccttagacagagagccccctggggctcagtttctccacccatacaagcaagcaggtgtcttcaaagccctattcacctcgtggtgccgaggaaagggctgtgctcgagctctggctgggcaccttaggcaggacttgagatgtctctgagtgcgggatccctatgtacctcaccagtgatagcacctcacatatttgcttatgggtcaaatgagatgtgaatgggaaagcattcaggaaatgccctccctactcccccaggcccctggtggtcacctctgggacaggggcaattctcaagatgacccrcagagggtaggtgtcagatttcagacaaggttatttttacccttgggggtggagggaggcaggtgacatttggactgacagttctagaatggggtgagggggcagggatgggagcagggcctctagcggagaaccttgtctgacctcaaggtccatattctccctgcctgtgtggggtgacactagggagaattcggaacgcactgaaaaaaatctcatgcatttggtccacagcgagccaggctctgtcccctctgggccctggagataccagaagtagaaagagtttctgcatwgtagatcttcatggtctggtgtcaatcaaattctcccacaattaattgaaccttgtcacaatggagagcactgcagaagygaggtacacgggtgcccggggtgctgagggataaggagcattacagagatggcggagcaggacaagtgttccaggcagagggagtggcacgggcaaaggcccagtgctgggagatggcaagctgcacatgaggacctgaaagaaagccagtgtgactgggtcacgccatggtgctatataggaccacaaggttcatgtctgttgtgtgtgcagtaatggagcaatgcaccaaaacagcaggaactgaggcagagaaagtttcataatcaaaaggcagccaaacaaggaggtgggagagaacctcaaatccacctccctggggagtttctcagactggggtttttaagggaatttgaaggagctgggggttgctgattggccgaggagtgaggggtggagtcatgggacagggagaggaagaaactacattcttgtgttgagttgyctctttggaaggaggctttagactgacaggtgttggtggacccactgaaatgcaggatttggggccgggtgcagtggctcacgcctataatcccagcactttgggaggctgagrtgggcagatggcttgagstcaggagctccagaccagcctkggcaacaaaaaattagctgggtggcacrtgcctgtggtcccagcaactctggaggctgaggtgggaggatcactggagcctgggaggtggaggctgcagtgagctgaggtcacccccactgcactccagcytaggtgacagagcaagatctwaaaaaaaaaaaaaaaaaaaaagcaaagcagaattttgtaaatatctcaaaatagaaaccttgaggtttttttaatgttaaagatgttatctggaaaagttaggaccctgtggcaggggctgtgtgacttttaagcaataagcagctataagaaagtgggmtatagggcaagccggttaatgcttagctatgcttttacttacagcttatgcttttgttaaaaacttagcaatttagcttgattaattttgtgaggatggcttcagtgtgagcgagactggaggtgtgggcgagactggaggtgtgggcaggggtggcccatgaagggcctcagagaccttgttaataaggagttcttcctataagccaaaccctttcaggattggaaagaatcttggagactctctggttaaatgccccatttgacagatgaggaaactaaggcccagacatctaataataaaactcacctttttataatcayttaccatgtgccagagatcaggctatacastctgctttctgctttcaccatatcttccccttaaaatatagctggcatttcacatcttatttaatttaaattagcagaytgacttgatttttgccaaagatgttttctctcaataattaaaaaaaattaattattgaagtaaaattcacataatgtaaacttaaccattttaaagtgaccagttccatggtttttggcacattcacggtgttgtacaaccaccacctctgtctagctctgaaaatttccatcacactaaagtactacaatcccttactcattaggtagtttttccccattccctctgcccccagccccggcaaccaccaatcagctttttgtttctatagatttatccgctaatatggatacatacaatatgtgactttttgtktctggtatgtttcacttagtatatctttttgaaattcatctatgttttagcatgtatcagtacttcatttatgtttatgtctgaataaccattcatttgataaagatacatatacagatatacatatatatctatatacatacatatatattacaatttattcatttattaatggatatatattcatttattaatggatatttgagctgtttctaccttttgcytgctgtgaatagtgctgctatgaacrtgtatgtgcatgtatttgtacttgttttagttcttttgggtatataactaggagtggaattgctgggtcatatggtatttcyrtgtttaactttttgaagaactgctaaactgtttttcatggcgactcaaccattttacattcccaccagtaatgtacacaggtcccgtgaatttcctggcagcaggcccaggccagagacctcacatgactgtgaggctggagcaaagccgcttgtgcgctgccccatgcagctctggtcctgttcctccttccaagtttttcagtaccaaaaagccctgtgtactggcttttctcccattctacatgtccttggttccttaggatccctctcggggctgcatgagccaggcaccaggggtcatgatgcttccccctacccaggctgtgcagggagagctctcaccttcctttgacacttagaagtcctgtgtcaatagtgccagttctatgagtgaggctgtcacatatgcagactcctttctgacccccataccaaggaagatgccaaagtgacaaggggaacaaacacattggcctggctgtgcttgctgcccgttaagaatctggctcagcctcagcctggtgaccctaaacagcaatggcagggtctgggtcagcaagacacagctctctccatgcaatgttggaatgagtgtctccagtctcttattgctgatgggaaccttgtgaaaggacctgcatctcctggacaaaccaagacacctatggcagtgcaggccccaccccctgaaaagcatcacactacttgactgactgaccacgccagcactatggataaacctcaagccttttaggttaactcctgtctgccacagattctcaggaaaagagatcatctttctaaatgcagattcacaggcagatgacagtccatgacctgaataacctcttagtgaagattttcagattctgctccacattctgggatgcttaccagggcttcagatttaggaggagaaagtttattttattttattttatttttattatgacctctatccaggcctcctttccttgcatgcaaaatcagtgtgatagaaaggagaatgaacaacaagcatattgtggtattagtgaaagaagcacctaccatttggaagcccaaagaggaatgtttatttttttaatttttatttttacttgtaaaaataaaatatttaatttatgatcttgaaaaaaaaaagaattgctagggtaatacgtatgagaactgctagcataggacctgagacttagtaggcattcaataactgttcmccaaatgaatacatataggagatgcttcataaaaatattggttcaattctctacctttccaactcccaaatcttgaagaatgtcaagtgtgaacacacttagtagctaaaggaaaattaagatgtttgataggacattgggaccatcgtttgtcttctagaatgaagatatgatctgatattgtatgacaatcagaagcctgaggaacagcctcctggtatccttcctcccagccctggggctagctttgaggacgtatgctccctattttacccatgagtttgctgcccaccactactaccctttttttttcttgtctgctgggaacctcaaggccyatgcagctctctttggcagcatctggattcctaacaatcctctcctctcttatttggttccttaactttatttgtttgtattttggttcctagtgcacrtgcatcctgtgtgtgtcccgggtatgtgtgtaggctgcctcagagccttttttgggaagaaggcagggaataggccaaaagaggagctttggaatgttgacaggcaggaatactcctgccttgytggtggggaaagcaccaggaggctgcccttgggtttctctgagaggctgggggagagggaaggggctggggccacctttgtggggacagagcatggaatttagtcagctccctcatactgcttagagtgacctggttcagacaatggggcctttcatggggcctggcccacaactctggagtgggtgcaaggcctcttctccctgcccgcccctggggcccaccttccagtaccttgtgagaggcaggggcgggagagtgggaggaacaggggctttgcagttttgcaccctgggtttgaagccctgctccataatcactggctttttgaattctcacagaacctctcaaacaagctcgtaatcttgccctgcacagggttgctgtgagactctggagagctcatgggtagaaagcactgtggaaacagtccactttgaactatgtttgggtccctcccagctgtatttctgtagaaagcaccaactttataatgctaatagtaagcactcaatacatgttagccacagggtayatgtgtgccaggagcttcatatacttggtgttgtttaatttcctccctatgatgattcttggaagtgagtataataatcccatttttatagacaggaaaccgagacccatagaggtgtagcagcttgctcaaggttatcaacgttagttgtggaattggacttgaacccaagctaggctgacccccaaggcctgtgcacagcctgtgtcagggtgggttactccagaggtcamccaggcgtgctcttccccttcagggcaggtaggtctcctttgcaccaggcctrttgctccagttggggtctgcaggcactgtgatctcagctggcttatcactttaggkcataccttctccagaagtcttccatcgtttytggggacttcttggcctggcccccmagcccctcttcctctgtctccacccatccaggtatgtagagcattttcccacctgctctcatttgccccagtgttcacatcacctgaaccctttgccctgacattcctgtcacctgaaccacagccgttctgtttctcctttttgctgttccttatggcctctctgtacctcagaccttcctcccactgtgagtctcagctctcagaccattagtcttttcctttctctcttccatgggcatttatttagccccaaatctgtgccaggcacgtgtccctgtcccgtggaagcatctrtctgatgggggtggcaactgtgaggacagtgactacccagcttggtcagtgccrtgatggagatggtgaggctgcaggggcattctaactctccctggggaagagagatgcaggatgaggaagagctcacctagcagacaggygcagataaacggattctaggtggaagtggcaccttcatgttgggggaagacagcgggagtgagagtggtgctctaaggaaacgtatatggtctggagctgagagtggctgctggrgtgagtggcaggagctacggtggctggttcttgatcctgagagcagtggggagccatcgaagagtcctgagcaggggaagtgcctggtgaggcttgctctttagaaaggtctatgtgctcctaaggggcagagcaaagtcccatggtgggtggagttatgaggaccaggtctccccgaaaggaaggtagttgttgagttggatttgctttttggaaagatccctctggtgctgtgtggaggctggaaggagttagatcagaggcctgtttaaggtcggatcattgggacttggatactgggcagagggaggaaaccaaggtgaagccttgggcctgtttccagccccagtagcctgtgggcccagtagcctgtgggtctgttgtcaacttgcctagaaggagccgtggcccagcagggcttatattggcccccgcagctgggtggccctgggccagcttttccctctgtgccttagtcccccaggctgtgaacggattgggtgagggggtctctcctgccctgaccctgcaggtctgtgacatgactctggctcaggaggagggacacagagcccatggtgtggctagctggggcctagtctagcattatcaagtctggccaggtctgccagggcctggggccagcacttggcacagctgctgtctgagagggcacatctccgacctctgggtgtcctcctacccttgcagtggttcagcccccgccaccctggtagctctcttrgctcggcctgcctggctgcccaggccctgactctatccagggcctctcctctccctatgactggccctgggaggagtggcccagctctggagccccattggccaaaacttgcctgggctgcacacacccctgcctcccagactggctgcctgcccaccttgggactaggaggcctggcctggcatgccctaatgtgggcagactgccttggagcccaaggaaggagtggagtctgaaaggctatgcctggggccacctgctgctctgtccctgctgcctgtgctccagcccacggcttctgcgcccctctctttgaggggagtggtggggatagcaactgcgaggcttgtctctcagtgtgcttcaggggccctgcttagaggagcacagtatttccattctgacagggttctagagcttcctccctgggaatctcagctgggtatgcaaatcccaggctgagttaggccctggactcctggaaccaggggtactttagggactggcaattctctgtcctacttggtgagtgacagatgtggcttgggaagggggagaccctgctcaggatcacacagcacttgagggacacaggtagaatttgaactcaagtccgtctctgtttgtccctccacaaacctttgacgatgtcctcctgtgtgccaggcccctctaggcccaatttgtctttgtattctctatctttgcccagggccccgtacagaggaagtgtttggtgaatgaacaaatgaacaaatgaaccagtgagcaaggcacaggtcctggctcccgtggcatagggtccaacaggaaggtagggactcctgattcacagaacaggaaacgggagtgcatgggaggaggggttgaccaggtgagaagcagagagaggaccagagcttaggtatcatgactgctggtccaggactgtgcccgtgttcccttgttggtgaaatgggtcaatagttcttgccctcgtcctcgtgagggctcagagaagtggcggacgtgcccaggctggtaaagcgggggtgctgtgtgtcggcgtccctgtgtgtgtgtccagactgcccagaaaccccaggcagtctgccccttttgttctgccccttttgttctgcccagttgccctctgcaagtgggcattgtctccccatttcctcagctctccctagggcttctttctggaatttcttcccaatacccctggctatgggaggggtttgggaagagtgtggacgaatggagtcctgcctaccacctccctctacccactcccacaccccgaaagccagccacccrtatccatgcaggcycccagcgcacaaccaagcgggaagtgccttggcagtggttaccatggcgatgggtcctgctgcttggacaacatcggccttccagctacctgtgagagcccgcaagccaggcagcctggcaccctgcaggcctccaccctggctgagagctcctgggatggctgtcttcctgcctccccttggtgcccagcctcctacccaggggctcttgggaataagccgtgtttctgsgaacccataagccgttctgggtcagacaggcctggttcaaatcctggctgtaccacatgggggtcagtgactttgaacaagccacctcggwgtgcttgaaattgaattagctatgggaggctcactggggggaattatctaaggagtatacaccaggtgcaagagctaccactgccagcatcctgcagccgtggcaggctcaccattggggcatgctgctctttgccactacagccaagcccaggtccctggactcctcatctcagccccaggaggccctgcaagcagtgtagtgtcgggggtaggagctcaggctgcagcagacctctggrgtcacagctgagctttgtcacttacttgggctcctcatctgtaggataaggataataaggcatctgtctcataggtttgttgggaggataaaattkratdagtacaaataaagtacttgtaaaattatgtgacacctaagtgccatataaacattagtggcgactgtcatcaccaccacacaattggcattggccatgagaatcggaacccatatgcctgtccctcctcatttttctcacacatgcaggtgtgcccagctcttgagctcatggtctgcttagggatggcaggctgctagcccctttcctcttcctcccttccaaaggactgatgggcacaccccacctcttctgcttggagagtaagacatgctggttccaagcagaaaccccagctctaattcattagttggagaattttctcagccagttttccagctggcagctgttgtacccagccctggatcagacagctggtctgtgactgcccacagccctcccagtcaatagatccaagtgctagacattagcgggccacagaggctgtcctgatggcctctgaagatggagggagcccaagaaaggagccctttggggatgaaatcagagcggcttcttgaaacactgtattaggaacagttccctgggcttgactgctatggagctctctaggcctccctgcatagagaggsactctttccagaatgaacgtaaatctaaggcaacactttaaacagttggcccaggagctgaagcaaggaggactgacttctctgcmtggttttgtctccactggcccactcgggtgcaaggccgtgttcatgtgcagttcttggccaraaggaaactgggcagaagcagcaatcacagatatcctggggtccgagaccacgggctggagggtggtgaccactctcgggttggggtctggtgggaggtggccctaggtactctctctcccccagaccctaagttctcagggctggacagacctgggagaccctgcagcaagcagacctctctgtccccacctgtccccacctgtaccccagggcttggcctctgtgttctccaaccrcacatcccggaagtcagccttacgtgcggggaacgacagtgccatggcagayggcgagggataccggaaccccacggaggtgcagatgagccagctggtgctgccctgccacaccaaccaacgtggtgagctgagcgtcgggcagctgctcaagtggattgacaccacggcttgcctgtccggtaaggctgcgctccccatggttccctacctgccccacaggcccagagcaggggccgtgctttcagagatggtcaccgtccaccctaagtgccacacttgtttctcatcttggcctttgctcatgctggtccctttgtctgaaatgcccttcctgatgtctcaatgctcagcacagcccacttttctctcactcagaccccttcagccctgagtgttggtcccaggccctaagtccctgcctcaacacagtgcagccttccacatggctgcttcagattggcttggagatgctgttgagcaaagcccctgactgcctgccctgcagcgctccttcccttgagttgaggtgcgctggactgagcccatttcattccttttgttgcaccggtgttctccaacctacagcgctcacagcctggtagggtggggatgggggatagacaggtgacccgactgttccccagcactgtttcagaggccctgacccaggcctgggggcagggaagggatgcctgaggggctaaggcacctgagtggagtcctgagggtgagtgagaatgactcaggcagggaacaggtggttgaagggacgggggctccagaaggccgggaagcaggccagtgtggtgtgatcactcattcaacagctacttactgagtgtgtactatgtgccaggcactgttccaggactgrggtacagcaatgaacaagacaggcaaaaatccttgtcctcaagtaatttacaatctagtgggagggagagacagtagacagacgaaaagcagatatacagaagatggtcggggtggtgcccayggtgaggggtgtaaggaatggtggcagcagggtgtggtgggagttgtggccttggcttgggcggctggagaagcctcctgaggaggtgccatctgagcagaggcctgtgatcgggggaggctgctaatgtctggctttcttctgctgacaccagcggagaggcacgctggctgcccctgtgtcacagcttccatggatgacatctattttgagcacaccattaggtaagtggcccctcctgcctcaaggtcctctgggctccctcccatcagcctggggcctgtcctcctgactccctgcctggtcagcrtctgtgctgcctagagcctgactcaactgactgaaaatgaggtgggggcagcctctggggaagtgtgaacccctctgcagtgtttctgggggctaggagttgacctgctgttctgtgcagtgggtgggtgggtgggtgttccctcagccagggtgtggccgagatagcatagtggggtgctgcgtgactttggggaagtcagtctctctctctgagcctcagttttctcatctgcmgaatggatggggttagacttaatcattgagtgcctttttgagcttggacattctctttgggtccttggtcattgggctgtagggaggccccyyagacaaggtgccttggcaaagtcggagccagaagcttgrgccattcaacctctgctcacatccttccagggatgaggarctcgttacctcattactaaagtagacttttttttttttttctttttttttggagatggagtctccctctgtcacccaggctggagtacaatgacacgatcttggttcactgcaatctctgcctcctgagtttaagcaattcttgtgcctcagcctcacgagtagctgggattacaggtgcctgcyacaaggcccggctaatttttttgtatttttagtagagacggggtttcgccatgttggccaggctggtctcgatctcctgatcttaggtgatccacctgccctcgcctcccaaagtgctgggattacgggtgtgagccaccacacctggccttttcttttcttttctttyttttaatggctgtacagaatagaagaatattcatcacacgcactgggctttgcctccccatagctttgcccatagatcctgcttctgggatccaaggagcaggctgagccctcagcccaggacaggctgcagggccacacacagagctcttgtctctgggcctgatcctaaactcaccagcactagctaggacatcaagtgccaagggcttattcaggactcactgggtgctcagtgtgtcaccattaaggaagaagattggccagtccctgtactcactcattcagtcatcagtcattccctcaccacacacttaatattagatgagcaccttttccagaccagaggccttgctgagactgggcatgcaaagtccactggagcacagcctcttccgcggacctcccagtcttcaggggaggcagatgtaggaacgtcattcaattcgcagtgagaagttctgtgcaataatgggctctgggccaggcatggtagctcacgcctgtaatctcagcactttggggggcctacgcgggtggatcacgaggtcaggagttcaagaccagcctggccaacatggtgaaaccctgtctctactgaaaatacaaaaaattagccgggcgtggtggggagcacctgtaatcccagctactcgggaggctgaggcagagaattgcttgaacccaggaggcagaggttgtggtgagctgaggtcgcaccactgcactccagcctgccaacctgggcaagagagcgagcctccatctcaaaaaagaaaaaggctctggtttgtaatcctttttttttttttttttttttttttttgagacagagtcttgctctgtcacccaggctggagtgcaatgatgtgatgatcttggctcactgcaacctccacctcctgggttcaagtgattctcctgcctcagcctcttgagtagctgggattacaggtgcgtgacaccacacccagctaatttttgtatttttagtagagacggggtttcaccatgttggccaagctggtctcgaactcctggcctcaagtgatctgcctgccttggcctcccaaagtgctgggattacaggcgtgagccaccctgcccagctgctttgtaataccttttattttagaatagttttaaatttataaaaacattgtatctctaaagatagtacaaggccgggcgcagtggcttgtgtccaattccagaactttgggaggccaaggcaggcagattacttgagctcaggagtttgagactagctgggcaacatggcaaaaccctgtctctaccaaaaattagctaggcatggtgatatacgcctgtggtcccagctacttgggaggctgaggtgggaggatcacttgagcctgggaggtggaggttgcagtgagccaggattacaccactgcactccaacctgggtgacacagtgagatcccgtctcaggataaataaaaaaataaaaataaagatagtacagagagttcccatataccccacacccaggtgccccatgattaacatcttacatttgtagggtacctttgtcacaattagtgcaccaatactgatacattattttgatgcctttttaattacgttaacttatttgatcctcaaaacaatactatgtggtcatagctattagtatccttattttacagatgaggaaactgaggcacagagaaatgaagtaccttgttgaaggtggtacagctaatggaggacscaggatatactaccaggcaggcaatctgggcccagagcccttgctcttaaccaatgggctgtatttcctgtatgtctgggggtaggtgtcgtggcactgagggtagtcaaggggggacttcctggaggacgcatttgagctgccagtactgtcagctctgtgtatagtgatactttgaagccagtggagctgtgtctgggccagctccaggtccctgtagccaacacaagttcttttacttaggggagcaaggaatagagagggttaggggtacatgcatgatggctggacctgctgcagggctcagcagagtgaaggtgaatctgggcagaggaggctrtggktggaagggaaagccagagaggatgccgggaaggaggacaagctggggaggggcctggagcatggttggtggccagggaaggcctggacacacctgaggaaagattaagaagtttttttgtttgtttatttctgcttttgccacttaagaatatttccaaatgtatccctaagggctaataactctttttatatttatttatttatttattgagatgatctgtctcccaggccggagtgcagtggtgcaattttggctcactgcaacctctgcctcccaggttcaagcaattctcctgtctaarcctcccgagtaggtgggattacaggtgccggcaaccaagctgggctaatttttgtatttttattagagatggggtttcaccatattgatcaggctggtcttgaattcctgacctcaggtgatctgcttaccttggcctcccaaagtgatgggattacaggtgtgagccaccatgcctggcccttttttttttttttttttttkagagaaggattctttttaaacacaacatcattaccacatctaaaaaattaacaataatttttcactaacgtcactagtcagtgttcaaatgcccaaactgtctcatgaatttgtttttattttgtttgctttgcagttatttattttttcaagatggagtcttgctctgttgcccaggctggggtgcagtggcaccatcatagctcactgcagccctgaacttatgggctcaagcgatccttccaccttagcctccctagtagctgggactacagacatgtggcaccatacctggctaattaaattttgtattattattttgtttttttgtagagatgaggtctcgctatgttgaccaggctggtctcaaattcctagcttcaagtgatcctcccacctctgccttctaaagcattaagataacaagcatgagccaccacacccagcctgcagttattttgttattcaagtcaggatgcaaataattgtaattggttgcttctctatagggaggccgaggtggacagatcatgagatcataagatccagaccatcctggctaacacggtgaaaccccgtctctactaaaaatacaaaaaattcgccgggcatggtggcaagcgcctgtagtcccagctactccggaggctaaggcaggagaatggcatgaacccaggaggcagagcttgcagtgagccgagatagtgccatagcactccagcctgggcaatagagcragactctgtctcaaaaaaaaaaaaacaaaaaaacccaaaaactctgtagatacccaccaatcctccaccagctctctggcaccgtctctctctctcaaaatatatttgttgaggaaagctggccatgtgccctctagagtccttcatcacctgggtttgctatttgaatttctgtggtgcaattaacatgttcctctgtctcctgagagtaaattggtgtagggaaggtctcgatgggggtcagatttgttcatggggggtcgcttgtctgcgttgtgaagaacacctggaagggtgtccgggagctccggggccctgaggaggctgggcagtggccctggggaaggatccggtttgggccagagctgtggggacagagggcmgtcaggaaggaggaggagcttagaaacccagatgggtgtctgcttggctttgggggaaggtagagagagaaggagggagaggaggaaaaatcacaaattcctctcagcaccacagaaaatagacttttatttttatctgggggaccacagaagttttttgccgtaatttttgatcatgaaaactttcaaacatatagaaaagttgaatagtacaatggtcaccaccactgagacccaataattaacatttttctaaatttgctgtatctatgtatggacaaataaataaatacatatactttttttcttgttaagagacaaagtctcactccgtcacccagcctgggatgcagtggtgcgatcttggctcacggcaacctccgcctcctgggttcaagcggttcttgtgactcagcctcccaagtagctggaattataggtgtgccctaccatgctcagcttatttatttatttattgtatttttagtagagtttcaccatgttggccaggctggtctcgaacatatgagctcaggtgatctgcctgccttggcctccctaaatgctgggattacagacataatatatacactttctctctctctctctgctaaacgatttgaaagtgagttgcagacatcgtgatgcttcatccgtcactatgtcagcatgaatctcctaaaaatgaccctcccctccgtgaccattagtattactaaaaaaatgaacaggaatcaacaaatgtctggcaaatgtgagcttgtggtatttattgagctccggctgtgggccaggcctggcgcttggctcagtcccattctctctcacttgaccctcagaaccacaggcagtactttacacagaaggaaatggactcagagaggcaaagtgactcacccaaggtcacacagctctgtagtgtgatggttaaggtggagcttgactggaacccaggcctgtgtggccattcccactgtgttcacggtggccccttgaccagcaggccccttggaatggacccttcctaggcttggccagaagactgtgtcatttgagaaagaagttggcatggcactctccatgttcatgagccaaggcccagagaagtgaaaggacctgctggagatcacacagcaattgaacagggccggcctttagcctcctgcccctcctccccacagtccatcagctgggcaccctctgccccctccattaggcacagcccaggctaggtggctcccctggggattcatatggatgtgggaatcattccaggaggacaggctgcagctgggaaaagaggggctggtgcagtcaacagagtcagtctagaagtctggctctgccactttttagcttggtgaccttgggcaaatgacttaacctctctgatgctcagtttctcctaaacctacctgccaagcttattctgaggttccaatggcagtgcacagtgcctggcacctagcaggcattctttaaacatttccttttctcatcttgccctttgtttatagcatcttgcccttacyaggcattcaatacatgtagaatgcattaattcagtcagctaccctttatgggagacccaccctgtgccatgtgctaggccttggagagtcaatggggagcaaaaccatgacccttaccctagtagagcttaagaactgtgggagacagaggtcactctgccaggagagtgccgcagggtgagcctctgcagggcctctgttggtgggtgggccactgcagggcagcgaggggtcccctgaggaggggaccattgagccgagagcaaaaagaagcacaggcattaattggacaacrgggatcagggaacgggggagcagatgagtgcaatcatgctacttctctcagcctcagcttaaccatctgtaaagtggggtgctgacactatcttgctagctggctttgaggacttggtggtatcgcagatgtgaatatgccctgcaagccatgaagttatcctgccagctccccgcaagagaggctctgcaagtatctgaggcccctgttcctccctctggcccctctggaaggctcacctcctactttcctctccccagtgttggacaagtggtgaatatcaaggccaaggtgaaccgggccttcaactccagcatggaggtgtgtggggtgggcactgcttgggagtgggtgcgtgggtgggtcctctacctcctctctccattcttctccctgcagcccagggccactcacacttgcagggccctgattagagcagcagagttctgtaatggttggcagagcaaggggaatcccaaggatcttcctgtcccaaatcccagaacacagrcaggaaaatcgaggcccaggaggggaagggacttgccccaggtcactgagctacatagattccagtgtgggacttgacttccaggcccytgagtctcacatccagcctcagcagccaggtttttgtgggaatggagggaaggcagcatgagcgcctgatcttggaggaggagctggggcagggagagtgctgggtttccagcccatgagcttgcctcccacagcccgtctcctcatctgcaaaagggaacatgattcctctgtggcagggttggaggactgctggtgatgcccagggttctgtgagctgtgggggagggctctatttcccacctatggacttcaggcccaggcaacttcaccagctgggccagkggttcctgagggagcactgaggctgggtgacatagccctgactatgcctctgggcaccccatgaatgctcaggtacccccaggtgcctgttcttgattttttattttatttttattattgttttgagatgaggtcttactctgtcacccaagctggagtgcagtggtgccatcatakctcactgtaacctcaaactcctgggctttagcaatattcctgcctcagcctcctgagtagctgggactacaggcatgtgccaccacacagctaatttttgtgtgtgtgtggtttttttttttttttttttttgcagagacaggggtctcactgtgttgccctggcttgttttgaactcctggcctcaagtgatcctcccgctgcagcctcccaaaattctagaattacaggccattgagcctggcctatcctttaaatttagccaacattctgcmtgtatgaagccctgttgtagacatagtctcattttaatcctctcaacaatcccacaagggtaggtctgatcactcccactttgtagatgaggaaactgagacccagagaagggaagtgacttgcccaaggtttcccggggacccaagggcagagtcaaaccccccctcagatctctggcctcccagacctggtaggtggtgcagaaactctggaggcctggcctgggctgggacttgctgtctggtggagctgcggggcttctaactggtgagtgcaatgttgttcctcattccttcrcccttactgttcctctccaggtgggcatccaggtggcctcggaggacctgtgctctgagaagcagtggaatgtgtgcaaggccttggccaccttcgtggcccgccgagagatcaccaaggtaactgggtgcgcctggctgctggaacgctgctcagtgacctgggcacctgccatggcgagtctggctcaggggaatgaggttaggggttggcagaggggatggggagggacacagcaggaatccacagctccctgaggaaggcccacccctcattgcattggaatcccccagccccctctcccctcctttccccacctctccctgtgcttctccagcgaagattcttctggtctcaccattctggtctcaccattctgtcacctacagtgacaccccccatcctctgagcctttggccaaggaagggacctgggtgggagctggaggatgaayatgtatcaggtcatcgtggaggcaggaagatggggcaaagagggaggaagccttggaactgagcagcagcccaygcctgctgtgtgctagcctcgggcatggcatggtgctggggacaggcccttgtgctatttcaggagacttgccctgagtgtcccccaccctgtcccctggccracaggtgaagctgaagcagatcacgcygcggacagaagaggagaagatggagcacagtgtggcrgctgagcgccggcgcatgcgccttgtctatgcagacaccatcaaggacctcctggccaactgcgccattcaggrcggtgagcagctgccagctgtgcatggggagggtagctggcgtcctgcatggcccctctgccccgggctcccactgggcagaggcwggaagggaggctccggggacttccacccactggtggccctgggcctctcctagccctcttggctccgaggtctcctccagggaaggggagtgtttgggcytctctaccagctcccaggaaccatgaagctgccgttaggtcatgtggaaatccctttgttggccacaaaacgcatttgggtctccagaagccaaggtgtttgggaagatagtattgagctataacttgaagactgtagaattttttaaaaagcatatatatatgtatgcatctataaaaagcatatataggccgggcgtggtggctcatgcttgtaatcccagcactttgggaggccgaggcgggtggatcacctgaggccaggagttcaagaccagcctggccaacatggtgaaaccccatctctrctaaaaatacaaaattagctgggtgtagtggcgtgcacctgtaatcctagctactctgggggctgaagcaggagaatcgcttggacctgggaggcggagattgcagtgagccgagatcacaccattgcactccagcctaggcaaaaagagtgaaactccatttcaaaataaataaataagtatatagcatatataaaacatgtaaaaagcatatatatatgcttatgtgtatgtgtgtgtatatatgcgtacactcacacacacgtatatatattctcacccctcaaaagataaaataaaaagcaagactcctttctatcccagaatccaggtcgtctccccagaagcatctactattacccattttagggtatctttccagaagtattccctgtatatctaagcatagcatgtattatttagctcctgaaaaggggcattcagtacatactgttttgtatcttgcagtttccccttaaaaatatatcctgggggttgttctataccagtacagaaagatctactttggactgggtgggattttgacagatgggagataaggaagggtttctgacagagggcacagcctgggcaaaggcctagaagggagaccttggacttgtttacttatccccagaatgttcaaatttgagtcttccttgaaaccaaaaggaggcgatcttagaagaaaatctcccyggagtggggagagagcaggcagaactcgccaagcccagaggaagcctcaagctatgccctgagttccatgtgccctggttctactgggcttggaggccggagctggggaggcccagctcttcctacagtcatyaaggcccctttgatccatccatccccttgcagccctcctaaatctcttctgtcctaacagcgctcccacctaagaatcagctcaagtgcctttgcctggcactgggccttctggctggccactcagcttcactgggtactgtctcttgacctgctgcagctcctgttaagccacaggccccattgccctgtgaataccctccccgtcctgtctccagaccttggctcaggccaccctcaacttcccctcctgtctgcccccaccctgtctgtggtctctctgagagcctgcaagccaagccaagggcaatgccagctctttgatggaccctccctgaagaagtctctccatgggagataggagacaaatgacaccaccttgggtttggtggggcatgccagcatctgctgccctgaagcccaggrccccatgcactgcctggcctctcctactaaggatattctaacactgttgctgccaaggataagggaatcaccagggcagaaggcagggaaaaaccatcctttttgagagcatatttactggagtcaagtactttgtgattattattttttttgagacagagtctcactctgttgcccaggctggagtatagtggcgtgatctcggctcactgcaacctctgcctcccaggttcaagtgattctcgtggctcagcctcctgagtagctgggattacaggcactcgccaccatgcccagctaacttttttgtattttagtagagacaaagtttcaccatgttggccaggctggtcttgaactcctggcctcaagggatctaccctccttggcctcccaaagtgctgagattacaggcatgagccattatgtctggccttgagtcaagcactttgtgacaataatcacatttcatcttcaaacagtcctatcgggtcggatttcatgcctgcctttacagatgaggcaaccgaggctcagagggattacttgatttgcccaaggccatacaggcagtctggagtggagctgaggctcagacctgctgtcttrtctcagagctggtgctgcatccactgcactggacaggctcatccctctcatccagggccaccctctgcctcatgtgcactctgtgctgagtaaataaaagaacctgagtggggtagagtggtgggggtcccagggctgcctgtggggaggggctgcccttgggaatgttctcacctccctgcktccctcccttatcccatccctggtcagatctggagagcagagactgtagccgcatrgtgccggctgagaagacccgtgtggagagtgtggagctggtcctgcctccccacgccaatcaccagggcaacacctttgggggccagatcatggcctggatggagaatgtggccaccattgcagccaggtgagggcagggtgtgctgcctctgcctcccctcctttctcstcctcctccccttggctacctccctctggaggggaaaccccagcttggggttggcattcaaggcttcagaagcttggctgttctgaatcagagaaatgaatttttgtgaactgaccattccttgttctactaaaaaagctagcatcttttacatgggaaacaccaggtctcttggcctggcactagatcctccccttgatctggccctacctgcactccttctagtatctatgttcccttcacatcaagccttctagtatctatgttcgcttcacatcaaaccatttgctgttctctgttcccatcctccactttcccagcccctgcctttgctcctgatgtagcctcctgccgtgcttcccctactcttctttgtctgctaatatcctgcccacttcctccataaagccatctctgactgttcccttcttctaaggggtgaaaattgttttctctcctctaacatctgtttctgtccggggcttgttctaccctaaatatcagggtattttttatagttatggtaactgaccttcactaattgacactctcacacctccaagactttgctcttgctgttccctctaccaggagtgcctttcccaacccatgccctttccagccaggtggattcctccttattctttagagcctggcttaaatggcccctcctccagtttaacctgtgggagacagtgcataagcaatgctgttttgggcaggcctggctatgagtgcagtaagatcctggaggagcctgatggtcagggaaggctgcctgaaggaagagcasttcagctgggacttgaatgccaagtagctttgggtaaggggagggcttctggatagtgggaacagcagctaccaaggtgtaaaagttggaaggaaaatgggaaaggggtttacccaaagccctgctttcttctgtcccctcaaacttggcttctttccagccatgcatagacctcagtattctaaactatgaaatgggactttagttctgtgcctctgggcagaactgccactgggttgggtggcagtgggtgggtcagaatgtgtagttccaggctgcgtctggggatgggaccagggtagaaggcyggcccaagctggcctagcatggtggctcacacctgtaatcccagcgctttgggaggctgaggccacttaggccagaagttcaagaccagcctgggaacaaggtaaaacctcatctctactaaaaatacaaaaattagccaggtgtggtggtgcgtgcctgtagtctcagctacttgggaggctgaggcaggagagtcacttgaacccgggaggcrgaggttgcagtgagccgagattgcaccactgcattccagcctgggcaacagagtgaaaccctgtctcaaaaaaaaaaaaaaaaaagagaggccaggtgtggtggctcatgcctgtaatcccagcactttgggaggccgaggggggtggatcacctgaggtcaggagtttgcaaccatgctggccaacatggtgaaaccctgtctctactaaaaatacaaaaaattagctgggcatggtggcggacacctgtaatcccagctactcaggaggctgaggcaggagaattgcttgaacccaggaggcagaagttacagtgagccgagatcctgccattgcactccagcctgggcaacaagagtgaaactctgtctcaaaaaaaaaaaaaaaaaaaaaaaaaaaaaaaaaaaatatatatatatatatatatatatatatatatatatatatataaaaatctggcccaaactagtggctgaagcaccaggggcattccttctgtctccccacccctgcctcctcagccggctctgccrtgcccaccctacgctgaaggccattgaaatgttccacttccgaggcccgtcccaggtcggcgaccgtctggtgctcaaagccatcgtgaacaatgccttcaaacataggtgagggtctgggatgggtgcggccacgtccattcagggctgagggctcttcctgaccctagaaaggaccctacttcaaactgtccaggagccctttgccctgmagacagggtctaaatccctgcctggctgatgggttcctctgaaattcagctctgattttcccttcttgggagccttccctggctcccagtcctgcccacccctggctgggtcagggacccctcctctgggatcccccagcccctgtctcccrctgtctcagatcagtgtctctgtctccctccttggctcctggctccatgcctggaccgctgtagatgctcagatcacagggccacttcttgccagtgtttggttatttatcaaaccctttcccacacatttcctaaaataattagtccacagagtctttgcctttgcaatgaattctgaaacctactcccatgaaagctgactttaaataagtaaattttttgagaatttcagaggtcattatttaattattaaaagtgagggatcaggagccaggctgccggattcgagtttggctccacctcttactggctctgtgaccttagaagtaacttaacccctctgagtgtcagttctttcacctataaaatggggctcatcacaactacctcagagttatgaggattcaatgagccgttactagtagaacgccagagaaaatgtccggtaaaggtcagccattgtggctgctcttactattattgttgttatttgcagtctgacttgcacacgttctgccacggtgcaggggaaaagcccttttgtaggagctgtgaagcctggattttagtccagattccaggaatctggaatccttggaaaaatcattgcccagttctaggccttggtttccccatctatataatgtccacactctgcaatcatagaacttccaaagtgagggggaatggtggtggctgctattttataattaataaggatggtaagtggctgagygcagtggctcacgcctgtaatcccagcactttgggaggccgaggcaggaagatcacttacggctcggagttcaagactatcctggccaacatggcgaaaccccgtctctattaaataaacaaaaaatgagccaggcatggtgcacacacctgtaatcccagctactcaggaggctgaggcacgagaatcccttgaatccaagaggcggaggttgcagtgagccaagattgtaccactgtactccagcctgggcgacagaatgagactgtctcaaaaaataaataaaggaataaagaaataaagacagtaagatacatgaatagcagcaactgagctgtttgaagcaaggctgccacagcacttgtaaatatgcacataatgaacattttctaattaggccgtccacctccacctcctggtttatgtccttacatccctttgcagtttttgatggcatatttatacctttgctttcttgttggttgcctcctcccctgactgttagcccatgaggcatagactggacaggtttattcactctcgcatcctcacagggccggacacacacaagaggtgctctgtaaacaatggtggagggagcggtcccaggtgtcctgtcactgggactctgatccacgttgctggaagaactgcaggagtgtatgtgagtgtgtgtgyrcatacatgtgtgtgtatgtgtgtgcatacatgtgtgtgtrtrtgtgtgcrtacrtgtgtgtgtgtgcatgcatgtgtgtgggcgcatgtgtgcatgtgtgtgtgtgagtgtgtgtgttggggaggaggcatggcccttgggaaggtctgtccaggttggaagccacactccctcccctcagcatggaggtgggcgtgtgcgtggaggcctatcgccaggaggstgagacccaccggcgccacatcaacagtgcctttatgacctttgtggtcctggacgcagatgaccagccccagttgctgccctggattcggccccagcccggcgtaagtgggaccagcgccctgccccaccagcagctcccctcccctccctctctgccctggcatggtggagactgccagccccctacagacctagaggcgtgaggggcccaccctacccccgtgctggggcacagccagctgagtgtcctkgctgtgagccctgggatgccccttgtgcagggcgggcttgttctgcctgacagaactcggagtatgtgtgggtctggctcggagttgggggttaatgggctgtcatgagcctgcagggttggaagagtactggctttggagtcagatgtgggttggaacctcgcctctactacattcaagtgatgccccctcgagctttcagtctccatttgtaaaatgggtgtatctgcagtccctayctcacaggactgtggggcgatagatgcagtactgactccatgcctggctgcgccctgggagcggtcaggaggatggtgaaagcaacgcaaggggcacgggaagacagtcaggagcctggtgcaaggtcctctcttacaaaatgctccctgtgcctcctgtgggccaggccttggagaggccgctccctcccttgggggaggtcccctggccttcctgctggccttccagagggtagcgtgggctgtggagttgggtggagcctcgggacygggagctgggggtcacagccatagccgcttcccaggcattttccttgtacttggggctggaggacgttagatgtggcggtaaagagggtgggcttgaggcaggccattggggtgctgatcctggcctcggcccttacccctgtggccttggcaagccctcacccttccttgtctcaggttcctcctctgtagaatggatacagcaccagccccagcctcagagggttgttgtaaggatttggtgcarttccacatggaaagcccttgagaagagtggctggtgtgtagtgagtgctcagtaaatgtggactctcattaccattgtgagtggcctgtaaggatccccattttacagaggaggaaactgaggtctggccaggggaggtggtgttcccaggtcactcagagagtttgaggggagctggggctacagcttagtttcccactttgctggccaggatgttttgattccagctgccccagcgacacctgaactccacgttagggctgcaggaactccttgggccctgggggatggagagggggcaggacggagggtgggggtagctggttgcctatcccgacttcctccccaggatggtgagcggcggtaccgagaggccagtgccagaaagaagatccgcctggacaggtgagtaggggctgagtggtgggcagaatgtggattcrgggctgttcaygctccgctgaccccagggcactcgcttttcttcagagctgcctgtgcgttgggccctgggccgggccctttacatcctctcgttttggtcttattacacagcggtcttctggcctgttgtacacacgaggacgctggggacagaggggttaggtggcttgcccagggacacacaaatatcatcagcagagtcagaatttgaagctggctgagtccagccgattttaaatcctgtgttcttgccattgattctgatgcccatttggcagatgaagaaacgttcagagaggagatgcagttgttcaagaggtaaagccactttgggaggccgaggcaggcagatcccctgagttcaggagtttgagactagcctggccaacatggcaaaaccccgtctctactaaaaatacaaaaattagctgggcgtggtggctctcgcctgtagtcccagtgcacctatagtcaggaggctgaggctgaggcaagagaatcgcttgaaccgggagttgcaggttgtagcaagccgagattgtgccattgcactccagcctgggcaacagagcaagactctgtctcaaaataaataaataaataaaaatgaagccaggtgtgtctgactctgctgtgaaagcatttatggactttagaggctgtaagcacagcagggatcacaagctgttgttagtaagaaagtgtgcatctatggcatttactgagcatttaccgtgtgccaagcactgttattgtgatgtccccatgaggcaggggtgactgctgatcccatttcacagatgaggacacagcagcaccagggtgaggtcactcagcaggggtatggggtrtgggaatcgagccttagacgccatacccttccttgctggctcgctcccacctctgagctttccctggtgtaggggccgagctggtgtgccctcagctgctgtgtcctgtgtgaccatccagcctccctacccagacaggagtctcccattctgccgggctcagcacagggcctagcacagagtaggcctgcagtagagtctgtggaaagtgctgaacttccaggggaccaaggttgtcatcttctctccttcccaggaagtacatcgtgtcctgtaagcagacagaggtgcccctctccgtcccctgggaccctagcaaccaggtaaggctctctgctccgagaggacagtcttcagacccacygggcccccacccttccctgcttgtcagaacgggtttggaggaaggccggggagagcaggatatgaatgacacrcctcatgattgctaccattarcaaagagctggcctgcgtccctgtttggtaggtggaagcrgagamcctgagaggcagagtagcttgtctagggtcacacagtgggtctagccaagcccaagcctggacctcccttctcaacgcccaggactctttccacagcacctgccgcaccaccyacccaccgcccaacccattcctggcccaggttcctctctggcacacccttggccttggctcaggggccctgaaggaagggggyggggtagtggtagcacctgtgtactctttcaggtgtacctgagctacaataacgtctcctccttgaagatgcttgtggccaaggacaactgggtgctgtcctyggagatcagtcaggtagctgaccccacccacccaattttcctttctcatctgagccagaggtggctaatggcaagcaacaagaactctcccacaccacttatgtcaaaaaaagatctcttcaaagaattgggtgagatcaagaaaccagtccagttatggaaacgtacccacccctgcagggcctggagtcgagaacccctagattcttctctsctgcctgccccccttcctgttctcaaccactcaggtctgctgctgtctgaccaggcacttcctccctctctgttcttctgcagtgatcactgcagggatcggggcagccagcaggcacgcgcttacaggagacctaagctctgccagctgcctgttcccctagacaagccacttcctgcctgtgccactggggcttggatgggcacctggctgacaggaaccaccacatgttgccttagtcactgttgtcttaagccaccttcctgtccatttgtgctgaattcataattcgtggggatgcagctgagactcagagaggttgagctgcgtgttcacattcacacagcaagtcagctgtagccctgagcttccagtctcagcctccagcatcyccatcagtccactccaccacccagcaaatgaggctgccctctatcccatgcaggtccgcctgtacactctggaggatgacaagttcctctccttccacatggagatggtggtgcatgtggatgcagcccaggccttcctgctgctctcggacctgcgtcagaggccagagtgggacaagcactaccggtgaggggccagggtgagggcagggcagtgtcccttctccggcctgatgagggagagagtgtctccttctgcgggtcatcctccatgatgctctgccctgctggggctgggggtgggttggagttccatgctgggtgggggktcagggtcatgggtattttgagcccttagggaagagactgagcacggaattagagctggaggcttgagttgaagtcctgcttctgtcccaaccagctgtgtgacattggataagtcaaagtcacttcctttctggcctcagtttctctcttcttaaaatggatgcttggatggcgggtcatggattcacactcagagatactgattttcaaaccatgtgctgtggagttctgtgttcccaaaggggcttccggaactgctgggggtggagttggaaggatgaagggtgatcgggacatagcatggccagtttgttgaacttaccaagtttgctgattttcctcacaaatatattatttttgaatataatgaatgattatgaatagaaatatgttattcctttacatacatttgttcctccaaatttattgattgttcacatgactatcttcttctcgaatttagtcaaggaagataaatatgttcttaggaaaatagcaaaatttgtgtttttcaagtccccttaaagtcattttctgttctgccatcaccggggctcgagggggttctttgataattgcttgttatgaggagcctacattctggagaatttccgtaaggaggttctgtgtgtttggaaattcagtccgctggtcacttggtgaattgtattttgacaaactggctttccccttcccaccccatctattttctccagagcaggcttgtagctctttatacatgggcttcctgctgaaggtgtctttgcaaaaagggccatgttgccttaaaaagccctggcccagctgactcaggcctgctggttgtccccttccagaaggcagagaggtgatttggtggtggatgtcgtgtagggggagggcggttgtgcatgtggtaggtgggcttcttggagggaggctggggtgggccttgaaggccagaccaaatcttgatacttgatgggatttgtgggggagtggcctgaggggaaagagagcccctagtttcttccccataccctgcctactgctgagtgcaggcaggggagtggggaggaggaggtgggtctggacatggccatgcctgcctctgtgtgggtgtccttgtgtgggtgcacgtgttggtatgaacctgtgtatgcccatgcatgtatgtgtcaggtgcctgggcctggggatacatctctgccacctgatagcctggacacaccccagccctgcttccttattagctctgtggccgtgggcaggttatcttcctcatctatgagataggaatactaaaagcgtctacagcatggggctgttatggagattaagtgacacatgtaaagcatttagaacagcacctggcactcagtgggcgctcagtaaatattaagaacaactgctaaatcatcacacatccttgtggtgtctgcacctgcgcagacatgtatagacacacgtgggtctctgtgtacactgatgtctgtccatgtgcctgtgcacatatgaccacatgtgtgcatgtatgtgcacatctttgttcccatgtctgtgtgtatgtgttcatttacttgcatgcatgtctacatgtgcctgtgtgtgcacacgcacatgtgtgtccatcttggctgggctttgctgccttcctgctggcccttgctgagcagtacagggggtgacatcccatcacagaagctgctcaggcactgcagygtggcagggcccgggcagacccgctgcttgcatgggagctggaagcttcctggggcactgagatcccggcctccccacaggagcgtggagctagtgcagcaggtagacgaggacgacgccatctaccacgtcaccagccctgccctcggaggtcacacaaagccccaggacttcgtgatcctggcctcraggcggaagccttgtgacaatgggtgtgtgcctatctgctgtggggtgggggacacaactggacagggtggtagggtggccgcttctccctcccagggaagggcatcagcctggagccagagctctgcttcccattggctgtggggccccaggcaccactagacttttctgggctgctgtggctttactatgggtaaaatgagggataggggcacacatttcccctcttgtcgcattccctagagcagggccacccttacccagggtggctcaggctgcctcgatgcaggccttgggcaggatatttctcacgtggccacctccttggcctcctccctctgacagccctgtgtgggctggagggcctaaacatctcttttgctggagagacagggacagaaaaaaaatcccaaagcccacgagtcttcccctgagcgttgaagtggagtggcttttccagaaagtccacagtgaagtcaggttggctcctggtgaattcagtgctaacccacaggtacctcctccctccagcctggccctgagccccgcattggggctttaagagtcgatgtgccttgcatccccctggtgaggaatctgtgctagagggggcagggtctcggccttggttgggcagaacaggcccccactttcttctgtggctgacccctgtccccttgctacccttccttcactcagggacccctatgtcatcgcgctgaggtcggtcacgctgcccacacaccgagagacgccagagtacagacgcggagagaccctctgctcaggcttctgcctctggcrcgagggggaccagctgaccaaggtgaggccggtccccccaaccacgcccccagcctggctccaccccaacaccacacgtgtattgagctcagcactgctgggctaggatagtctcagagctggccccccagcaggctcccccttccagcctgggggagcctgagagtgtcaggggctgaaaatgatctaatctgtgtacaggtaagtcagaggccactgcatggtcttggaaaaagctctgggtgctgaaggcagaaggcctgggttctgaactgaaattccatctcactcgtcattcacttggatagcccttctcatctaggaaggctttatatgactctgagggcccataaaacccagcagcgcagtccgtgttgatggaaaacatggggaggaggctgagggaaagcgagggtggggtactgcagcctcccccctcacagcttctattagggccctgcagcctgggtctggccttgagactcacccagcagagactcagccggtgtttgctgaattcatatgcttgaacccatgagcgcctcagaaccatccctgggctaatgtctaatgtgtctctatggccgagattcagagctgggccctggagatgcagcccctgccctccagggcctctggctggcggggaagatgcatgatgacaatgtggtgtgtggtgtgggaagccagggttgtcagygcccgaggaagggttgggggagatcagctggaggaggtcatgcygggcaactgtgtaatctaagaccctggggagttgggttgaatattctgccctcccagaaggccagcaaggctgactcaccaccagcctcgtgcccactgggctcccaccccttcccaggaccctcccctagctyggtccccctgagcttggcttcccaccctgcaggtatcctactacaaccaggccaccccaggtgttctcaactatgtgaccaccaacgtggccggcctctcctctgagttctacaccaccttcaaggcttgtgagcagtttctcttggacaaccggaatgatctggcccccagcctccagaccctctagatgccctcagtggccacatcatgcccactcccactccatcctgtccccaaggacwcacatacagtgcctggagaaagccaaagacctttatttcttcctgcctccccgtgggaagcctccgccctgaggtccgctgrcccaccacccctgggtgctcagtttctaccaacatgagccagcaagtccttgtggtagccctggggtagcctgtagtagactcgggtcctgtccacagccctagctgccagcaatgctgtcctcacagaggcatagtcgyccccagctgggttgtgctccactgtgacggtggsccggggggaggatgccakcagcctgcctatggctccagctgtgctgtggcccagcagcatggcctgcatctggaaggacacaggttgccaragcccctggcacaactctagcatatctgtgagcagctgttccctgtagccactgcccagcacctcctcaggccagcctggtgccacagtcacgtgggggaagacctcagccacagctgtaagcagctctctgccagccacatggccggggaccgaaaaactcccgtgggagattttggccccaacccacacaggccaatgcaagaggccaaggctggagaggcgtgccagcaaggccagggatggccggagggctgcgggctcyrctatttgcaaatggatgccccagtgtccgggatgtgtggccagctgctgcaggcaggactccagcgtcaggatgttgccacttggagtatgaacaatgggcacggggttttcagccacagttccctcgaggccagtgttcagcaggatcatgccttctgtgtctggaagaggcggcagaggcaacagtgtttaggatttgggttatcataaggtgttaagagtcccttgttaaaggggcagtgggagttatggggtcatcaaggaccttgcctctctggaatctgtcaacccagttttgggctccaggtggatgggttgctttataaatgtgcctggtgcatgagaaactcttgtttcagctcttggcctttacccatgactcagcctgggggctggtgccggccttgcctgcagcaatgtagctgaggactggtctgaaggccaggagccctgtgctcttgacatcactgtactccctctccctccccgcaaccctgccccaccttgcatccagggtatggtgtaaataaacctgtgttrccatggcaacagagaccggcggtacctgccccaagcaaaggacacccctgcagatgagctgggagcaccggggctgaagggtagaccttacctgggagggtcattgttgctgttttaccrctgccctggacgtcaggaaccagccactccacattcagaccgtcatccccaggcagctggagaagagggatcaggctgcctcccgtgtagtacattggtttccgtgtggcattcactgtggggccccaaatcgccaaggtgaagtggctgccattcacagaacaccttacctggttgctagggtcccataggccacagctctacgggcatcctctctaagcctcatagcaccctgccaagtagctctcatttccttgccttgtagactagaagaagtgacttgcccaaggtcttataagcagtaagcaaagttgccrggagtggaacctgatgggaccaggtctgcctggctccagagctggtatccttcccgctcgcttaggtggctcccatggcaggaatgctgagtctgatggggcctctttgagatggcttaactgcggctcttctgggttcggggtcaagggaatgaggggtttggatagtggcatctgatcactgcttaatgaatacagtggaggcctctgaaacattagagtaaccagcagtggagctatgcaccaagggaaataatggggggtttggaatttgctggtttcctacctgctgggccacataaaagctgagtgactgtataaattcctgaactgttttgagccgctgtttctctataaaatggaatccctcagtttctctataaaatgaatgtgtgggtcaggcaggtggctcatgcctgtaatcccagtactttgggaggccaaggcgggcggatcacttgagggcagaagttcgagaccagcctggcccaacatggtgaaaccccatctctattaaaaatacaaaaattagccgggcatggtggcgcaggagaatcgcttgaacccaggaggcggaggttacagggagccgagattgcgccgctgcactccagcctgggtgacagagtcagactacatctcaaaaaaataaataaataaaaataaaatggatgtttgaagcttagcataccatcccagggcctggcacacaaaatgcagccgcctcctgtcccaccccggccttcccccttctgatatcccttccacccagctctgctccagtgcccaccaggtgctgctccatgcagaatccagcccacaccacccttcccaattcctctccttacaggccagctgcttgaactgtgacaggagaggctcaaagatgtcatagtagacttggtggacagcagtgttatcccggacgtagagcagatcttccaccgacatggggtccgaggcagcctgccacagcgtcaggctgtacctggggacacgagagctggctcagtgcctgtctgggcccagcaagaccctcagccccactcctgtgctcagaactggatgtcagctgggcgcagggtagagcatctgtcctccagtcgcccacctgccacttctccctgagtcctaccccttcccaagggcaggagccagagggaattcaggaaagatgactgaaagcagaggcccaggagggagggggagcctgtgctgcctcctcacttgcagtgtctatttctgagtcctgtcttaggaaaggggcagracagatgggggagggtgtggaagggtaggtcaggcatcaagagggggagggggcagctttgggagtcctatggaaggtagggggtatagtgggggcaggggagtctctaaattcctatagggctatcctagggcaggggttaaaggcacaatctgtgtagccccaggggyacagcgggctcctattggaggaagctgtggggagacaaattgtgtcttggtataaatattttccagagggcagagaattacccaccaatgaaagggctctctygggaggtagtgagtagcccgtcaccagaggtatgcaagcagaaagcagggactctgcagagggcatgagcacyggcaggggttggacgaaatgacctttaagacccttccagccatgagcttctgggatcttgctgggggcatcagtgcctccaggagggtgggggtgggtttggtggttttcacctctcagattggctcagcagccagctgaagtggggccaggcagcccgcaccatggaagaccgtacagggaaggtgaccctctggggcactcctcccaccagctcgtgcatcttctccaccatggcttgggtgtacgtcctgtttggggacgtggacatgtagaaggtggtccagcctggagatagggtagccttgggatacttctcctggaccagggccaggaacctgcaaaaaaatcagagatgttggtctcacggagctgcagcggccccttcctctcctctggggtctcatcacagtgctagggagtggcagagcctattggatctatgataaggtcagaagcagagtcccaaaggacagaatggcttgtttcaggtcccataaattgggcgtggactttggagtcagggaagtctgggttcagatcctgattctgatcttgggcaggtaactcarcctcatagacagcatcccttccagcagggcaggcttcttaaacatcctcatatagacaggaaactgactcagagccccagcgtgtgggaatctgagctctgccagctgggagtctctgaagtttctcaggttttctttaaaaatctccctcctgccaggtgtggtggctcacacctgtaatcccagcactttgggaggctgaggcaggtgaatcacctgaggttgggagttcgagaccagcctgaccaacatggagaaaccctgtctctactaaaaatacaaaattagctgaacgtggtggcgcatggctataatcccagctacttgggaggctgaggcaggaaaatcgcttgaacccaggaggcggaggttgtggtgagctgagatcgtgccattgcattccaacttgggcaacagagtgagactccatctcaaaaaaaaaaaactttttttcctgtcttcctgctttcctccctccttccctccctcccttttcttcccttcatgtctttctctcttttctttctatacgtggtctcgctgtgttgcccaggctggtctcaaactcctgagttcaagggatccrctcaccttggcctcccaaagtactgggattataggtgtgagccactgtgcccagcctaaaattttatttgaactttgccttgatgaaaatattttagtttttttctttgtacttttcttcttcaaaagatgcaaactttaataggcaaattatgttgccacccactgcccacccaaaaaaaccctactgagtaaaattagcactccaggaagacaggtcatatttatcttgggccattgattacattttccaaactgctatttttggaaggcacctcagcttgagaagcacaataataaattggatggatggaggaagagatggatgggaaagagcctggagcttagaatcagaaaggcctgggtttgaatctttgctctgccacttaccagacttaggcaggtcttttaacttctataatatagttcctgcattaataaaatraaagtaatactacctacctcattctcataagagttaaacggtgttctgcaagtcaagtgcttaaaacagttctgggacacataataaacttcgaacaaattgagcttccactattgtcagctttatcatctgcaatatggggagaaagccctaacctggcagtgctatgtaaggatgagatcaaagacattctctctctttgtaaactgtagagcactgtgcaactactgtatgtgagggctgtgagcagcggtgctggaattcatgaggggaattccagctggggaaggaatcaaggttttagacttctctagcaggccaaatcctgtgctggtcactggggaatacaagggggcacttggccctgtctgccctccaggagttcaatgtagtaggggtgacaaatctatgaacacccagtgacagccccatgaagtcagggctgtgttagaaggaagtgtaggggttgaggggcccagaggaagtcctgcagtggcctaagatgtcaaggaagtttctaggagataatgactggccagtggtttgtcagaaaaggggggaaaggcattggaggaagagggaacagcatgtgcaaaggctcagaggtgaggctatatatagtatgattggagacaaactcagaggtcccctaagatccccatcctgtggtaggtgttgacagaagagggctggacacagctgggacagagaggcgaacactcactgtgtggcattgacctcagttgagatgagcatgttggggccctttaagatgtcagcgttgatccatatgggccgccggactttgccttcctctgtcagctgccgcaggaggtccagggaggggcccactgccttgatgttcttgaagtccagtttgatgcctgtggggaaaggaacaagggcttggggaaatggcgaaggaactaggaatacatgactccctgggcagaaagcagagcgggtgtgtgtgtgtgtgtrtgtgcgtgtgcrtgcacagtggagtcaggggagggcggaaggaccagcaccacatccctgcagggtgtgaggaaggcctttcgaagagacagagctaactcagagaagaagggcctgcctctagaggagttcccatctcctgcggggaggaaacagaggccaggtaaggacttgggcttgtggctgctgcagctgggaatcaagtctctgctgaaaagggcctgtggttcctgagcagggcagactcagagggtcctaaaccaccagagcctgtagggaggttactcagcctccaagaaggtgcatttgagtagaggaggagatctctgcagagaaaggacttggtacttttcagggtggtgaggagatgaggctaggaagatatagagggatgttgaaagccaggccaagatcacactttttcctgaggacaatggggagccacggagggttaaaagagaggcgtggcatgacaaaactggtgttttgaaaagatccttcaggtgcgtgtgtgtggtcatggtagtcaagggaagcctggaagggctgaatttggggcaggaagccagtgaggagggaggtcctggagagatacagtgttgctgcgactagatgggggcagggttaggggttaggattggtggatgcagcaactgagttgccgtgaggatgagggagagggaggcattatggtgacgcctggattctgactgtgactggtgaaggggtgcagaggggaagggtggggctgggctttgaacatgttacgtccagttctgtggatacaggagggagcactctgagcatgcgcggcactttgcagttcacactgtactgccggctgtctcccctctgtgtccaggagaaaacaccaggacctgcactgacatgctccccatctcgcctagtcctcactgagcctgggcatctataacattgtgatgagaaagccaaggcaatgagcacctcgtgtcagggctggacttgcttcccagtgagggatctctgcacatgctgccccagggccagagggctgggggccggagagggtttccagagaggcccttacccttttgggaagagcccagcacagcgtccagccactgctccagtgtgttgtcactgtagatagtgggggggtgtgccatgatgggaactcctgtctcattggctgtgccgagcccttctacattgacgtcagcctccaggactgtgatgttgcctgtggaaggggcaacaactcagtgagttcctttttttaaaaaaagaaaacttctttctcatcataaaagcattacaaattacagaacatttgagaaatacagaaaagtggaagaggaaaatattcacccacacttccatcatagtttcacatttcgatgattttttttcttccattttcttctatgcataggtttttgttttttttttgagacggagtcttgctctatcgcccaggctggagtgcagtggtgtgatcttggctcactacaagctccacctcccagtttcaagcaattcttgaaattctcctgcctcagcctcccaagtagctggaatttacaggcgtgtgccaccatgcctagctaatttttgtatttagtggagacggggtttcaccatattggccaggctgctctcagaactcctgacctcaagtgatccgcccacctcagcctcccaaagtgctgggattacaggcgtgagccaccgtgcccggccctatgcatagtttttacacagttgagactccactgcatttataattttttatgttttttcaacattatgacacatttccacgatctttttttatgcatctctttagagcaaacaaggcaaaaaagcaaaaagcttcaaaagccctggttgagggtgttcactactatgtagttgatcatcccccatccctgagatgctttggtaagtttctgatttttgctattagtcttgctatgttgccctgtctggtcttgaactcctgggctcaagcaatcctcccactttggcctctcaaagtgttgagattacaggtgagtctcagtgcccagcccacagggtcatttttaaagcccatgttatcaaactgctttccggaaaagttgttctgattcttgttcctgcacaaggttgcccatctcaccacatcatcactgacactgagttatcttttagcttcacatagttaactcaatcaggtggacatcttctgattcctgccttcaagaattcagtctagtagggagctcagacctttctaatgggaagctgtctctagataatcatgcaaggggcactcacacttgaagagtrtagtggaggggagaggggccgcttttggcccttgcagcatcacaaacgactgatgccagaaggggccttttctcctgctttctccctgactcctgaccattcttctcacctctagcactgcttccctgcaagtctgttctctatagagccggcaaagtgagtgtcctaaatatgtacctgatcatgtcactttctgttaaaaaaaaaaaaaaaaaggccagaaaacctacccattgctctaaacttgaaacccaaactctttatcatagtcttcgtggtctgtacaatcagggcctgccagattttccaatttcatctcacgttccactctccttcattctctgagttccaggcacccagcttctccaactttaatgtgcacatagatcccccaggaactgtaaaaatgcatgttctgatcactaggtctgcagcagggcctgagatttttttttttttttttttttttttttttttttttatgaagtctcgctctgttgcccaggctggagtgctgtggcgtgatcacggctcactgcaacctctgcctgctgggttcaagtgattctcctgcctcagcctcctgagtagctgggactacaggtatgcaccaccaccatgcacggctaatttttgtacttttagtggagatgcggtttcaccatatcagtcagccttgtctcgaactcctgacctcaggtgatccacccgcctcagcctcccaaactgctggaattacaggcatgagccaccaggcctggcccgagattctgcatttttaacacactccccagggatgcgcctgctgctggtccatgggccacacgttgggtagcaaggctttaatttgttttgtcctccccatctctgggctgttgcctggcaacactcttctctcaactttactatggcacctcctgctcatcctttagtgttggcttaaaaaaatcacctcctcagccgggcgcggtggctcagacctgtaatcctagcactttgggagcccgagaagggcggatcacttgagtttaggagttcgagactagcctggtcaacatggtgaaaacccatctctactaaaaatacaaaaattagccaggcatggtagtgggttcctgtaatcccagctactcgggaggctaaggcaggaagaatcacttgaacctgggaggtggaggttgcagtgagccaagatcacaccagtgcactccagcctgggcaacagagcaagatcctgtctcaaaacaaacaaacaaacaaaaactcttttcaccttaaaaattgtgacttgccttccagaggctgaacctgggggctgacttgcttgggggtgggaagtgaaggaggagaaagagatgagaggaaaggatttgtttcctgtggccacagctgtagccctggtcctcaggaagccatattcaggagggaaggggacatggagtcaatagccctccttgtgccagctttacccatctgcaggagctcgcggtggctgtgtgcagaccgtgaattgacactgctagcttccagtccccaccctaacactttccagctgtgtgatcttgggaaggttatttgatctttttttgcctgtttcctcatctacaagaattaaataataaaatatccctggttaggcattcactaagtgttaattatttatatggagttgattgcttaactagtgtaaggggccatctggtatatttctgttgcttcagcgtaattattaataatgacctcaaaagagccctgctttggttgatttggtcattctaccagccctcagaccccagtttccttgtctgaaatggaaggagtttgcttgagcagtgattctcaaagttggtcctggggccagcagcctcagcatcacttgagggtggggccagcagcctgtgtcttctgaaacgtgcccaggtttgaggactgttcccttcatcttttatagctactgctttaaagttcactagcatgttcgtgaacattatctactgagcttcccaacagccctgaaggagagggtgggggtcaagcgtcacgcagtggcttggagcgtgcactctgggactgaccactctgggctccaatgttggcttaactgctttcagacagtgtaaccttggctaagtcacctaacttttctgagcctctatttttctcctgtgaaatgttacccatgaaacagattgcatggtagtcccaggagaacctgtgtgtaatgtgcgcccagtgagccttggccaactggttactgtaaccatttttgaagtgcagatttctggcttcttgaggctttgaaggtaaaggcttccttacagtttggtccctgacaggtcgaggaaggggtagctgggagggaggacagtatagtcattactttggagtcagacatgtggtttaaatctaagctcagagtttgtcagctgcacaaccttgagctggtcacttaacccctctgagcccctatttcctcatgctgaaagacatgtaaacagccatcatgccaccacagtgaccagtgtctgatcctcacttctctccctctgtcttctctatcccttgccctggcctgcctcagtcttggcagctggacttactgttcagggcagctgtcatggctttcttgctgttggctgcgtggtaccaggtgacctccaaggcatctcgccggctgatctggcccaggctcagcaggtagtccagcatgtcggcatcagggctgcaggcctccagctcacagcctggaaggaatcccaaggggctkttagcgtctgtcctcgccccagcccaagactcatgttcgttcatcccatgaccctccctgggctcccactgtgtccagtaccccatctggcagagggacggtgaggctcagactcactggtgctacaatagagggaaatgaatgggctcctggggcccaaggaagcctcattaccagcctgaggcagtcaggaaagggggcaggttcacagagaagggaacacttaaggaagaccttgaaggatgggtgtaaatttcacagacaagggagaataggttattccagacagagagaaagcaaaggcttggcttcaggagagtgcagttgcctgaagagccattggcctggtagagatggaacataaaagtggaatgtggaaagattggaagagggggccgggcatggtggctcatgcctgtaatcccagcactttgggaggccgaggtgggtggatcacctgagattaggagttcgagaccagcctggccaacatggtgaaaccatgtctctactacacatacaaaaattagctggatggacgtggtggcaggagcctgtaatcccagcactttgggaggccgaggtgggtggatcacctgagattaggagttcgagaccagcctggccaacatggtgaaaccatgtctctactacacatacaaaaattagckggatggacgtggtggcaggagcctgtaatcccagctactcgggaggctgaagcaggagaatcacctgaacccgagaggtggaggttgtagtgagccgagattgcaccactgtactcagcctggatgacacaaagagactctgtcaaaaaaaaaaaaaaaaaaaaaaaaaaaaaaaaggctgggtttggtggctcacacctgtaatcctagcactttgggaagccgaggtgggtggattgcctgagctcaggagttcaagaccagcctgggcaacatggcgaaaccccatctctactaaaaatacaaaaaattagttgggtttagtggcatgcgcctgtaatcccaaccactggggaggccaaggcagagaatcacttgaacctgggagacagaggttgcagtgagccggagatcatgccactgcactccatcctgggtgacacagtgagacactgtctcaaaaaaaaaaaaaaacctgcgcgcggcggctgacgcctgtaatcccagcactttgggagaccgaggcaggcggatcacctgagttcaggagttcacgatcagcctggccaacatggtgaaaccccatctctactaaaaatagaaaaattagctgggcgtggtggtccatgcctgtaatcccagctactggggaggctgaggcaaaagaattgcttgaacctgggaggcggaggttgcactgaacccagatcatgctactgcactccagtctgggcgacagagcaagactctgtctcaaaataaataaataaataaataaaattttaaaaaaagataaaagattggaagaacgttgggatcaggttgtgaatggcctcgaactttagcaaaggagttgctgtgtgctgagggcagtgagcgagggttgcttggaaagatctgggctgcagagctaacaggagctgacaaaagcaggcagagggaccttgtaagaggggtccaggaggagacttcgaagcttctcacagggcagggctggagggctggagggcagagggcagaaaggcagagcccttgaggctcaggactgaggaacacaggcatgaggtgggggcatggtggctactccaggtacctgtgtgaatggaggagcccttcactgagaggctgcaggggtgagcagctgttggggggaagagatgagctcagcctagtctgctgagtttgagattgcttgtgtgactcccaagaagggcacaggaggaaggtctgggctgaaagccaagatctgatggtcttcaggcaagtgaagtagtaaaaaaagttaaagggggccaggcacagtggctcatgcctgtaatcccagcactttgggaggccaaggtgggcagatcacctgaggtcaggagttcaagaccatcctggccaacatggtgaaaccccgtctctagtaaaaatacaaaaaatttagtctggtgtggtggtgcccacctgtaatcccagctacttgggaggctgaggtggaagaattgcttgagcccagggggtggaggttgcagtgagccgatatcatgtcaccgcactctaggctgagtgacagagtgagactctgtctcaaaaaaaaaaaaaaaaaaaaaaaggccaggtatggtggctcatgcctgtaatcccagaactttgggaggccaagatgggcagatcaggaggtcaagagatcaagaccatcctggccaacatggtgaaacccgtctgtactaaaaatacaaaaattagctgagcgtggtggcgcacgcctgtagtcccagctactccggaggctgaagcaggagaatatcttgaacctgggaggcggaggttgcagtgagccaagatcacactccagcctggcgacagagagagactccgtttcaaaaaaaaaaaccacaaaaaattagctgggtatggttgcacacgcctgtgatcccagctacttgtggggctgaggcaggaaaaccacttagatccaggaggccgaggctgcagtgagttgagattgcaccattgcactccagcctgggggacaagagtgaaaactcygtctcaaaaaaaatagttaacgggactttctgctggggaagtcaacgggactttctgctggggatgaagtcatgtagggttgggggatggaagagagaaagagctgtggatggggaatgaggcttggtggggacgagggctcaagaagagctggttggccrggcatgatgactcacacctgtaatcccagcactttgagaggctgaggcaggtggatcacctgaggtcaggagttcgagaccagcctggccaacatggtgaaaccccatctctactaaaattacaaaaaattagctgggcgtggtggcgggtgcctgtaatcccagctactcgggaggctgaggcaggagaatcgcttgaacctgggaggcggaggttgcagtgagccgagaatcgtgccattgtactccagcctgggcaacaagagcaaaactccgtctaaaaaaaaaaaagggactggtcagagctgtaagtgagaagtggggataaggagcgagcgatgagggaagccactcaggatgacatggggggaggcacctacctggccgccgcagggtgatggcaaggactattgcggcaatgaccaccacagacacacaggtaatgccggcaaacacccacttgacctgattctttgataactgctccctgcagaccatggcgacgctctctggggaatgcccccaactccgtgcggcccagagtccctgaggctccctgcagctggaatcctgtgggaggcaggagctcccagcagcacctaattctccaccgggcctggtctgctctgcagccctgtaatatcccctctggagataacccctgaagcccctcctccctccccgccccaatcctcttccccacacyctcccaggatcttaacaggctaaccagaatatctaccatmyctaaaatgacctttgagcacagtaagaggcagcagagaatgttggaccgagccccgacccctggctgtctgcccctgcttgggagtcaggagaccaatcccagcccctgttgcttttctggagtcctggagcaagtgtctgccggtctctgggcwtcatttccttccgtgtaaaaggaggcactagactgggtgatcccgaacattctgttctttccctttctaactccaggctttctgccctgccctcagggaatcctgcattatcaggcaagggtggtgacaaagacagattagatctgcgtaaggggcaataatcttcctttcatctgagattatggttaacagattatctacctgggatagaaatggatagtcctggcatgctggcmtgggttactgcaggccggttctggggcagcgagtccatggggaaggggctgagtcaccacttcatgcagagggagttctgggggccctggtatgggaagcaagttagaggctgcccctattctgaggaccccagaatttaaacgagtccaggaatcacctgtaatgtgcacrgagacttcagcgtctacacattggggctcacagagagatcyggaatgtgaggctgtgataggccacccgaggcagagccgggcagttggtggctttgattgtgtgtgtgaaagggtgtctagaatgatgcccaggtgggcagatggtcgggactgaggggtggaggggcagggtgggagggattttggtcatggggcttgtcgtgggtcattcctgagtccattttcctgcctcggcctycccgaggagggaactggatatagagkctgtgggctcaggactgagatcagggccaaagacaagggcatgagcatcattttctggccaaagcaaagagagaaagggatggaggctgacytctggggaccactgacaggcggagagttggaggaagaggcattagtagaggaraggggacagcagagggcggtgaggggtgtcaatgggaaggtcaagaagaaaggagtggtcagccaggctgggagatggagccctgtaaggacagcaaggcccccgatgctggccaggacagtttccctggatcagtggggagggcagaggtcagagcagagcctgtttagagggrccaggaaagaccagagaggctgaaggtacaggagggagaggcactgggacaaagtgaggatgggagcaggaggacctggtgctcagggggtgctattctgtaggatgtggggaacggtgggcattgtgagtggtgagtctgggggtgctggttgggaggtgatgtggtgaagggggacaatgagggagaggtttgaggacagggaggttctgttggctggtcggggcatgtgtggtatgcctacagggatccaacgagacccaagctgtgggctgctagatggacaggaccccattcaacaccccctccccaccactgtgtatatcyggaaatgtgagactgtgatgggccaccygaggcagagccagccctggagcccaggctcaattctcagttcttggaacctctggagagagggagatctagtctgtctgggcttctggctcattctccaaatcaactcaacaaactcagcagctgccaggagccaggccctggtgaggtgtcagggctgctggctggaatggagcagggtcagtgctctggggtctgctcaggagacagtaagggggctgtagacaagcaggaacatttttgtgagtcccctttcttattggggctgctctctcaggccacccactccggactccaggatccaaatgctaactgggcctcacccagatcccttctgtaataaggcatggaagggtgtgttaactgggatattatgatagccgcaaaaagttaacagaatgacagaagctacatctcgagtaacaaccacatatgctttactctacagttaaagtctagaggaaatttctgtttaagagttggccataaaaaagaaaagaaaatgctgagccaggcgcggtggctcatgcctgtaatcccagcactttgggaggctgaggtgggcggatcacctgaggttgggagttcragaccagcctgaccaacatggagaaaccccatctctactaaaaaatacaaaaattagctgggcatagtggcgcgtgtttgtaatcccagctactcgggaggctgaggtaggaggatggcttgaatctgggaggcggaggttgyggtgagccgagattgtgccattgcactccagcctgggcaacaagagtgaaactctgtctcaaaaaaaaaaaaaagaaagaaagaaaaaaagaaaagaaaaggccagcatggtggctcacacctgtaatcccagcactttgggaggctgaggcgggcggatcacttgaggtcaggagtttatgactagcttggccaacagagtgagaccctgtttctactaaaatacaaaaattagctgggcatagtggcacgagcctgtaatcccagctactcgggattacagtacaggctgatgcaggagaatcgcttgaacttgggaggtggaggttgcagtgagccgagattgcaccattgaccaccagcctgagcgacagagtgagaccctgtttcaaaaaaaagaaaagaaaaaagagaaaagacaagaaaagaaaagaaaagaagtctagaggaacaacaaaccactagaattatacaatgtgactccagggttgtccccaagccccatactgataagtctcacctagtctggcttgcattttttctgcttttattaataatattatttgtgatttcctacaaagtgtcccacattttaatttcatccacttgtcacacaacactgccaaatgactctcatgtccccatgttgcaggcaaagaaatcaaggcttggagaggtcgagacttgtcccaagtcacctctatgttaagttcaaatgcaggtcaggctgactgtgggcctatctgcctgattttatccatctacttgtcccttcttattcacacccatttacaatgggacagtcacttattttggcaagaatatttaacagcaatgctggacaaatctatttttgaaagaaaaatcaagaacttagttcttacggtccatgagggcaccccctgcacaaaccattctcattttggaactgctgcttatttagtgtttgtgacactcttatgaaggaggcattcttttatttatttatttatttttgaggcagagtcttgctctgttgcccaggctggagtgcagtggcacaatcttggctcactgtgacctctgccccctgggttcaagtgattttcctgcctcagtctccaagtagctgggattacaggtgcgcaccaccacgctcagctaatttttgtatttttagtaaagacggggtttcaccatgttggccaggctggtctcgaactcctgacctcaaatgatccactcacctcagcctcccaaagtgctgggattataggcgtgagccactgtacccagccgaggaaggcattcttatgcccctttttcacagaagggagccagagtcagtttgcagcagaaagggatgcccatgccctgtcattccaactccgcgggccgtgtgtcacctgtcctccctgggaaagaggccggcgagccgagctctgaggcacagagcttcgccactctcttggttccaaagagctctgcaggatgtctgggaggaaagagacttcatctggctctggtttttggcaggaggaacagccctggaaccgactccaagctgtgaagactcctccattgtctgtgacacttctcgtggggcataaattactaaacaagttactgagcatgcattctgtgccaggcactgtgctaggctytggggatccaccccgtggcatactgtgggagagaagaaagcaggggctgtcagggggctccagcatttcagatgtgaaacagccattttattaatagagctggtgcacatcaaaaacacagagcaggcttatagcctgtaaggatgtcagacatggaaagtggcagtgggcccaggttggggcatgcaggatggagaagacacaggttagaaaccccaaactcctgggtgggccaggaggctttcagaagaggcttggctgactcggagaaccatcagggacgggggctagggaagaccttccagacaaagggtgcagtgtgtgtgggagagggcacaggcatgagggagaagagcctgtttgggagcgtgagyggtgtggctggagcagcaggtgggaaatgtggggaggcggagggggagagaaatgagactggggagccccggaggcctgggtcaccctgataaagaatttggcttcaacctggatgggttggggagcccttacccatgggataagcagggagcgccacactcagcttgcatttgggaggtggctggaggctggagttgagaaatggttctggaggcctgactgcctctgcatccaggctgtcctgtttcagcactgctcacccctgcaccccggcagagccacaggacttcccacactgcattgcttagaacagcaaatggcccagggaagtgtgtgcctcaggctgtgttatgtgggttactctgatactctccccactcccataccattgcatgttacaggggaggtgaaaccaggggtggttcagaggctccaacatttcagacatggagctgtcatttttagaactggtggctcacacctgtgatcccagcactttgcggggctgaggtgggaggattgcttgagcccaggagctcgagaccagcctgggcaatgcagagggatctcatctctacaaaataaaaaaataaattagcgagacatggtggtgcatgcctatagtcccagctacccaggaggtgggaggatggtgccactgtactctatcctgggcatcagagcaagaccccatcgccccccccccccaaaaaaggaaaaaagaaacccatttgcctattttgacactgtcatgaatttgtactgcttaggtggtctcagcactctaaatggtggaattttatttaaagtagtttcatgtcggtagtgccccaagataactactacaagcaaaaacatgttttattaagaggaagatagaggctgggtgcagtggctcatgcctgtaatcccaacactttgggaggctaaggcgggcggatcactcaagatcaggcattcgagaacagcctggccaacatgacgaaatcccgtctctactaaaaatacaaaattagcggggtgtggtggctcatgcctgtgatcgcagctatttgggaggctgagggaggagaatcacttgaaccggggaggcagaggttgcagtgagccgagattgtactgccgcactccagcctgggcgacagagcaagactccgtctcaaaaaaaaaaaaaaaaaaaagaagaagaacacagctttaatccaggcctcaaggaattgtgagacaaaatttcagggaaaataagcagttccctgtcaacaaycccaaaaatcataagaaaataaggcaccatgggtgaaaaccaagagatgatgtaaacagcagaatcagacccacaaagtattcagaatacaaacttatcaaaagtaaaataacatggtttttttcttttttgttttttgttttgagatagagtctcactctgttgcccaggctggagtgcagtggcgcgatctcggctcactgcaacctctgcctcccgggttcaagtgattctcctgcctcggcctcctgagtagctgggactacagatacatgccaccacacccggctaattttttgtatttttagcagagatggggtttcactgtgttagccagggtggtctcaatctcctgacctcgtgatacgcctgcctcagcctcctaaagggctgggattacaggcgcgagcccccgtgcccggcctgttttttgatttttttgagacagtgtcttgctctgtcatccaggctggagtgcaatgatgtgttcatgtctcattgcagccttgacctcctgggctcaagctattctcccaccacagcctcccaagtagctaggactacagctgtgcaccaccatgcctagctaatttttttgtgtgtggagatagggtgtcactatgttgccaggctggtcttgaactcatggactcaatccatcctcctacctaggcttccccaaatgctggaattaaggcatgaactaccacacccagcctgtttaatgtttatttttttatttttatttttatgtttgagacggagtcttgctctgtcgcccaggctggagtgcagtggcacgatctcagctcactgcaagctctgcctcccgggttcacgccattctcctgcctcaacctcctgagtagctgggactacaggcgcctgccaacatgcctggctatttttttgtatttttagtagagacgaggtttcaccatgttgaccaggatggtctcgatctcttgacctcgtgatccacctgccttggcctcccaaagtgctgggattacaggcgtgagccactgcgcctggcctgtttaatgtttaaagaaataaaaaaaacaagccaggtgtggtggtggctcacacctgtaatcccagcactttgggaggcctaggtgggtttggagcaagccccccacagtctggccataaactggccccaaaactggccataagcaaaatctctgcagcactgtaacatgcccataatggccctaatgcccacgctggaaggttgtgggtttacgggaatgacggcaaggaacacctggcccgcccagggtggaaaaccccttaaaggcattcttaagccacaaacaaaagcatgagtgatctgtgtcttaagggcgtgttcctgctgcaattaattcggcacatcccttcgtttcccataagggatacttttagttaattcaacatctatagaaacaatgctaatgactggtttgctgttaataaatacgtggataaatctctgttccgggctctcagctctgaaggctgtgagacccctgatttcccacttcacacctctatatttctctgtgtgtcttttaattcctctagtgctgctgggttagggtctccctgactgagctggtctcggcaagtggcttctattcctgggggctcgaatccaggtcaaagggtcgcaggagcgacggttggaatggaaaactagctggaggacacctgagtactcttaaagcaatccccgtggtgagtaagaaggggagtccggaagcgtcagggtaacaatgggatgggtatggggtctggttcgtttcaccttagaactttttcacactgataaygaggaggaacaacagtatagcgaagtaacagaagaggttacagagcatgtttatttgccagctgaagctaaagcggcaaaggaaggagagtttcatccctacccttctgcatcccctcattattattttgaagaaaatgactccccagatctttcttttccggaggacactgggcgaaaagtagttgccccagtgactgttcgagcagcgccttgagcgacgtctcttagttctattcaggcaggaattcagcaagctagacaagagggtgatttagaggcttggcagttccctgttagaatacaccccccagatcaacagggaagtattacagctacatttgagccttttccttttaaattactcagagaattaaaacaagcaataaatgagtatggaccaggttctcctttagtaattggactgttaaagaatgttactgtttccagtcagatgattcctactgactgggacgctcttacttgagcttgtgtaactcctgctcagttcttacaatttaaaacttggtgggcagatgaagcttccattcaggttgctcgcaatgcccaggtccaacctcaaattaataggactgcagaccaactttcgggggttggcggctgggctggtttcgatgcacaagtggtcatgcaggatgatgccatggaacagcttagagcagtgtgcattagagcttgggaaaaaatcacttcaggtggggaacaatacccttcctttagtgctatagagcagggaccaagggaaccataggttgattttatagctcggttacaggagtctcttaaaaagatgattgcagattcggctgctcaggatacagtgttgcagttattagctttcgacaatgctaatcccgatggccaggctgctctgcgacctatcagagggaaagcacatttagtttattatatcaaagcctatgatggtatcggaggtaatctgcgtaaagctaccttgttggcaatggcaatggcaggactgagagtggataaaggaaatactccatttcctggagcttgttttaactgtgggaagcgtggtcatactaaaaaagaatgtagaaaaaatcagcgagtcaggccaccagataggggaaaaaagaaaactgctgatcctgaaatatgtccaaaatgtaaaaaaggaaaacactgggctagtcagtgtcactctaagttggataaagaagggaacccaatttcaggaaacgccatgaggggcccgtcccgggccccgctctaaaccggggcgtttctggctcaggccattccctcacccctgtacaatgtctgtcccctgccacagccggtagtgctgcagtagatttatgctgcacaaaagctgtgagccttctgcctgcggaaccccggcaaagggtcccaacaggagtctgtggacccttgccagtgggtacaataggattacttttaggaaggtctagtgtaagtttaaaaggtatacaaatacatacaggagtcattgattcagattacagtggggaaatccaaattgttacatctacttctgttctctggaaagcagagccaggagagcgcatagcacagctcctggttgtgccgtatgtgggaatgggaaaaagtgaaattaaacgaacaggagaatttggaagcacaaataaacaaggcaaagcagcttattgggtaaatcaaattactgataaacgtcctacctgygaaataactattcaagaaaagaaatttaaaggtttggtagatamaagaacggacatttcactcatttctgtacagcactggctgtctgcgtggccaattcaacccgctcaatttaacatagttggagttggtaaagctgctgaagtatatcaaagtagttatatattgcattgtgaggggcccgatggacaacctgggactattcaaccaattataacttctgtacctataaatttatggggaagagatgtattacaacaatggggagcacaagttctaattccagaacaatcatacagccctcaaagtcagcatacaaygcatgaaatggggtatgtccctggtatgggactagaaaaagatttgcaaggtttgaaagaaccrcttcaagcggaaaaacaaagttcccagaaaaacaaagttcctgctaaagattaggaaaaaatttttggtggcagccattgttaagcstccagaacctatacctttaaaatggttaacagataagccaatttggatagcacattggccactaagtaaagaaaaactggaggttttagagaaattagttgctgaacaattagaaaatgggcacrtaactccaacattttctccttggaattctccagttttcataattaagaaaaaatcaggtaaatggagaatgttaactgacttaagagccatcagttcagttatacaacctatgggagcattacagccaggattgccttctcctgctataattccaaaaaattggccttttaatagtcatagatttaaaagactgtttctttactatacctttagctgagcaagactgcgaacagtttgcatttacaattcctgcattaaacaacctgcagcctgctaagtgttatcattgaaaagtgttgccacagtgcatgccaaacagcccaacaatttgccagacatatgtggggcaagcaattgaacctacccgtaaaaaatttccacagtgttacattattcactgtcaactaaaaacattaaatgattttcaaaaattactaggggatattaattggatacgamctgctctaggcattcctacctatgccaggagtaatctgttttctatccttggaggaaatcctagtctcactagccctcggcaattagcaaaagaggctgaggcagagttacaactgattgagaagcaaatccataaagctcagataaatagaatagatccagagaagactctagatttgctaatcttttcaactcagcattcacctactggtgttattgtccaagaacaggacttagtagggtggctttttcttccacatactaattcacagactccaactccttatttagatcaaatcgctactatgatagggattgggagaactcggattgttaaattacatggatatgatcctggaaaaattactgtccctctcacaaaggcacaaatacagcaagcttttataaatagtcttacttggcaaacccatttagctgactttgtgggtattctcgataatcattttcctaaaatgaagctatttcagtttttaaaattcactaattggattctccctaaaataactaaatttaaamcaattgaaggtgctgagaatgtttttacagatgggtctagtaatggtaaagcttcttattctggctcaaaaagtaaagtttttcagacgtcctgtactcagctcaaaaagcggagcttgtagcggtaattgaggtattgactgcttttgatatgcctattaatgggatttctgattcttcatatgtggttcattccacacagttaattgaaaatgctcagttatgatttcataccgatgaacaactgatgataaaaacaaaaaaggtggaaaaatagggattacagaacagcccatacacaattgaatctagcattatttggtgaagagatccaataacaaaaagttgggaaataggtaaaataataayttggggtagaggttatgcttgcgtttctccaggccaaaatcaacagccgatttggataccttcaagacacctgaaaccttatcatgagccagatgccaaggaagagactctgggaggatccagaggaccccctggttgcagccacgtagagactgacgctgaggaggactccaactatcatgagcaacacccgtcgaacacagccaccccgctaagaacagatcaagaagctgtcacagatggcggaagaaaacctgaggaaagcgggacaaccagtcacaatgaataatttaatggtagctatgatagcagttatcaccactgccgtgagtattccttcaataagggctggtaataatgcctggatgcaatcattctatgacacagttacacatgctttctgatctcagtatttaccataataaatcggctcctataattgaggcataccaccctcaaaaacctatttgtaaacaggattggacccagttagaaaaaatgaacgtacttatttaggaagattgctttgcagaataggcagagatgctgcacaacgattcctatggaatcattactaattggtcccccaaggggatgtttagcttgaattgcacctctcagtctgcatgccacggtcacactatgttcagatgatctgaacaaaacagtcagatggtagaaatgttaagtacggcaaaagttcctattatctggaaccatggcggtatagtggcacctcaacctcaaataatatggcccgctctaggagctaaacataaggatttgtaaaaactattaaatgctcttaataagatcaaaatttgggaaagaataaaagagtatctagaaggacactctacaaacttgtttttggatatagcaaaattaaaagaacaaatatgtaaagcatcccgggcaacctgaccttaatgccaggaaccagagtgcttaaaggagctgcagaaaaattagcagctagtaacccatttaaatgggtaaaaacacttggaagctctgtgatttcaatgatgactatgctttttaatctgttgtttgcctttgtatagtctgcagatgcggatcccgactcctgcgagagtctctttgcaaatcgaagaagggagacatgttgggagcaagccccccagagtctggccataaactggccccaaaactggccataagcaaaacctctgcagcactaaaacatgtccataatggccctaacgcccaatctggaaggttgtgggtttatgggaatgagagcaaggaacacctggcctgcccagggcggaaaaccgcttaaaggcattcttaagccacaaacaaaagcatgagcgatctgtgtcttacgggtgtgttcctgctgcaattaattcagcccatccctttgtttcccataagggatacttttagttaatttaatatctatagaaacaatgctaatgactggtttgctgttaaatgaaggggtgggttgcccctccacacctgtgggtgtttctcgttaggtggaacgagagacttggaaaagagacacagagacaaagtatagagaaagaaaagtgggcccaggggaccagcattcagcatacagaggatccacactggcaccggcctctgagttcccttagtatttattgatcattatcgagcatggcaggataataggataatagtggagagaaggtcagaaggtaaacacatgaacaaaggtctctgcatcataaacaaggtaaagaattaagtgctgtgctttagatatgtatacacataaacatctcaatgccttaaagagcagtattgctgcccgcatgtcatacctacagccctaaggcggttttcccctatctcagtagatggaagtatattccatgtaaagtaaatcggctttacacccagacattccattgcccagagacgagcaggagacagaagccttcctcttatctcaactgcaaagaggtgttccttcctcttttactaatcctcctcagcacagaccctttatgggtgtcgggctgggggatggtcaggtctttcccttcccacgaggccatatttcagactatcacatggggagaaaccttggacaatacctggctttcctaggcagaggtccctgcggcctttgcagtattttgcgtctctgggtacttgagattagggagtggtttgagattagggagtggtgatgactcttaaggagcatgctgccttcaagcatttgtttaacaaagcacatcttgcacagcccttaatccatttaaccctgagttgacacagcacatgtttcagggagcacagggttgggggtaaggttacagattaacggcatctcaaggcagaagaatttttcttaatacagaacaaaatggagtctcctatgtctacttctttctacacagacacagtaacaatctgatctctcttttccccacagttaataaatatgtgggtaaatctctgttgggggctctcagctctgaaggctgtgagacccctgattttctacttcacacctctatatttttgtgtgtgtgtctttaattcctctagcgctgctgagttagtgaccgagctggtctcggcagaggtgggcgggtcttttgagttcaggagttcaagagcagcctggccaacatggtgaaaccccttctctactaaaaatatgaaaattatccgggcatggtggtgtgcctctgtactttcagctactcaggaagctgaggcacaagaattgctggaacatgggaggtggaggctgcagtgagctgagatcatgccactgcactccagcccaggcaatagagtaagactctgtctcaaaacaaaaagagttttaggccaggtgtggtggctcacgcctgtaatcccagcactttgggaggctgaggtgggcagatcacctgaggtcaggagttcgagaccagtctggccaacatggcgaaaccccatctctctctactaaaaatacaaaatttagccaggtgtggtggtgggtgcctgtaatcacagctgcttgggaggctgaggcaggagaattggttgaacccaggaggcagaggttacagtgagcagagatcgtgccactgcattccagccggggtaagagagcgagactctgcctcaaaaaaagaaggcttagtgtgcaactcatcagagttgcacagggcagagaaagaatgggaaaaaaacaatttctagaaaacttttcgaattttctgatcaacaccaaatattccaaataggaaaaatacaaaaaaatccatacctatatgtggcataatatgattgtagagcaccaaagtaaaagatcttattttttattaaaattaaaaaaaaattaaaatagagggtctcactatgctgcccaggctggtcttgaactcctggcttcaagctatcctcccaccatggcatcctaaagtgctgggattgcaggcatgagctgctgcatctggcccaaagtaaaagatcttagaagcggccagaaaaaatagatttgggctgggcatgaatagattgatcaccaaaaaggtggcagactaacttctcgacagaatccacagaagccagaaggcagtggaacattagctttgatgtactaaaataaaataccacgctaggctcctacatacagtgaaaatgttttgagaatgagaattataattttttggcaaacaaaactaaaggagtttacaactaagaaactcttttgtgagacagccttgctctgttgcccaggctggagtgcagtgacgaaatctcagctcactgcaacctcggcctcccgggttcaggcaattcttgtgtctcagccttccaagtagctgggattacagatgtgcgccaccaggcccagctactttttatatttttagtggagatggggtttcactgtgttggccaggctggtctcaaactcctgacttcaagtgatctgcccgccttggcctgctaaagtgctgggattacaggcatgagcgactgtgcctctccagtccctgtgtttttttttgtttttggaggttttatttgtttgtttttagagacactttcactgtgttgcccaggcctgtctgttggcctcaagtgatcctcctgccttggatctcccaaagtgctgggattacaggtgtgaaccactgtgctcagcccattttttatttgtttcttgaaggaaggtagcagtattaattaattttggactttgctcactaaagtttgaatgttaagaatagatgtatacagtctggatgcagtggtgcatgcttgtaattttagcactttgggaggctgaagcgggaggatcgcttgggctcaagagtttgagaccagcctgggcaacatggtgaaaccttgtctctacaaaaaaattttaaaaaattagccagacatgatggcatgcacctataatcccagctacttgggaggctgaggtgggaggattgcttgagtccagggaggtcgaggctgcagtgagccatgatcacaccactgcactccagcctgggtgacagagtgatactgtctcaaaaaaaaaaaaaaaaaaaaaaagaaagaaaaaagtagatatatatgagactcacttgggcaacatatggagacctagtctccacaaaaaaatttaaaaaattagctaagtatggtggcatgcacctgtggtcccaactacttgggagggtgaggcaggagaattgcttgagaccaggatgatcccttgatcctggcagggggtggagttgaggccgcattccaacctgggcaacagagtgagaccctgtctcaaaagataaataaaaaagaatagacatataatatgtaacttccaaacaaatgaaagggaaataaaggagtacgagaagaaaggcaaattcaatgatccaaaacaaagtgagaaaagagaaaaacaaaataaaaatgaaaaaggagaggttctgcttgtaataggcgaagtagctcctatcagatcaaccttcataccggtaacaattatgagctctgaacaaaaacaaacaaaaaacctcctgaagactctggaaagagagcaaaaacagggagaacctaaagggaaaccgacagttacaagaaaataaatagctaccgggtgcaaaggatatttaaaatctcacaaacatgataattgaaccaaagaagtcagaagaaaggagtctgtgttttataattccatttatatgaagtatgaaaacaggcaaaccatattaaaagtcaggatagctgttcccctgacgaggaggaggatagcgattggaagtaggacatgaggaggatttctggggtcctggtaatgctctatttctggatctgggtgctggtttcatgggtgtgctcacttggtgaaaattcataaaaatagacatgacatatgcaattttttgcttcagtacaaacttaaaaatcaaaagggagcagagacaagatggacaggcaggcagggcagactgtgaaggggcctcaatgccagactaaggagcttgacgtgaccctggcagcagtggaggacgctgaaggtgttaagaggggaaatgagttgtcagggaagctgcctctctgcctaatgcgggtggctaggagaggggaacacctgccctgtgggacattatttacaggactggccagaatctgggctttcaatgacgaagatctgagctaggatggagggtgtgaggttggaggccaaggatttggaggtaaaattggaaggacttgggagtttacatgcaggaggccagagaggaagagggaggagtcaaaaacgatcattggaagaggcttttcactggagataaagagtgagggaggggacgctggggaaagaagtaagtttgagggaagaatttgtttttttttttttaatcagggtcttgctctgttgcccaggctgtagtgcagtggcaccatcttggctcactgtagctcgacctctcagatgctggtgattccccccacctcagcctgctaagtagctgggactacaggcgcatgccaccatacctggttgatattttttaatttttatttttagtagagatgaagtctcactatg

SEQ ID NO: 95594 - DNA, 26328 bp, Homo sapiens
caccctggctaacacagtgaaaccccatctctgctaaaaatacaaaaaattagccgggtgtggtggcatgtatctgtagtcccagctactcaggaggccgaggcaggagaatcacttgaacccgggaggcagaggttgcagtgagccgagatcgcgccactgcactccagcctgggcaacagagtgagactctatctcaaaacaaaaaacaaaaaagaaaaaaaccatgttattttacttttgataagtttgtattctgaatactttgtgggtctgattctgctgtttacatcatctcttggttttcacccatggtgccttattttcttatgatttttgggattgttgacagggaactgcttattttccctgaaattttgtctcacaattccttgaggcctggattaaagctgtgttcttcttcttttttttttttttttttttgagacggagtcttgctctgtcgcccaggctggagtgcggcagtacaatctcggctcactgcaacctctgcctccccggttcaagtgattctcctccctcagcctcccaaatagctgcgatcacaggcatgagccaccacaccccgctaattttgtatttttagtagagacgggatttcgtcatgttggccaggctgttctcgaatgcctgatcttgagtgatccgcccgccttagcctcccaaagtgttgggattacaggcatgagccactgcacccagcctctatcttcctcttaataaaacatgtttttgcttgtagtagttatcttggggcactaccgacatgaaactactttaaataaaattccaccatttagagtgctgagaccacctaagcagtacaaattcatgacagtgtcaaaataggcaaatgggtttcttttttccttttttggggggggggggcgatggggtcttgctctgatgcccaggatagagtacagtggcaccatcctcccacctcctgggtagctgggactataggcatgcaccaccatgtctcgctaatttatttttttattttgtagagatgagatccctctgcattgcccaggctggtctcgagctcctgggctcaagcaatcctcccacctcagccccgcaaagtgctgggatcacaggtgtgagccaccagttctaaaaatgacagctccatgtctgaaatgttggagcctctgaaccacccctggtttcacctcccctgtaacatgcaatggtatgggagtggggagagtatcagagtaacccacataacacagcctgaggcacacacttccctgggccatttgctgttctaagcaatgcagtgtgggaagtcctgtggctctgccggggtgcaggggtgagcagtgctgaaacaggacagcctggatgcagaggcagtcaggcctccagaaccatttctcaactccagcctccagccacctcccaaatgcaagctgagtgtggcgctccctgcttatcccatgggtaagggctccccaacccatccaggttgaagccaaattctttatcagggtgacccaggcctccggggctccccagtctcatttctctccccctccgcctccccacatttcccacctgctgctccagccacaccactcacgctcccaaacaggctcttctccctcatgcctgtgccctctcccacacacactgcaccctttgtctggaaggtcttccctagcccccgtccctgatggttctccgagtcagccaagcctcttctgaaagcctcctggcccacccaggagtttggggtttctaacctgtgtcttctccatcctgcatgccccaacctgggcccactgccactttccatgtctgacatccttacaggctataagcctgctctgtgtttttgatgtgcaccagctctattaataaaatggctgtttcacatctgaaatgctggagccccctgacagcccctgctttcttctctcccacagtatgccacggggtggatccccagagcctagcacagtgcctggcacagaatgcatgctcagtaacttgtttagtaatttatgccccacgagaagtgtcacagacaatggaggagtcttcacagcttggagtcggttccagggctgttcctcctgccaaaaaccagagccagatgaagtctctttcctcccagacatcctgcagagctctttggaaccaagagagtggcgaagctctgtgcctcagagctcggctcgccggcctctttcccagggaggacaggtgacacacggcccgcggagttggaatgacagggcatgggcatccctttctgctgcaaactgactctggctcccttctgtgaaaaaggggcataagaatgccttcctcggctgggtacagtggctcacgcctataatcccagcactttgggaggctgaggtgagtggatcatttgaggtcaggagttcgagaccagcctggccaacatggtgaaaccccgtctttactaaaaatacaaaaattagctgagcgtggtggtgcgcacctgtaatcccagctacttggagactgaggcaggaaaatcacttgaacccagggggcagaggtcacagtgagccaagattgtgccactgcactccagcctgggcaacagagcaagactctgcctcaaaaataaataaataaataaaagaatgcctccttcataagagtgtcacaaacactaaataagcagcagttccaaaatgagaatggtttgtgcagggggtgccctcatggaccgtaagaactaagttcttgatttttctttcaaaaatagatttgtccagcattgctgttaaatattcttgccaaaataagtgactgtcccattgtaaatgggtgtgaataagaagggacaagtagatggataaaatcaggcagataggcccacagtcagcctgacctgcatttgaacttaacatagaggtgacttgggacaagtctcgacctctccaagccttgatttctttgcctgcaacatggggacatgagagtcatttggcagtgttgtgtgacaagtggatgaaattaaaatgtgggacactttgtaggaaatcacaaataatattattaataaaagcagaaaaaatgcaagccagactaggtgagacttatcagtatggggcttggggacaaccctggagtcacattgtataattctagtggtttgttgttcctctagacttcttttcttttcttttcttgtcttttctcttttttcttttcttttttttgaaacagggtctcactctgtcgctcaggctggtggtcaatggtgcaatctcggctcactgcaacctccacctcccaagttcaagcgattctcctgcatcagcctgtactgtaatcccgagtagctgggattacaggctcgtgccactatgcccagctaatttttgtattttagtagaaacagggtctcactctgttggccaagctagtcataaactcctgacctcaagtgatccgcccgcctcagcctcccaaagtgctgggattacaggtgtgagccaccatgctggccttttcttttctttttttctttctttcttttttttttttttgagacagagtttcactcttgttgcccaggctggagtgcaatggcacaatctcggctcaccgcaacctccgcctcccagattcaagccatcctcctacctcagcctcccgagtagctgggattacaaacacgcgccactatgcccagctaatttttgtattttttagtagagatggggtttctccatgttggtcaggctggtctcgaactcccaacctcaggtgatccgcccacctcagcctcccaaagtgctgggattacaggcatgagccaccgcgcctggctcagcattttcttttcttttttatggccaactcttaaacagaaatttcctctagactttaactgtagagtaaagcatatgtggttgttactcgagatgtagcttctgtcattctgttaactttttgcggctatcataatatcccagttaacacacccttccatgccttattacagaagggatctgggtgaggcccagttagcatttggatcctggagtccggagtgggtggcctgagagagcagccccaataagaaaggggactcacaaaaatgttcctgcttgtctacagcccccttactgtctcctgagcagaccccagagcactgaccctgctccattccagccagcagccctgacacctcaccagggcctggctcctggcagctgctgagtttgttgagttgatttggagaatgagccagaagcccagacagactagatctccctctctccagaggttccaagaactgagaattgagcctgggctccagggctggctctgcctcaggtggcccatcacagtctcacatttccggatatacacagtggtggggagggggtgttgaatggggtcctgtccatctagcagcccacagcttgggtctcgttggatccctgtaggcataccacacatgccccgaccagccaacagaacctccctgtcctcaaacctctccctcattgtcccccttcaccacatcacctcccaaccagcacccccagactcaccactcacaatgcccaccgttccccacatcctacagaatagcaccccctgagcaccaggtcctcctgctcccatcctcactttgtcccagtgcctctccctcctgtaccttcagcctctctggtctttcctggcccctctaaacaggctctgctctgacctctgccctccccactgatccagggaaactgtcctggccagcatcgggggccttgctgtccttacagggctccatctcccagcctggctgaccactcctttcttcttgaccttcccattgacacccctcaccgccctctgctgtcccctttcctctactaatgcctcttcctccaactctccgcctgtcagtggtccccagaagtcagcctccatccctttctctctttgctttggccagaaaatgatgctcatgcccttgtctttggccctgatctcagtcctgagcccacagcctctatatccagttccctcctcgggraggccgaggcaggaaaatggactcaggaatgacccacgacaagccccatgaccaaaatccctcccaccctgcccctccacccctcagtcccgaccatctgcccacctgggcatcattctagacaccctttcacacacacaatcaaagccaccaactgcccggctctgcctcgggtggcctatcacagcctcacattccggatctctctgtgagccccaatgtgtagacgctgaagtctctgtgcacattacaggtgattcctggactcgtttaaattctggggtcctcagaataggggcagcctctaacttgcttcccataccagggcccccagaactccctctgcatgaagtggtgactcagccccttccccatggactcgctgccccagaaccggcctgcagtaacccakgccagcatgccaggactatccatttctatcccaggtagataatctgttaaccataatctcagatgaaaggaagattattgccccttacgcagatctaatctgtctttgtcaccacccttgcctgataatgcaggattccctgagggcagggcagaaagcctggagttagaaagggaaagaacagaatgttcgggatcacccagtctagtgcctccttttacacggaaggaaatgatgcccagagaccggcagacacttgctccaggactccagaaaagcaacaggggctgggattggtctcctgactcccaagcaggggcagacagccaggggtcggggctcggtccaacattctctgctgcctcttactgtgctcaaaggtcattttagatatggtagatattctggttagcctgttaagatcctgggagggtgtggggaagaggattggggcggggagggaggaggggcttcaggggttatctccagaggggatattacagggctgcagagcagaccaggcccggtggagaattaggtgctgctgggagctcctgcctcccacaggattccagctgcagggagcctcagggactctgggccgcacggagttgggggcattccccagagagcgtcgccatggtctgcagggagcagttatcaaagaatcaggtcaagtgggtgtttgccggcattacctgtgtgtctgtggtggtcattgccgcaatagtccttgccatcaccctgcggcggccaggtaggtgcctccccccatgtcatcctgagtggcttccctcatcgctcgctccttatccccacttctcacttacagctctgaccagtcccttttttttttttagacggagttttgctcttgttgcccaggctggagtacaatggcacgattctcggctcactgcaacctccgcctcccaggttcaagcgattctcctgcctcagcctcccgagtagctgggattacaggcacccgccaccacgcccagctaattttttgtaattttagtagagatggggtttcaccatgttggccaggctggtctcgaactcctgacctcaggtgatccacctgcctcagcctctcaaagtgctgggattacaggtgtgagtcatcatgccyggccaaccagctcttcttgagccctcgtccccaccaagcctcattccccatccacagctctttctctcttccatcccccaaccctacatgacttcatccccagcagaaagtcccgttgacttccccagcagaaagtcccgttaactattttttttgagacrgagttttcactcttgtcccccaggctggagtgcaatggtgcaatctcaactcactgcagcctcggcctcctggatctaagtggttttcctgcctcagccccacaagtagctgggatcacaggcgtgtgcaaccatacccagctaattttttgtggtttttttttttgaaacggagtctctctctgtcgccaggctggagtgtgatcttggctcactgcaacctccgcctcccaggttcaagatattctcctgcttcagcctccggagtagctgggactacaggcgtgcgccaccacgctcagctaatttttgtatttttagtacagacgggtttcaccatgttggccaggatggtcttgatctcttgacctcctgatctgcccatcttggcctcccaaagttctgggattacaggcatgagccaccatacctggcctttttttttttttttttttttttgagacagagtctcactctgtcactcagcctagagtgcggtgacatgatatcggctcactgcaacctccaccccctgggctcaagcaattcttccacctcagcctcccaagtagctgggattacaggtgggcaccaccacaccagactaaattttttgtatttttactagagacggggtttcaccatgttggccaggatggtcttgaactcctgacctcaggtgatctgcccaccttggcctcccaaagtgctgggattacaggcatgagccactgtgcctggccccctttaactttttttactacttcacttgcctgaagaccatcagatcttggctttcagcccagaccttcctcctgtgcccttcttgggagtcacacaagcaatctcaaactcagcagactaggctgagctcatctcttccccccaacagctgctcacccctgcagcctctcagtgaagggctcctccattcacacaggtacctggagtagccaccatgcccccacctcatgcctgtgttcctcagtcctgagcctcaagggctctgcctttctgccctctgccctccagccctccagccctgccctgtgagaagcttcgaagtctcctcctggacccctcttacaaggtccctctgcctgcttttgtcagctcctgttagctctgcagcccagatctttccaagcaaccctcgctcactgccctcagcacacagcaactcctttgctaaagttcgaggccattcacaacctgatcccaacgttcttccaatcttttatctttttttaaaattttatttatttatttatttattttgagacagagtcttgctctgtcgcccagactggagtgcagtagcatgatctgggttcagtgcaacctccgcctcccaggttcaagcaattcttttgcctcagcctccccagtagctgggattacaggcatggaccaccacgcccagctaatttttctatttttagtagagatggggtttcaccatgttggccaggctgatcgtgaactcctgaactcaggtgatccgcctgcctcggtctcccaaagtgctgggattacaggcgtcagccgccgcgcgcaggtttttttttttttttgagacagtgtctcactgtgtcacccaggatggagtgcagtggcatgatctccggctcactgcaacctctgtctcccaggttcaagtgattctctgccttggcctccccagtggttgggattacaggcgcatgccactaaacccaactaattttttgtatttttagtagagatggggtttcgccatgttgcccaggctggtcttgaactcctgagctcaggcaatccacccacctcggcttcccaaagtgctaggattacaggtgtgagccaccaaacccagccttttttttttttttttttttttttttttttttgacagagtctctttgtgtcatccaggctgagtacagtggtgcaatctcggctcactacaacctccacctctcgggttcaggtgattctcctgcttcagcctcccgagtagctgggattacaggctcctgccaccacgtccatccmgctaatttttgtatgtgtagtagagacatggtttcaccatgttggccaggctggtctcgaactcctaatctcaggtgatccacccacctcggcctcccaaagtgctgggattacaggctcctgccaccacgtccatccagctaatttttgtatgtgtagtagagacatggtttcaccatgttggccaggctggtctcgaactcctaatctcaggtgatccacccacctcggcctcccaaagtgctgggattacaggcatgagccaccatgcccggccccctcttccaatctttccacattccacttttatgttccatctctaccaggccaatggctcttcaggcaactgcactctcctgaagccaagcctttgctttctctctgtctggaataacctattctcccttgtctgtgaaatttacacccatccttcaaggtcttccttaagtgttcccttctctgtgaacctgccccctttcctgactgcctcaggctggtaatgaggcttccttgggccccaggagcccattcatttccctctattgtagcaccagtgagtctgagcctcaccgtccctctgccagatggggtactggacacagtgggagcccagggagggtcatgggatgaacgaacatgagtcttgggctggggcgaggacagacgctaamagccccttgggattccttccaggctgtgagctggaggcctgcagccctgatgccgacatgctggactacctgctgagcctgggccagatcagccggcgagatgccttggaggtcacctggtaccacgcagccaacagcaagaaagccatgacagctgccctgaacagtaagtccagctgccaagactgaggcaggccagggcaagggatagagaagacagagggagagaagtgaggatcagacactggtcactgtggtggcatgatggctgtttacatgtctttcagcatgaggaaataggggctcagaggggttaagtgaccagctcaaggttgtgcagctgacaaactctgagcttagatttaaaccacatgtctgactccaaagtaatgactatactgtcctccctcccagctaccccttcctcgacctgtcagggaccaaactgtaaggaagcctttaccttcaaagcctcaagaagccagaaatctgcacttcaaaaatggttacagtaaccagttggccaaggctcactgggcgcacattacacacaggttctcctgggactaccatgcaatctgtttcatgggtaacatttcacaggagaaaaatagaggctcagaaaagttaggtgacttagccaaggttacactgtctgaaagcagttaagccaacattggagcccagagtggtcagtcccagagtgcacgctccaagccactgcgtgacgcttgacccccaccctctccttcagggctgttgggaagctcagtagataatgttcacgaacatgctagtgaactttaaagcagtagctataaaagatgaagggaacagtcctcaaacctgggcacgtttcagaagacacaggctgctggccccaccctcaagtgatgctgaggctgctggccccaggaccaactttgagaatcactgctcaagcaaactccttccatttcagacaaggaaactggggtctgagggctggtagaatgaccaaatcaaccaaagcagggctcttttgaggtcattattaataattacgctgaagcaacagaaatataccagatggccccttacactagttaagcaatcaactccatataaataattaacacttagtgaatgcctaaccagggatattttattatttaattcttgtagatgaggaaacaggcaaaaaaagatcaaataaccttcccaagatcacacagctggaaagtgttagggtggggactggaagctagcagtgtcaattcacggtctgcacacagccaccgcgagctcctgcagatgggtaaagctggcacaaggagggctattgactccatgtccccttccctcctgaatatggcttcctgaggaccagggctacagctgtggccacaggaaacaaatcctttcctctcatctctttctcctccttcacttcccacccccaagcaagtcagcccccaggttcagcctctggaaggcaagtcacaatttttaaggtgaaaagagtttttgtttgtttgtttgttttgagacaggatcttgctctgttgcccaggctggagtgcactggtgtgatcttggctcactgcaacctccacctcccaggttcaagtgattcttcctgccttagcctcccgagtagctgggattacaggaacccactaccatgcctggctaatttttgtatttttagtagagatgggttttcaccatgttgaccaggctagtctcgaactcctaaactcaagtgatccgcccttctcgggctcccaaagtgctaggattacaggtctgagccaccgcgcccggctgaggaggtgatttttttaagccaacactaaaggatgagcaggaggtgccatagtaaagttgagagaagagtgttgccaggcaacagcccagagatggggaggacaaaacaaattaaagccttgctacccaacgtgtggcccatggaccagcagcaggcgcatccctggggagtgtgttaaaaatgcagaatctcgggccaggcctggtggctcatgcctgtaattccagcagtttgggaggctgaggcgggtggatcacctgaggtcaggagttcgagacaaggctgactgatatggtgaaaccgcatctccactaaaagtacaaaaattagccgtgcatggtggtggtgcatacctgtagtcccagctactcaggaggctgaggcaggagaatcacttgaacccagcaggcagaggttgcagtgagccgtgatcacgccacagcactccagcctgggcaacagagcgagacttcataaaaaaaaaaaaaaaaaaaaaaaaaaaaaaaaaaatctcaggccctgctgcagacctagtgatcagaacatgcatttttacagttcctgggggatctatgtgcacattaaagttggagaagctgggtgcctggaactcagagaatgaaggagagtggaacgtgagatgaaattggaaaatctggcaggccctgattgtacagaccacgaagactatgataaagagtttgggtttcaagtttagagcaatgggtaggttttctggcctttttttttttttttttaacagaaagtgacatgatcaggtacatatttaggacactcactttgccggctctatagagaacagacttgcagggaagcagtgctagaggtgagaagaatggtcaggagtcagggagaaagcaggagaaaaggccccttctggcatcagtcgtttgtgatgctgcaagggccaaaagcggcccctctcccctccactayactcttcaagtgtgagtgccccttgcatgattatctagagacagcttcccattagaaaggtctgagctccctactagactgaattcttgaaggcaggaatcagaagatgtccacctgattgagttaactatgtgaagctaaaagataactcagtgtcagtgatgatgtggtgagatgggcaaccttgtgcaggaacaagaatcagaacaacttttccggaaagcagtttgataacatgggctttaaaaatgaccctgtgggctgggcactgagactcacctgtaatctcaacactttgagaggccaaagtgggaggattgcttgagcccaggagttcaagaccagacagggcaacatagcaagactaatagcaaaaatcagaaacttaccaaagcatctcagggatgggggatgatcaactacatagtagtgaacaccctcaaccagggcttttgaagctttttgcttttttgccttgtttgctctaaagagatgcataaaaaaagatcgtggaaatgtgtcataatgttgaaaaaacataaaaaattataaatgcagtggagtctcaactgtgtaaaaactatgcatagggccgggcacggtggctcacgcctgtaatcccagcactttgggaggctgaggtgggcggatcacttgaggtcaggagttctgagagcagcctggccaatatggtgaaaccccgtctccactaaatacaaaaattagctaggcatggtggcacacgcctgtaaattccagctacttgggaggctgaggcaggagaatttcaagaattgcttgaaactgggaggtggagcttgtagtgagccaagatcacaccactgcactccagcctgggcgatagagcaagactccgtctcaaaaaaaaaacaaaaacctatgcatagaagaaaatggaagaaaaaaaatcatcgaaatgtgaaactatgatggaagtgtgggtgaatattttcctcttccacttttctgtatttctcaaatgttctgtaatttgtaatgcttttatgatgagaaagaagttttctttttttaaaaaaaggaactcactgagttgttgccccttccacaggcaacatcacagtcctggaggctgacgtcaatgtagaagggctcggcacagccaatgagacaggagttcccatcatggcacacccccccactatctacagtgacaacacactggagcagtggctggacgctgtgctgggctcttcccaaaagggtaagggcctctctggaaaccctctccggcccccagccctctggccctggggcagcatgtgcagagatccctcactgggaagcaagtccagccctgacacgaggtgctcattgccttggctttctcatcacaatgttatagatgcccaggctcagtgaggactaggcgagatggggagcatgtcagtgcaggtcctggtgttttctcctggacacagaggggagacagccggcagtacagtgtgaactgcaaagtgccgcgcatgctcagagtgctccctcctgtatccacagaactggacgtaacatgttcaaagcccagccccacccttcccctctgcaccccttcaccagtcacagtcagaatccaggcgtcaccataatgcctccctctccctcatcctcacggcaactcagttgctgcatccaccaatcctaacccctaaccctgcccccatctagtcgcagcaacactgtatctctccaggacctccctcctcactggcttcctgccccaaattcagcccttccaggcttcccttgactaccatgaccacacacacgcacctgaaggatcttttcaaaacaccagttttgtcatgccacgcctctcttttaaccctccgtggctccccattgtcctcaggaaaaagtgtgatcttggcctggctttcaacatccctctatatcttcctagcctcatctcctcaccaccctgaaaagtaccaagtcctttctctgcagagatctcctcctctactcaaatgcaccttcttggaggctgagtaacctccctacaggctctggtggtttaggaccctctgagtctgccctgctcaggaaccacaggcccttttcagcagagacttgattcccagctgcagcagccacaagcccaagtccttacctggcctctgtttcctccccgcaggagatgggaactcctctagaggcaggcccttcttctctgagttagctctgtctcttcgaaaggccttcctcacaccctgcagggatgtggtgctggtccttccgccctcccctgactccactgtgcaygcacacgcacayacacacacacacacacccgctctgctttctgcccagggagtcatgtattcctagttccttcgccatttccccaagcccttgttcctttccccacaggcatcaaactggacttcaagaacatcaaggcagtgggcccctccctggacctcctgcggcagctgacagaggaaggcaaagtccggcggcccatatggatcaacgctgacatcttaaagggccccaacatgctcatctcaactgaggtcaatgccacacagtgagtgttcgcctctctgtcccagctgtgtccagccctcttctgtcaacacctaccacaggatggggatcttaggggacctctgagtttgtctccaatcatactatatatagcctcacctctgagcctttgcacatgctgttccctcttcctccaatgcctttccccccttttctgacaaaccactggccagtcattatctcctagaaacttccttgacatcttaggccactgcaggacttcctctgggcccctcaacccctacacttccttctaacacagccctgacttcatggggctgtcactgggtgttcatagatttgtcacccctactacattgaactcctggagggcagacagggccaagtgcccccttgtattccccagtgaccagcacaggatttggcctgctagagaagtctaaaaccttgattccttccccagctggaattcccctcatgaattccagcaccgctgctcacagccctcacatacagtagttgcacagtgctctacagtttacaaagagagagaatgtctttgatctcatccttacatagcactgccaggttagggctttctccccatattgcagatgataaagctgacaatagtggaagctcaatttgttcgaagtttattatgtgtcccagaactgttttaagcacttgacttgcagaacaccgtttaactcttatgagaatgaggtaggtagtattactttyattttattaatgcaggaactatattatagaagttaaaagacctgcctaagtctggtaagtggcagagcaaagattcaaacccaggcctttctgattctaagctccaggctctttcccatccatctcttcctccatccatccaatttattattgtgcttctcaagctgaggtgccttccaaaaatagcagtttggaaaatgtaatcaatggcccaagataaatatgacctgtcttcctggagtgctaattttactcagtagggtttttttgggtgggcagtgggtggcaacataatttgcctattaaagtttgcatcttttgaagaagaaaagtacaaagaaaaaaactaaaatattttcatcaaggcaaagttcaaataaaattttaggctgggcacagtggctcacacctataatcccagtactttgggaggccaaggtgagyggatcccttgaactcaggagtttgagaccagcctgggcaacacagcgagaccacgtatagaaagaaaagagagaaagacatgaagggaagaaaagggagggagggaaggagggaggaaagcaggaagacaggaaaaaaagttttttttttttgagatggagtctcactctgttgcccaagttggaatgcaatggcacgatctcagctcaccacaacctccgcctcctgggttcaagcgattttcctgcctcagcctcccaagtagctgggattatagccatgcgccaccacgttcagctaattttgtatttttagtagagacagggtttctccatgttggtcaggctggtctcgaactcccaacctcaggtgattcacctgcctcagcctcccaaagtgctgggattacaggtgtgagccaccacacctggcaggagggagatttttaaagaaaacctgagaaacttcagagactcccagctggcagagctcagattcccacacgctggggctctgagtcagtttcctgtctatatgaggatgtttaagaagcctgccctgctggaagggatgctgtctatgaggytgagttacctgcccaagatcagaatcaggatctgaacccagacttccctgactccaaagtccacgcccaatttatgggacctgaaacaagccattctgtcctttgggactctgcttctgaccttatcatagatccaataggctctgccactccctagcactgtgatgagaccccagaggagaggaaggggccgctgcagctccgtgagaccaacatctctgatttttttgcaggttcctggccctggtccaggagaagtatcccaaggctaccctatctccaggctggaccaccttctacatgtccacgtccccaaacaggacgtacacccaagccatggtggagaagatgcacgagctggtgggaggagtgccccagagggtcaccttccctgtacggtcttccatggtgcgggctgcctggccccacttcagctggctgctgagccaatctgagaggtgaaaaccaccaaacccacccccaccctcctggaggcactgatgcccccagcaagatcccagaagctcatggctggaagggtcttaaaggtcatttcgtccaacccctgccrgtgctcatgccctctgcagagtccctgctttctgcttgcatacctctggtgacgggctactcactacctcccragagagccctttcattggtgggtaattctctgccctctggaaaatatttataccaagacacaatttgtctccccacagcttcctccaataggagcccgctgtrcccctggggctacacagattgtgcctttaacccctgccctaggatagccctataggaatttagagactcccctgcccccactataccccctaccttccataggactcccaaagctgccccctccccctcttgatgcctgacctacccttccacaccctcccccatctgtyctgcccctttcctaagacaggactcagaaatagacactgcaagtgaggaggcagcacaggctccccctccctcctgggcctctgctttcagtcatctttcctgaattccctctggctcctgcccttgggaaggggtaggactcagggagaagtggcaggtgggcgactggaggacagatgctctaccctgcgcccagctgacatccagttctgagcacaggagtggggctgagggtcttgctgggcccagacaggcactgagccagctctcgtgtccccaggtacagcctgacgctgtggcaggctgcctcggaccccatgtcggtggaagatctgctctacgtccgggataacactgctgtccaccaagtctactatgacatctttgagcctctcctgtcacagttcaagcagctggcctgtaaggagaggaattgggaagggtggtgtgggctggattctgcatggagcagcacctggtgggcactggagcagagctgggtggaagggatatcagaagggggaaggccggggtgggacaggaggcggctgcattttgtgtgccaggccctgggatggtatgctaagcttcaaacatccattttatttttatttatttatttttttgagatgtagtctgactctgtcacccaggctggagtgcagcggcgcaatctcggctccctgtaacctccgcctcctgggttcaagcgattctcctgcgccaccatgcccggctaatttttgtatttttaatagagatggggtttcaccatgttgggccaggctggtctcgaacttctgccctcaagtgatccgcccgccttggcctcccaaagtactgggattacaggcatgagccacctgcctgacccacacattcattttatagagaaactgagggattccattttatagagaaacagcggctcaaaacagttcaggaatttatacagtcactcagcttttatgtggcccagcaggtaggaaaccagcaaattccaaaccccccattatttcccttggtgcatagctccactgctggttactctaatgtttcagaggcctccactgtattcattaagcagtgatcagatgccactatccaaacccctcattcccttgaccccgaacccagaagagccgcagttaagccatctcaaagaggccccatcagactcagcattcctgccatgggagccacctaagcgagcgggaaggataccagctctggagccaggcagacctggtcccatcaggttccactccyggcaactttgcttactgcttataagaccttgggcaagtcacttcttctagtctacaaggcaaggaaatgagagctacttggcagggtgctatgaggcttagagaggatgcccgtagagctgtggcctatgggaccctagcaaccaggtaaggtgttctgtgaatggcagccacttcaccttggcgatttggggccccacagtgaatgccacacggaaaccaatgtactacacgggaggcagcctgatccctcttctccagctgcctggggatgacggtctgaatgtggagtggctggttcctgacgtccagggcagyggtaaaacagcaacaatgaccctcccaggtaaggtctacccttcagccccggtgctcccagctcatctgcaggggtgtcctttgcttggggcaggtaccgccggtctctgttgccatggyaacacaggtttatttacaccataccctggatgcaaggtggggcagggttgcggggagggagagggagtacagtgatgtcaagagcacagggctcctggccttcagaccagtcctcagctacattgctgcaggcaaggccggcaccagcccccaggctgagtcatgggtaaaggccaagagctgaaacaagagtttctcatgcaccaggcacatttataaagcaacccatccacctggagcccaaaactgggttgacagattccagagaggcaaggtccttgatgaccccataactcccactgcccctttaacaagggactcttaacaccttatgataacccaaatcctaaacactgttgcctctgccgcctcttccagacacagaaggcatgatcctgctgaacactggcctcgagggaactgtggctgaaaaccccgtgcccattgttcatactccaagtggcaacatcctgacgctggagtcctgcctgcagcagctggccacacatcccggacactggggcatccatttgcaaatagyrgagcccgcagccctccggccatccctggccttgctggcacgcctctccagccttggcctcttgcattggcctgtgtgggttggggccaaaatctcccacgggagtttttcggtccccggccatgtggctggcagagagctgcttacagctgtggctgaggtcttcccccacgtgactgtggcaccaggctggcctgaggaggtgctgggcagtggctacagggaacagctgctcacagatatgctagagttgtgccaggggctytggcaacctgtgtccttccagatgcaggccatgctgctgggccacagcacagctggagccataggcaggctgmtggcatcctccccccggsccaccgtcacagtggagcacaacccagctggggrcgactatgcctctgtgaggacagcattgctggcagctagggctgtggacaggacccgagtctactacaggctaccccagggctaccacaaggacttgctggctcatgttggtagaaactgagcacccaggggtggtgggycagcggacctcagggcggaggcttcccacggggaggcaggaagaaataaaggtctttggctttctccaggcactgtatgtgagtccttggggacaggatggagtgggagtgggcatgatgtggccactgagggcatctagagggtctggaggctgggggccagatcattccggttgtccaagagaaactgctcacaagccttgaaggtggtgtagaactcagaggagaggccggccacgttggtggtcacatagttgagaacacctggggtggcctggttgtagtaggatacctgcagggtgggaagccaagctcagggggaccaagctaggggagggtcctgggaaggggtgggagcccagtgggcacgaggctggtggtgagtcagccttgctggccttctgggagggcagaatattcaacccaactccccagggtcttagattacacagttgcccggcatgacctcctccagctgatctcccccaacccttcctcgggcgctgacaaccctggcttcccacaccacacaccacattgtcatcatgcatcttccccgccagccagaggccctggagggcaggggctgcatctccagggcccagctctgaatctcggccatagagacacattagacattagcccagggatggttctgaggcgctcatgggttcaagcatatgaattcagcaaacaccggctgagtctctgctgggtgagtctcaaggccagacccaggctgcagggccctaatagaagctgtgaggggggaggctgcagtaccccaccctcgctttccctcagcctcctccccatgttttccatcaacacggactgcgctgctgggttttatgggccctcagagtcatataaagccttcctagatgagaagggctatccaagtgaatgacgagtgagatggaatttcagttcagaacccaggccttctgccttcagcacccagagctttttccaagaccatgcagtggcctctgacttacctgtacacagattagatcattttcagcccctgacactctcaggctcccccaggctggaagggggagcctgctggggggccagctctgagactatcctagcccagcagtgctgagctcaatacacgtgtggtgttggggtggagccaggctgggggcgtggttggggggaccggcctcaccttggtcagctggtccccctcgygccagaggcagaagcctgagcagagggtctctccgcgtctgtactctggcgtctctcggtgtgtgggcagcgtgaccgacctcagcgcgatgacataggggtccctgagtgaaggaagggtagcaaggggacaggggtcagccacagaagaaagtgggggcctgttctgcccaaccaaggccgagaccctgccccctctagcacagattcctcaccagggggatgcaaggcacatcgactcttaaagccccaatgcggggctcagggccaggctggagggaggaggtacctgtgggttagcactgaattcaccaggagccaacctgacttcactgtggactttctggaaaagccactccacttcaacgctcaggggaagactcgtgggctttgggattttttttctgtccctgtctctccagcaaaagagatgtttaggccctccagcccacacagggctgtcagagggaggaggccaaggaggtggccacgtgagaaatatcctgcccaaggcctgcatcgaggcagcctgagccaccctgggtaagggtggccctgctctagggaatgcgacaagaggggaaatgtgtgcccctatccctcattttacccatagtaaagccacagcagcccagaaaagtctagtggtgcctggggccccacagccaatgggaagcagagctctggctccaggctgatgcccttccctgggagggagaagcggccaccctaccaccctgtccagttgtgtcccccaccccacagcagataggcacacacccattgtcacaaggcttccgcctygaggccaggatcacgaagtcctggggctttgtgtgacctccgagggcagggctggtgacgtggtagatggcgtcgtcctcgtctacctgctgcactagctccacgctcctgtggggaggccgggatctcagtgccccaggaagcttccagctcccatgcaagcagcgggtctgcccgggccctgccacgctgcagtgcctgagcagcttctgtgatgggatgtcaccccctgtactgctcagcaagggccagcaggaaggcagcaaagcccagccaagatggacacacatgtgcgtgtgcacacacaggcacatgtagacatgcatgcaagtaaatgaacacatacacacagacatgggaacaaagatgtgcacatacatgcacacatgtggtcatatgtgcacaggcacatggacagacatcagtgtacacagagacccacgtgtgtctatacatgtctgcgcaggtgcagacaccacaaggatgtgtgatgatttagcagttgttcttaatatttactgagcgcccactgagtgccaggtgctgttctaaatgctttacatgtgtcacttaatctccataacagccccatgctgtagacgcttttagtattcctatctcatagatgaggaagataacctgcccacggccacagagctaataaggaagcagggctggggtgtgtccaggctatcaggtggcagagatgtatccccaggcccaggcacctgacacatacatgcatgggcatacacaggttcataccaacacgtgcacccacacaaggacacccacacagaggcaggcatggccatgtccagacccacctcctcctccccactcccctgcctgcactcagcagtaggcagggtatggggaagaaactaggggctctctttcccctcaggccactcccccacaaatcccatcaagtatcaagatttggtctggccttcaaggcccaccccagcctccctccaagaagcccacctaccacatgcacaaccgccctccccctacacgacatccaccaccaaatcacctctctgccttctggaaggggacaaccagcaggcctgagtcagctgggccagggctttttaaggcaacatggccctttttgcaaagacaccttcagcaggaagcccatgtataaagagctacaagcctgctctggagaaaatagatggggtgggaaggggaaagccagtttgtcaaaatacaattcaccaagtgaccagcggactgaatttccaaacacacagaacctccttacggaaattctccagaatgtaggctcctcataacaagcaattatcaaagaaccccctcgagccccggtgatggcagaacagaaaatgactttaaggggacttgaaaaacacaaattttgctattttcctaagaacatatttatcttccttgactaaattcgagaagaagatagtcatgtgaacaatcaataaatttggaggaacaaatgtatgtaaaggaataacatatttctattcataatcattcattatattcaaaaataatatatttgtgaggaaaatcagcaaacttggtaagttcaacaaactggccatgctatgtcccgatcacccttcatccttccaactccacccccagcagttccggaagcccctttgggaacacagaactccacagcacatggtttgaaaatcagtatctctgagtgtgaatccatgacccgccatccaagcatccattttaagaagagagaaactgaggccagaaaggaagtgactttgacttatccaatgtcacacagctggttgggacagaagcaggacttcaactcaagcctccagctctaattccgtgctcagtctcttccctaagggctcaaaatacccatgaccctgamcccccacccagcatggaactccaacccacccccagccccagcagggcagagcatcatggaggatgacccgcagaaggagacactctctccctcatcaggccggagaagggacactgccctgccctcaccctggcccctcaccggtagtgcttgtcccactctggcctctgacgcaggtccgagagcagcaggaaggcctgggctgcatccacatgcaccaccatctccatgtggaaggagaggaacttgtcatcctccagagtgtacaggcggacctgcatgggatagagggcagcctcatttgctgggtggtggagtggactgatggrgatgctggaggctgagactggaagctcagggctacagctgacttgctgtgtgaatgtgaacacgcagctcaacctctctgagtctcagctgcatccccacgaattatgaattcagcacaaatggacaggaaggtggcttaagacaacagtgactaaggcaacatgtggtggttcctgtcagccaggtgcccatccaagccccagtggcacaggcaggaagtggcttgtctaggggaacaggcagctggcagagcttaggtctcctgtaagcgcgtgcctgctggctgccccgatccctgcagtgatcactgcagaagaacagagagggaggaagtgcctggtcagacagcagcagacctgagtggttgagaacaggaaggggggcaggcaggagagaagaatctaggggttctcgactccaggccctgcaggggtgggtacgtttccataactggactggtttcttgatctcacccaattctttgaagagatctttttttgacataagtggtgtgggagagttcttgttgcttgccattagccacctctggctcagatgagaaaggaaaattgggtgggtggggtcagctacctgactgatctccraggacagcacccagttgtccttggccacaagcatcttcaaggaggagacgttattgtagctcaggtacacctgaaagagtacacaggtgctaccactaccccrcccccttccttcagggcccctgagccaaggccaagggtgtgccagagaggaacctgggccaggaatgggttgggcggtgggtgggtggtgcggcaggtgctgtggaaagagtcctgggcgttgagaagggaggtccaggcttgggcttggctagacccactgtgtgaccctagacaagctactctgcctctcaggttctccgcttccacctaccaaacagggacgcaggccagctctttgctaatggtagcaatcatgaggcgtgtcattcatatcctgctctccccggccttcctccaaacccgttctgacaagcagggaagggtgggggcccrgtgggtctgaagactgtcctctcggagcagagagccttacctggttgctagggtcccaggggacggagaggggcacctctgtctgcttacaggacacgatgtacttcctgggaaggagagaagatgacaaccttggtcccctggaagttcagcactttccacagactctactgcaggcctactctgtgctaggccctgtgctgagcccggcagaatgggagactcctgtctgggtagggaggctggatggtcacacaggacacagcagctgagggcacaccagctcggcccctacaccagggaaagctcagaggtgggagcgagccagcaaggaagggtatggcgtctaaggctcgattcccacaccccatacccctgctgagtgacctcaccctggtgctgctgtgtcctcatctgtgaaatgggatcagcagtcacccctgcctcatggggacatcacaataacagtgcttggcacacggtaaatgctcagtaaatgccatagatgcacactttcttactaacaacagcttgtgatccctgctgtgcttacagcctctaaagtccataaatgctttcacagcagagtcagacacacctggcttcatttttatttatttatttattttgagacagagtcttgctctgttgcccaggctggagtgcaatggcacaatctcggcttgctacaacctgcaactcccggttcaagcgattctcttgcctcagcctcagcctcctgactataggtgcactgggactacaggcgagagccaccacgcccagctaatttttgtat

SEQ ID NO: 95595 - DNA, 30381 bp, Homo sapiens
gagacggggtttcaccgtgttagccacgatggtctcgatctcctgacctcgtgatccacccgtctcggcctcccaaagtgctgggattacaggtgtgagccactgcgcccggcctggacagttcatttttaacgaaagagatgaggtcaccttctaagcgagcgagtagagatgccaaaatgataaaagttgagaatatttgagatattcttggtgaaagatgtgattataggaaagaaaggtagaatccatgctattggtattaatagctaccattgattcagtatctgctctgtgttacataggaaatttttagagtaatcactaattagtttatttgctttttatcttaatcccttttcgtcagaagaatgatgagaatggaaactgctcaggggaaggaattgaattccctacaacaaatttatatgaactggaaagccgtgttttgactgatcattggtccatcccttacaagcgagaagaatcactaggcaaatgcctgttggcatctacctacctagcaagacttggtaagttttcagaccttagaacacatgaggacatttgtttcatagaaggcctgagtttaatcttagcctttgttgttgcctagctgtgtgttattggacagatcatttattctcttagtcttcacttatctcctgcagaagaaaagctttgaaccaaattaattgttttcttctacctttgatagagtataagattatttaaaatataattgaaaagcttaatggaaattgaaattaactttttccacagaagcttggagtactttaaattaaggctcatcaattcaacagctttttttttaagagaagaaagttatatttatttaacaaacttgtgcttattaagtacctgacattgttttaagctttataaatatcaagctattaaaataataaaatatcaataggttggaagagtgggtgtcagtatgaacacctgtactaaaaaaagagaaaataacttattttttcatattgaattcagttatgaaatgaatatggccagaatatggtgtatttctgactggcttctcagcagtagcatttattgagcacctgttaggatctaggtactatgctaggcagtgggtctgaaaaaaagagagtgtgtttagcagtattcccaatgataagcaaaacctattattgagtttaataaagaaatgtactttttccaaaagatgattttacagggaacttattcattaacttagcaagtatttatcacttactatgtgaattgtgccagacacaaatctgtgtaatggagttcattggtttgttttagggaagaagagtaatttaggcatttattgcaaatatttgtgtggttttttggtttttgtttttgtttttgttgtttttttttttttggtttttgatttttgagacagggttgcttaggctgcagtgcaatggcgtagtcatgtctcactgcagcctcaacctcccaggcttaagtgatcctcctacctcagcctcccaagtagccgggacaacaggcaagcaccaccacacccagctttttattttttgtagggacggggtttcactgtgtcgcccaggctggtctcaaactcttgggctcaagtgatcctcttgcctcggcctcccaaagttctgggattagaaaatatttgtgtttctatagaactttttagggaaataataatggctagtaagtagctgctgttggtgttttattagctatttaatcagatcattgaagttactctgacatggaaatgtaagttcaatcatttcagttcaattggtatttatttaatctaatgctatggttatttctcagcctttccttcatcaaaggtatatattctacttttaataatttcgtaagaactaaggttcctatgacatagttccatatgtatggatttagaatgatgtatatgatttttacgaactaccaaagacctaaataacgtgtattatttcattcattttactaaggtctttctgagtctgacttaaataaagtatattatttcatgcattttactaaggtctttccgagtctgatgagaattgtagaaggtttatggacaggtgtatgcctgaagcatttaaaaaggtaagaaaaatgtgctgctgtgatattttgtgtgtgtcggggtgggggcagggtgaaggaagagaagctttttgttttaattttagttttttatgtataagaccagtttatgaatcttgtttaactgaggaatcctctaatatgaaaaacggaactctgaatttggggcttataaatgatttacttcttttatattgtctgtatgtgtctttggttaaatataacttttattaataataaatacttcctactatttaattgctaaagaatagattaagacttaattatactagacttaatagattaagacttaattatactaggatattgcacatattagtaaacaaaggcttgtggcacttagaaagacagtatacacttatcaaaatatgagccattttaagtgtgtgagacaggagaagacattttaaactactaaaagattgactaggtattctcactgacatgcataaggcaccatctctattagagccagagtgatatgcctacttccatttgggtcacatctcttagaaagcagtgtttcttaacaatgggaatgggagatcacaagaattgtgtttctaaaaacagactgaatcagcctccctttttagcagatgagccttgaatcctcattagagcaaggactgtgtctgttaacatactgccctttcccccagcatataactaagtgcctagctcatagaaagagctcagaaaagttgcaatgaatgattcttttgctggcttaactgctggattttgacacccatttttgtccaatatgtaaataagtcactagaactacagatgggtaatgtttgcgtttatcttaagacccagttaaggccgggtgcaattgctcacgcctgtaatcccagcaccttgggaggccaaggcaggcagatcacaaggttaggagttcaagaccagcctggccaacatagtgaaaccctatctctactaaaaatgcaaaaaattagctgggcctggtggtgggcacctataatcccagctacgcaggaggctgaggcaggagaatctgttgaacccgggaggtggaggttgcagtgagccaagatcacaccattgcactccagcccgcgtgacagtgcgaggctccgtctcaaaaaaaaaaaaaaaaaaaaaaagagacccagtaaaacaaagagttcatttgcaaatagttattcccagttgcattttggtaggcagaatctcccttgattcaagccttaaaaaatatatatataattaattttagaagcaaaagtagcttcattttttaaaaaatggagaaatcttttcaaattgtcatttgggcaaagattatatgaaatgaagatttatcttcattttagattagctcatccatcagtttgtagtttaaaataattttaagcttttaagaattacagcagcttttaaaaaatccaaaattggctaggcccagtgcttcgcactataatcccagcactttgtgaggccaaaagcgggaggacatcttgaggccaggagtttcagaccagcctgggcaacatagtgagacccctgtctctacaaaatttaaaaaaagtaaaataaaaatagcaaaattgttatattgtaacatactgtgacacacatcacagtggatgcataaacttaaaaggaaaagtgtattcagagttgtggaaaaggacttattcaaggttgaggatctccagatccagaaatccgtgtatccagtccattcaccagcaagttgcatatttggaatataatactctaactctgtacagagatacttcagaaaactgttttgtctcatgccttcagctgttaggagcagtataataaatggtcacatggttggtcatttttctgtaaaactgtgagtacaaaggtaccatgccttatattattcagttttgttaaagtaaaaatattaaattctcttgcactttagagctattaaaaaggttctcctccccgtcaattaggcatactttcttttattaaatcagaagagctagagttctgtgtgcctttaggcttgtctgccagaaaactcagtaggatttgatataattggtactacttacctagctgtgtttctcggttcgatgaccatccctctccccaattccccaggcttttctcacgagctgtcacacattttcttttagaagtaagggtatgaatgatatgtgattacataaataaggtgcacaaaggagctttgttgtcatttccaccttcttcaccttttaccttcaggctagcctggatttttactagtgtattcaggcagagaagataattcaggtttgaccatagtgcatggttatgtttaaaccttgtgtgcatcttcttcacaaggtactgcctgcctttccctatctcttctagaatgtaggcagaattgcattttcaaagtgaaaaatgagcaaatggaatggtgccagagggattgctgcttaatccacatacatttttattttgtagtcacttgaagcttcttaattggtaatctctgctttgttttgctttattatttaatttttaactataggaggaatatatagtcaggcaaaaaaaattctgcaaaaaatagtaacttactggtttacataaaatcagtcttatgacttctgctaatttgagcaagtagtgcggctaattagtatttagaaaatctggaaccgaggtttttctctgcagctattacagtttgggctcttccagcctgctctttttaaagaggttctcagtgaagccaagatgaaatttttgttgtatagtattttccctttgaatatttgttgcatagtattttccctttgaaaaatcttacaaaaacatgaaaccaccataccaatttaagtgaaatcctttgatttttcatttcttgttctggcacttgttctacacttccccaaagaccagaagactgagaattaagggcattcaatttctctactttttagggaatctaagaaagtatctaattataagatttgtaccattgttttatatttgatgttttatgtttaagaaacatagctacaaagtaaacagtttaatgtcttaaaacttagagctaatttagatttgcttaaacaattaaaaaaaaatattattttgtacataccaaaaaggaaaatgtaagccaaataaactgttaagatatttctaagattttttttcacattctgagtcctgctgtcatctagtcaacaggtagaaaaaaattatcctatttctgagatgttaaaaaatattaaaaggatatgtatgttagaatccgtgcaatacagcattcatttcttaggttccagaaatattaatatggacagccagccatcaagatatattaataatgccttaccatttataaaatgcttttatatttgttatatcttttaatcctcataacatttgtatgaagtaggtaagagttatgcctctttagagataagagaactgagccgttgagaactcaggtaaatttgttcaaggccacacagctagaaaacagtaatactggaattgatctcaggtttttaccttgctcggcaccatttgacctacccttgtaattatgaaaagtagaggaccaaataaaatttttcttttaaacaaagtgctttcatgcaagagaattaaaattcaaaagcaaaactctgtattgactttgaaataaatgggcaagtagatgaactacagctatgggtcttttaaaagccaatcatctacataaaaaagtattttcatcataatctctcacttatttgagatggacttgataaactgtagatttattttcttttttcaarttagactctagattgccctttatgtttttatagctcctgacatcaagtgctgttcacaagtggggtactgaaattcatgaaggaatttacaacatgttgatgctattaatagaactggtcgcagagagaataaaacaagatccaattcccaytggtctcctgggtgtgcttacaatggtatagtatctctaaaattaagtactttgtgttttgattttgtttaaaatacttgctgttctctgacttgtaattaataatgagtgataataattttatcgttaaggatattagctgttaggatcctttgtctttattttaaaagcagagcaaccatcttgtgttctcagtttgaaagaagtgcttttctaattttaatgggtttttcaacttacggaatgattaaatgcctttctcttacctctccccgattattcatgtcttaaatactttcatatggagtgttcatgtagatggagtttggtttctggccttttcccccaacaggtaacagtagctgcatgaagaagggaccctcatattttcccctcctgacttctgccctcagtgcctctgttcctcatctcatccccggtagccctagcacacytggggcattggcatcacactgccttgagtcagacctcttatcctgttacctcctcctcttccttcacagtgaacactgaacaggacaggagaatagcacattaattcttagcacttttgcactagctaaggcgtatgctttcggtgtattcttgaaagatcccattaatgaggggagtcaaaggctrtatttttatcttcttttctaatgctaatatgtgttgctatagraatagataataatgtttctctgttctctttgaatctaggctttcaatcctgataatgaataccattttaaaaacagaatgaaagtgtctcaaaggaattgggcagaagtgtttggagagggaaatatgtttgctgtttcacctgtatcgactttccaaaaggtaaacatcatttagtttcatctttttatagaaaaatgtattgaaaaagaagattttctgtgctataaaaaagacaagttacatgggaggattaaaacaatctgaaaaatgacaaatatcccatctggctcataaaattgcctacattttttttcagacagtgcataatttttccatagctcttaactaatatcatgaagaattttataggtttgaaatgatgtttagtaaaatgagaaatgtctttagcgtcatctattagattatcagaaccccagtttaattggtgttccagtttcttagagagagttgagagactatagcatttaaaatgattacttgtacctagaaaaaataatctagtacttaatctcatatatattttcttttgaacttcatatgcattaaaacttgctttttcaggcctggaaccagtatattttatatcaaaagactacagtctgccaataagagtatactcacaagaagtagataatctaaacagtcctttagttaaaacactgtttggtttcagaaacagttgaaagaagttgagtttaatcaatagaaaactggttcattgctttagtggaagcagaggtttaggtcagcaatcatttatttaacatttactatgtgtctggcattattctaagtttgaggtataaacataagtacacagtcctgtcttttaatataaacagtaataagatgtgattactagcttgtagtatagtggaggaaatacgaaaacaaaaaaatgacagcataataaatagtaggtggaattataataatatgtactgtacatagaatccaggggaaggggtagttattgccaccttgaggagtcagacagttccccagagaggaggaaaaagctgagtggaaaggacagtgaatatgtactttggaatttaatccccacaatggctctttgagttgggtactatttttacccccatttcataggtgagaactgaaacagacagaagtgaagtacttgcccaagtccacatacctagttacagggagaacccatgcaggcagctagtctatgttctttaaccatatgcagtattgcctccccaaatgctaaactcttctcttcagatgtgttgtgaagatcaagtgacaaatacacatagaaatactgaacgtggtggttcactctagtgagcgctcagcagatgttcattctctttttttcactttacgtatgcatccactgagacccagaaaggtgcagtctttgtgtttcctctcattaccacaaaggaattctctctcctctagatcccctcttctcttgccttctcaagcatattcctccttcagctttctattttttctttggtatcctcaatctttccctcactgttgggattgttactcttgtatgcaacatgatgtagtatttcccatctttaaatattctgcctttaatatcatatccctctgtatggtcctctgctccccttcccaaccagacctcctgaagattccatgtcctccctctcagttattctttcagtggttatcctaaaatgttaacttactaaacaaaatctaaatttcactagtatctttctcctccttgagcagtacataaagaccttagaatgttgcatgtgctcgctcccctcttaaatgattcattacctctttattttacttgtgcattgtcttagtcccctcctatcattttttacccggtaaagttgatagtgcattctataaagaatcctttagtaaggttctgtttgtgggtaagtcttggtttttgatggcctgaactttactttatttcccattccttgaagtatgtattttcactgggttcaaaagtctagatgatatttcttttctctcagaatattaaagataccatttcactgtcttgtggctttgattattgctgtggagaagttggctattgatctgactgtggttcttctattagmagtctctctctcctccatggctgtattttgaaatcttttctttctctttaatgtttgtaaatttgattgtaatgtgattaaccatggtattctttttatttattttgcttcagattcattgggcttctgaatctatggttaatgtcttacatcaattctggaaatttctcagcctttatcttttaaaatattccctcttccccattagtctctcttcttctgaaacttgattggatacatgttagactgactcattctgtcctctgtgacccttaacaccttttcacattttccatttttttgtctccttgtgttgcaattgtgataacttttttccagatctatagtagtacaattcacggattttttttaaatttatatctactttgctgtttaacttgtttatttaagtctttaattttggttactgaatttttaatttatataaattttgtttttttgactgtttcattttgtattgtctcatgttcttaactcatattttcaagccctaatttgtttaatgcttactttatattctgtgcctgatatttacaagtctgattctgctggcttttactcacttgctttgtgtatgtatgtaggtgtatggaaatatatgtatacttatttgtttgttcatttttctgtgaactcatatttcttagcatttaatctaggagggggcagtttgaggcttaagttgaaagttctttcttccaaaaaggatgtactttttggtaagtgcctggaagcactacagtttgtgaccattttagaataaattatcaacttaaggtttttcagaccataatgtcagtgtgaatttgagcagtaaagccatatgagggcaattctgtggttatgaattcttggagaatttttttctccctttaggcatccttattttccctttccgcaggtaaatctatttcagttcatctgacaccaaggatgtagccctttagttccagctttgcgttgcatttccttcttgagtcaccctgtcccacctggggttgatgtccttttctcctgcaaatgracacttacggtcaccagggctctgcagctgcctgtgggtgaatctggcttcagagccttcctgcctgtctcacaggattcctgctttctcttcgttttaagcttctgagctttttaatttttttttttgtcaactcaactatattttttaaaatattatattttagtgtttttatccagtagtgttatttttagctggagaaccatttaggatacttagacagaagtctactaacttttcagggcattccattctgccttcgtccaccatctgctgaaataattctcgttaagacaccaacacccctgcatgtttccagattggaaagaaatgtcccttgacccccatcaacagcactgaccccagttgctcccttcttggagatatttcttgcttggctttcaggatactgcagtgccttgtgtttctgcttgcccccaagccatgtttcctctgttgactccttcacctctatccagttttgatcttcagcgcttcctttctttattcactacactttctctaatggatttaaatgtcatatttatgccgatggccctccaatttatatctctgtggcccaaacctcttctctgagtataccagacttgaagagtcaattatctccttttggttgccatacagagttctcaaacttagtgtgtctgaaatggaatttcattttgcctctccagcctttattctcctttttagtaaataacatcatcatctatctagatgctcaggccagaaacataggagtcagccaggattcattccttgaataaagaataaccaaaccataaacaagtcctttgatttaatctctaatatgtctccatttgacctctctcggcgccttctgctgccatccttctccacacacagctgtgaactatctagacactgcactggcgttctgactggttgtgtctgactatgtctcattctcccattcatctattccattccattcttcacagaactgcaagagtgaccttaaaatataaaacactctcttcctgaaaacgcttctgttgctttctttctaattatggtctgtaagtgtctccatgatctacattctttgcctctctgtacaacctcatctctgccactcctggctcaccgtgtcccagctgggagagttttttaaacacagcagagtcttttctgccatcccccatcaggacctttgccattttagcctctctgcctggactgttctttaaacggctacatctgtcttgtcctttaaagattatgttttcagagaagtctttcatgaccaccaccccaagtagaggaaggtcctatttttctttcgaggcctttttgtttttcctttcgtgggacttagcacaatttgaattgtcttctgtatatgatgctctacttggttttgttgaccctgctagaatgagcttcataaaagcaggtacaacatctcttcgtagtcactgttctgtatctagtccctagaacagtgaatgctcaaaaagaaaagaaaaagaggagaaaatagagcttgcttaagagcattaattaatgatctaactgggactaaaacttttaatctctgctgatttactgcttcttatgttaataattaagttttaatttctaaaataaaacttttttggagaatttaactcaggttatcctgtatgttggagagcttaaacaactgatctcagctatccaaaaatgcatagatgctccacattgtggcagttccatcaaaatacagacttacagactcccaaaatcatatacagtaatgttaaagacatcttaggaagcgtttgggaaaaaaactttgaaaatagtttccaaacttttataatttttcttctgacttttcatttaggataaaagaaatgtaagggttaatggggaagcttttatattgccatctcaattttgtttttcttttctcataggagcctcatggatgggttgtggatttggtaaataaggtatatgacttttgttaatattgtcatgtagcatattttcaattttctaatgagacgtcctagagtttggtatattaagcaaatggcagctgcagagaataataaaaaaaatgctttaaggagtggatttcatattttcttcctttttttgtatgtacaatactagcaggtaaacatcagcttttggacttagtactatctgcagtatgccacaggagcattagaaggatcaatgcaaggattctctcaagaccaatgttacggagcacaacgataaagtagaattttagctttagttccttgcttaaattattaatatataatattttaaaattaatatgtgtagtacaataggatgactgcagtcaataataacttaattgtatatttttaaataacttaaataatataattggattgtttgtaactcaaaggataaatgcttgaggggatggaaamcccattctccatgatgtgcttatttcacattgtatgcctgtatcaaaacatctcgtgtgccccataaacatatacacctactatgtaccaatagaaatttttcaaaataaaaaaattaaagagaaaaataamttaatgtgtgccttttttcttctcagtttggagaattaggtggatttgcagcaatccaagccaagctccattcagaagatatagaacttggggtaagttaaactactgtatatgctcactgtggaaattcatttcacttgagttggtgtacagccagaggatatggtctggacatgccaagttaaatgttaaattaaaggttcatctttagaggagcagattccacggtcctgataaccaaagaaatgtttactcctaattataaccaaattgctatgtagagttttttcctcactattttttctttacctgtggcatttttctcttaatttgtaatggttacatgaaattatcttactgtttaaagttggttgctatatgtggcaagtatatatatgcataacaattttatggctcagttaaacgattatataaaatcagaatttacttcatagactcaggcacaaataaaaatacttttaacagagttgtttagtaagctttttggtgttacaaaaacttctagataacaaatggctataacatgggagcttagaatcatcaggtgcagtgttcatatcaacttcattttctcaaaacataacctcatagttaggggaataactaatctttaatttttcagacactgttgacctgtttgttgctgagagcacttcattcttttctctaattaatcattcaactaaaaactattacgtacttggcatgaataagacactgcgctatctgctgtaatttgatcagtacagaaaataatgtgttaaaataatacacccaggtgttacagattgtgcttacagttgcagttatttttgtgaaaccatgactaatcaattcctattggtccctctatgggtgaaggaaatagcaatgctcaaggagagagactgatggtgtagtaatagattgactctttcttgccacccagtgtttatcctaaagatcagatgtctgccatatcacagacactgatgcagaagcctccacttgcttccctggaagttaattaggttgttgaactgtccttgtgatccccattcaatagatcaagtatgttggaaaggacttcattgagttggaagataatatataacaatttaaaaagcaaaaccaaagaaaaacctcttcagatccagggttaaaaaaaaaaaaatacagagcactcccaaatttctatcctacttggatgaaaattggctcaggatagatagatgggaatctgggcatagccctcattattatcaaatgtgctaaagttaaagagtcttgcaagatttttccataaggtcagaccatttttcagaacaattgtgttgtctgctgcagttgacacagaattatattgtttaggttgtattgaggggatagtaacactcaggcattggagagattccaaaggtgtggacttttgtaggagacaggtayaattagaattcacacgtgctgaatttctgaccagttaaggtggctgtgtcccrggataaatttaggccataatattaagtctgagtacaactttggaatttaaaaatactaggaaaaaatatcactcacaagcccactagttaaaaacacctatacaaaacaagaaatgaaagttgttgctcatccttcttcctgatccccacacacatacctaggtaacggttaccagtttaacasatgcctttctggcttttccctgaatttatataaatctatgcatgttctttctctctctctctttttctcctaaacctaaattatcaagctatacctggttgtatactttcatttaacataatatcatggtcatctttccaggttagtactatcagtgtttttaatgactgcaagtgatatatttctgcaaatggtataccatgatgcagacacttactaatgggcattggattatttctatgtttttgctrttatagagagtgttccttataaatatgtcttcatgtacgtgcaactatttctgaaagatcaatacctagagaatgagatttctgagttgaagattacagtcattccttggtatactgggggattggttccaggattctgggtataccagaatctgtctatactcaaatcctgtaggcagccctgcagagctcacgtatatgaaaagtcaaccttcaatctgggatgcagattttgcatcccaggaatattgtattttcagtcctcattttgttcaaaaaatctgcatgtaagtgaacccatgcaattcaagcttgtttgttcaagggtcaactgtatatttgttttaaaattataattgacagtgctaaatgtctttctaaaaagcttttttgcccatcagtactcccacaaacccatttcataatagtctcattagtgctaaatattttcaatctttaatgttccagtatgatggacaaaaaatggtattttattatttaatatgtaatactctgatttcttgtgaacttgagcattttgtcatatgattattggttatttgtatttcttctgtgaattgacctagtttatttaggtctctttgggtgacgtgttttgttaatttttaggaattatttttatattaagcttatcaatgctgtatctattttgcatatttgtaaatcttttctcctagtattttgcttcttttcatttttattgatggtatcttttgctatatagaagtttcagacttttacgtagtcaaatttttccttggtgtcttaaaagttttctaacttgcttagataatgttctcccacctcaagtttataaaaatatattttttctttttatactttcatatttttatttttttaacttagtccttgaattcatttagaatttatttttgtatatttgaaaagatagggatttaattttattttcttccaaataggtagccaattgttgttagatcctctgttgaataatctctcttttccttattatttgtagttgctggcttaataatatcaaaggcccgtgtgccaatggatttgtttctggacctctgttccagtcatttattaattcattcattatttggttcatttctgtactgttgcaacattgtgttcattactggtagtgtcacttctgcccagtatcattcttttctaaaaaaattttttattgtttccatatttttaatgttctgggtgtagtcaacctgtcaggttctgctgtagaaaattctactgagatcgtgtttggaattgcattaaatttataggtcagtgcagagagaattgatgtttttacaataatggtcttttccatttagaaacatggtgtctccccatttatttgggctgctttaatgtattttagtaaggttttataattttcttcaagtaagccttcagtgttttttgtttaaggaatatttcatgcctcagctattctctccttttttaaaaaaatgtatagtattctacaatgtaactttaaaatcattttatctaattctccaaagatgttttattgacatattctgatttaaattacattaaatttctataataatttaagcgggttgacatctttatatcaattctttctatccaggagtttagtttctctagtcttctattcatgacttgatcaactcactatttaaacttttctctgatacatgaaaagggatttgtttaattttgacaggaaaaaaatcctctcaaatgtatttttaatcttcactgtctttttccaggctgtctcagcactgattcagcccttaggagtgtgtgcagagtacctcaattcctccgtggtacaggtaggattaaaccatttcacattacttcatatgattgaagacatgcaaacagtaataacttctttttatcaggttattcagagtggtctttaatccagagtaactccttttttcacattagctgtccttttaataaaaatgccatcagataataaaaattgttgaataatttgaagtataggagacctaacatttgagaaggccatttaccttttcagtttatcattttataaaatataatttttatttatttttcattttcttatctataaagtaggcagcatatccttatttgcttcacaggattatttaaggatttaatgccattatgtattgaatcagattagtatttatgtattaaatcggctaggctcacttactggctcagttgctcacttctgaataccagcttaacagcacatcttgtctgatttcctacctccgtaggattgtaagtcagcaggtcatagaacagtcaaagctgtgagtgttcagttttctaatgctaaaagcctattctgctatcctgtttccttcatttcagttaacaagttttaccgaacaaaatgtcacgttgaaatacttctgtttatttatttttataaataagtctgtggaccctataacttctatagagcttttaaaaaatcaccataaatggttttgaaagcacagtgtccttctggagcagtgtttttaaatgcactgttctttccaacatcacatttacttagggccattttaataagggagataggatttttttttagtaggttctggaaatttctgttatttcttttttcttttcttttctttttttttttttccagacagagtctcgctctgttgcccaggctggagagcagtggtgtgatctcggctcactgcaacctctgtctcccaggttcaagcgattctcctgcctcaacctcttgagtagctgggactacatgcacgtgccaccatgcccggctaatttttgtatttttagtagagatggggtttcaccatgctggccaggctggtctcaaactcctgacctcgtgatccacccacctcggcctcccaaagtgctgggattacaggcatgagccactgtacctagccaatttctgtaatttctaaatgttaaatgctttctttagatgtcaaggtaatcctgcaagagttttaggtgaaataggatggctgtttacatatttctccattctgtatattaaaacctttagaaacagctaatgttccttcagtttattaagcatataaatatcattaatttcatagttgaaacactaagacataaagaggcaaagtgattggactttttaatattttaataataaacattaatactttaataatcagggtcaggattgggttttaaacacatgctctttgctcatgccttgctatgtggaagagaatttagcataaataccccagctgctaactaatattaaggtctttagaaattccagattttatatatgtaaacagagtgtaccttaaaaagaacaagaagtgtatgaattcccaaccaagcacatctgacttcatctttattttaattatgtcaaaccatccaaaattaaattcattcagcaataaactcatataatacatgttacttacataacagttgtctctactacttgctacttgtatgacttcagaagactcttatttaacttgtatgcctcaatttcctaatctgtggaatggccataatagtaatagctgtctcaagagttgcagtaaggattaaacagcatgtgctgaaaagagcactatgactctcttaaccataacagctcgctctccttcctatacaattggcattaagtgtaaaagaagaaattctatctggataactgcctgatgtcattttagctcattgctaatgtattcttggctttgacagccaaatattgtttatctctttcttcatcagctaagttttaaatattttcttacttagatggaagtggtaatttagatgtattaatagctaatactttaccattctcacatactcttcagagttagttttctggttgtgttaccattctggagcagtgtattgtatgaatttcatctataggcctcattcacatcagtaagcaaaaatcgttcatatgacagcataatttccatggtctgtgtttatattcagttttaaaaatcaagcacaaaatatttattataaaaacaattcatgctgtgttttaaaagttagactgtgtgtcttgagtcactcttcaaaattacctttataagatagtaatgacagaaaatgtactcatattatagtaaagaagctgaggcacctaagattaagcagagtcagttaagggtttatttggcagtattagctagttagtagctgctctgatatgaaaatttttatcttttcattgcaccttctcctttgtgaattgtagatgaagaartattctctctctacttttgggacagcttcgggagttcttaactgtagcattttatttctacagcccatgctagacccagtcattcttactacaatccaggatgtacggagtgtagaagagaaagacctcaaagacaaggtaaatgccttctccagccagataggccccagtgccagttagttcacagaagcagagccaggacttagcagggttcacacaccatgctctttgaattctggtcacatgcattcacatcgaattaactttacatttcctaattaaaaagtgctgtttctgaagcaccattggtggttgttacctctagtcaatagagttaatacagtgttctcagtaagtgataccattcagaattttactaacatgattttgatggtatcacaattggcatagagaaagttttaaaataatacagtgttacaacttacccagagttgtttaaagcaattttaccatttaaatttaatatgacttattttgtctaccctaaatttttcacaggaccattccctttcctttactgctcacccatgtgctaagttttgtttctaagcaaaatgaagttaattggccttgtaaaatatcagatactgccagaccactgttaccctatattcttgtgtatgttataagaattgggatcaaaatgtttttacagttccttttttgtttttttgtttttattcaataaaagagattggttagcatccctgagctcttgtctgccgttaagttactttgcatgcgcttccaaccggatctggtgacaattgtggatgaccttcgactagatattctattgcgcatgctgaaatcaccacatttcagtgctaagatgaattctctcaaagaagtaagtttttcatttgtttctacaagacttaatgcacagatactaagttctgccaagatgtatgcttattaatataacaattttgggaaatatgaataatttattgtaatcatataaaaaagagaatgattgtgtataaaatgttgtatataattgttggtaaagacatcttctgtgttactttcaaaatttacatctgaaatatttaaaatatttactgtttttgtgaaatttcctagaatataatcccttagaatatacagtttgagatttacttttgctctaagggtacagttggttttgttttatttcaggtgtaagtttacttaaaccaaatcttctaactggggttgggacaaaaactaaatgactgcagcagtgttggtcaaagcaaaatgatggaaataattttctgtagctttctgaatttgttatcatatccacagaaacagcacagttggttttggtgtgtgacacatggagccaatgcagttcagttataattcacttattttttccttcggttttgtattgttaggattcttgactaccagtgaaagaaactcatcttgaaccattttagaccaaaagaggagttcattgaaaagaggctgggttattttacatgaatgaaaggtttactagccagacaagaaaggatgggcacatgtgggcaacagaacaactagaatttgcaagctgaccactgtcaggactctgtccaagtcttgtccctgcttttcttagtatgttggccttgctgcctctctacctgcatttggcatttttcatacggtagagatcaagacaatgaatagatccgatgtttcacatcctgcagttcccatcaccggagagggactgactcactccttctgcatrtgaagtgtcttcctgacacttctgtatactttccacmtataaaatttggagggagtgcctgattgaggtttgggttagatgttcatccctgagccaattagcagtggtccagggaatgacagctgtaagaatgactccatgttcttttttttttttttttttgagatggagtctcgctctgtcacccaggctggagtgcagtggcacaatcttggaccactgcaacctccgcctcctaggttcaagcaattctcctgccttagcctcctgagtaactgggattacaggcgcccaygactacgcccagctaatcttttatatttttagtagagacagggtttctccatgttggccaggctggtctcaaactcctgacctaaagtgatccacccaccttggcctcccaatgtgctgggattacaggcgtgagccaccgtgcctggccctccatgttctttttaaagggacatcacaaatggtagtctgttaacttcttataactggcctttgatatattttggctagttattgaagcacattgtaacattgtaaaaattatctatctatctatataaatatttgataatgtatattagactcagtcacaataatcttatctttttaggtaaccaaactaatagaagatagcactttatccaaatctgtgaagaatgctatagatacagacagattattagattggctagttgaaaactcagttctgtcgattgcactggaaggtaagttgctttcaaaaataaaaattacctaacacataatttaaataatatatctttgtattaaaaagtatacaaaattgttgctttgactgtattagtctttaaatgatcttatrgtaagttattgttttgaatcaatagaattatatttagagagtcagtgttcactatatctgactttctctctcatgtttcttcaattaggcaacatagaccaagcacaatactgtgaccgtataaagggaattattgaactcttgggtagtaaattgtcgttagatgaactcactaaaatttggaagatacaggtaggttgatcagaattatttttgcctttggctaatgtttttggactacaggagagcgaaaagggtgatgagagagcaggaaaacggaaactttatcttgctttaaacagagcagctgtacctaacccactttacagtttcaggtttttattaagattgtatgtgtaaatccactcaccacaagaagtttcaaactgctgatctagtctggtcttctaattttttaaattaaaaaatgagaaggtcatatagcagttagtggcagagctaggaataggtgtgtgtctttgtttatcaatctagtgttcttttcattatattattaattttcattaataatttttttcccatttagtccctattaaataaagatgattggtgagtttgtagatctcatcttactaggactgtcaagaggtgtgacagaatccaacatagtcttcaatttttttttcttcactttggtcatagtccattttactggttttcctaactttcctrgcattgctccttgagtcccctttactaacttattctcttctactttgactttatttgtttttttcaagccttagttcttagcccttttctcactgtattggttttcataagtcaattgcaggcattcctgtggctttgactacatttgtatgctgttgactctgaattaaatmtctaattcagatctcttcttggagctccaatgcagtatatctaaatatgtaacacacattcccatgcatagtgcattggcatcttaaattcattatatccaaacatggtcattctccagtctatttcattaatggtattattcttcatctagttggtaagccagagaaaaacctggagcactctttgactgtatcaacttagtcactgtatcagtcagaatctagtcaggaagtagaaactatgctaggtatatcaagcaaagggaattcattacaggggattgtttacaaaagtcttcctaagtaaggtagaggagcaaaaaaagagaatgttggagaagcaaaaagaaggaaggggtattaagttcaaggaaatgaagctgctcttggaggtgcttttactttaagtgctggaactgtcaaagaggtgctactgccaccaaggtttccagagtcccttgcagccacagccagcatctgcatccactctgaacctaagccagacgtacttcatccttcatcctgccactcatctcccagcgcttcctctcattggcagaacgtaacaggaagttggctggcagaggagtttgggaaatgtagttggcaggctcccagcccagcattacagagcagactataaaaagtcaggtgcaggagtaaaagaaaacagtcccgggtcccaagatattacttcccatgtcttgacgttggtggaatacactcatataattttgttttgcgagtataaattttgaatccacataaggttgaagatttaggttgaagattagagaccatgatttatatattgtatattcctactacattcaatgaatgactctatgtgcatagtatatattgagaaaattcttaaggaattgaatctaaaaatgtcctctttgatttcacatctcacatgatgaacagtgaggcatgacagtgacataattgacgttataaagtgaatttaaaccttaaggttgacaatagggtctatagctctgcagcaaagacttactgccaataggataaataaacattaattgaaatcacaaagtatctatgagtaaaataaataatgaggcaggtaatacgctcaattggaaccttcaggatcatttataaaatgtcaaaagtgggtacatttgttttataattcaatctgtttaaatctttcagcagttgaaaatattttgttctcttcttgaagtgaaatatgtcacactgagaacttgattctcatggggtttttttttttcattgtcggtttaaagaattaatgcttctaggaatttaaataaggccagctgataacgattaataatggttgcttcatatagtcttgccaatattatgcaagtggatgctgattacactagagtcaatttgtctttgttatatttttgcttgtgcttctgtaagttgccagggggaagacttaggttgttccgagttccaagacttaatttttttccaatgtttccttttccagtcaggacaatcatctactgtgattgagaacattcatactattattgctgcagcggctgtgaaatttaattcagatcagcttaatcatttgtttgttctcattcagaaggtacgtgttcagtcagacttgcttacttttaaattttcttaaaataagctcttttgaggtcctgaatacccctcctccccaccagttagcagtatttaaatgtacttttcttacgttgttaatgtttttagctcaagtttaaaatttttgcatattttgccagtttgatcgtgaagcaattcctgtgtcttttccgttctacagagctgggagactgagagtgatagagtaagacagaagcttttgagcctgattggacgaataggccgggaagctcgctttgagaccacttctggaaaggcaggagaatcaaatggatttttctagctacaaatgctcaaagcagctatttgcatattggctggctgatcatatgtaatattattgtaggttttagacgtactctgggaactggctcaccttccaaccctgcccagtagccttattcagcaggccttggaggagcacctgacaatccttagtgatgcatatgcagtgaaagaagcaatcaagaggagctacatcatcaagtgcatagaagatattaagagggttggtttcagcttttatctgattttgttgttagagcaacagtattccctgagtaattagagccaaataattttcctcccctgttatgtaaattaaactaaatgccatatctggaagctcttaccttaaagtccaagatcgggaaattataggtattgcttttaccaagtcacttatatttctcttaaaatgaattttcagcctggagaatggtcaggtttggaaaaaaacaagaaggatggattcaaggtaagaatttgcagatggaaccaactaaaaggtatactagtttaataatttcctttaataaattacaccacaattttaaaataatagtatgttttagtgtttcttaatgttcatattaaatttgatgtctaaaaatttgtttatgacctatgctttattatttaaagcttgggaggtgctcttaatgggaaaaaaaatctaggatcacattcaaagagtaattttattatataattttcataaaattagaagattttcaacttagtttttctttttaaaattaaatctaaagtatgcacagttttaataagtacagtggactccaaataaatattgtgcttgtttttctcccataaaggagaaatggaggagcattcatagtatgagagagagaaaggaaggaggttcagtcatcgattgcacatagtagtgtttcaggttcttcatttagacatgttcctaaagtaattctataggcagtcattcagtgagtatctgttgctggggcttcattttagaaggtagggttggatacggacttgtataagagggactgggactgtaggttactgtgaacttctggactgtccttggaggtggtggttagcagattgagcggtaatgattgcagctctcctgttgttccagtccttaagcctcaagcctctcctctgagagggctgatcacagcagccagctcagtggactgtgcttctgttgttgcagcagccctaattggagcagcattgtcctctcacctagaccctcagggtgcccagaccaaacttaaagcctagcactggaaaggcttccgctttctgattttcattttattattaacataagaaaagttttggtagaataactagtggcttaataatttcattagtaaaacatattccttggcttttgttaagtatttctttaaaggatcttggatactgccaactaattttcattggtatattaagagactcttagctcagtgggcttttatttcttatgttgtgtttgatcacaaagtttagttgggggcattgaagaactttgtgttttatatttctgacactgaaatgtgaccaggtgaattttctacatgtaacccagctttagaaattttaaaaggtatttgcaaactggagctggtaattctcaggttatgaggaatttttcttttaactcaataacattgctttcttttcactcagatacaatttgaatttttccagtttccttagctcagtgattcaaataacttagcaacctctccttatgattaaaattcatccagttactgaagatgtttagaaccttcaatagtaagaggaaaagggtgtccatagaaaaatggtcttgtcttctcagcaacagacacgtttcttttatatataaaaggtcaaagctgaatggatttttccctccctccagggaagtggcgtttgaaaccagaatatccctcctgaccattattccttccttgttacagctaarcattacttagcttttctagtcagttgcatcactgcatctttattgcttctctttgcagtcatttcatttatgtctgttgttttataacaaaactcaaaaagtaaaaggagaatttttggagttattttgtgagactcgaaaggaatattctttcttttttatttccccactgctcccagtaaagaaatactggtgtaccattatttcattctaaacaataatatcttgccttttatatagcacttttcagtttactaagtgctttcatggacttttacaaagtacacattgctgaaggggggcagtgggaagatcaaagccccctggatatggctccaggcaggggggtgaattatttacttccactaaaggtgtttttctatgctatgccctttcctgccaggcagcaaggtgggctgactggggattatgtctccctgccaggctacacagaaactaagcaaagggtaagacaagatcacccacttcttactcccctcccaccctcagctacctctattcccccaactgattmcccttccctctgcttttgatactcttaaaattcccaagttccactgttgtgttcagaaattctggccttgatttcctaactttatttctgtagattctgcagggtaccctcggctcccttggtcctctttcctttgctgcttctataccttccactgtctaccccaatccttccctcttatgtcacttctttttttcttcaattaaaaagtttaaatgtactcatccaaaaaaaattactaaaccaaaaaaaaacctcatttttcctcagttagttgtactgcatattccttaagttgtttatcttcaggccacctaccatagcgcctgacaggcttttagcaaatgttggtttccttcctcttacttcctccccttcaccctatgaggacaccaaaagccttacatagccatagctgagttgcctctacttaccaaaacacgtaacagaaagtaaaagtagcaagatgtcctcagtacagatactttcacatgatgtggttagtacaggaggaaataacttttagaaattgtcctcccaagcaaaaatttttgctgtggtcctagatagaaggataggtctggaaaaacaagacagatgaggaagtggggatgttcaactttgagaagagagaactcaagaaaatgtgaaagcttttttaaatacttagagcattgttatagagaagtttcattcaacttactttttatgtctccaaagaagttatgcagaagcatgtttcagtatcaatgaacttttatgtgagaacagtctgaaaacagaattcagtcccttctgaggtagtgagttcctcatcagtggaaatactaagtcagtcattgtataaaaaatgaataaagagaatttaggcataggtttgcaggctaaaccaactgacctctaaggcttcatctaatgttgagtccaatttagacatcccatcaggtcctacttatgaaatctccactctgtgacattatcagatatcttcattgtaattggagaagagtaatttaaatttttcttataacttgtcaccacgtcatagataagatgaaataaacaacatctttcctgtttgctaaactttaagaaggctatatcagaaataattcttaaattttagttttatagactttttctttgaattttattgtataacaagttaccttcaaaggataattttcaatattaaataaaaatattgttaccataattgacttaattggccatcatgatactttttaatatatttgcttcttgctgaagagttcatatttatgtcccaattttgtaatccttttgggaaggtatctgtttggatataaaccttacagtttttattactgtcattttgcaacttttatagtgtagccagaagtagtctagctagtctcacaagtagttgacctttaatatataccttatttctgtgattctaagatgccagtgattgcaccctgcatctcagatttaataaacttgcaaagaagaaaaaaagaaactgtccgttttgcagttatggaccattggtttagattcttaatgagaggttgagcctaagcctttttttgaacaattatgaacaacttcatgggagcacactgctttgcattgtatatagtaatgctttggacctctctgaaatctttatgattggctgtataattttgaggcatgttgatgaatatggagttttgtgtgcttgttctcttttgtaaaactcaacttgctttttttcataattgagttatgtacactacaagttaaacaccttctcttgaaataaggtgcagcttaggacagagagacatttagtgctgagtggtacagcccttcacagggtatgagtctgtcatgccagcttctcctgacttcggaaaatgctttagtgtgagaccactgactgttttattttaattgtgttgatggacacaactggttagttagtgttgcattatagtgtaatctttttgataacatttaagtaacaaattagtgatccaaatttaagtgagaaagccattcttgtttggtactacctataccaggtaacaactaaaatgataggtagaagaacaaataccttttgtgtacagctaagtttgcacatactcaggtaagcacagctatataaaaacttactcctgtgcctagtggctggtgagtttcttttgacataattgtctaaagtgtcaatttcagatatgttaaaatatatgaaatctttgtcttagaatctaggaaatacagtatttgctgattgaggattggctgatccctatgaggcaaggaaaaaagtattgtgtgacaataacttgctcacatttacatattcaatagtgagatgtttctctacaaagacaacaaaagtgtatttcccctccacaagggtcttcatcttacactaaggctcaatagaacaaggaggcattaaaacaaaaacttcagcctctgaagaatgctgaggacttaagtttttactcagctttttggttagagatttaatagtcatgtttaaactgaaattcttaccaaattttgaaatttcatagtttgaaagatgctatttattaaaaagtagttctctttataaagagtattacacaaacagtagactttttagatctgtactatgacgatctggattgtcatataccagtttcagaaataatatatttggaagtgttttgaaaaatgtacagtgtaagtgtaaaatgtctgtaataataaaaatagaattacctcttatgaaagtgttttaactaggaaatacagattatgaatattttctttaatatttagaccactaccagtgtcttgatcatatcattggtatcctagtcatataatcatagaaagcaatattcttactccattttacttaccatgcagttcagtgttatccaagttaagctttggccatcagtttattttgtgtcaacatgacttagcagcctgtgctacttaatctatcctctgaagttgctaattccttgttgtctgttttttgctgatgtacccctgtacatttactgtcacttcacatccactcctgtttgcagttcttagctttaggaaattgcatgcagaataagaagttgaagactgaattatgagtgcatggagataagctctaaatggtcaatataaagagtaaaataataaaatgtgtaacagtaaacctgattgacttgaaattttttatagctaataaatgaatctgctgtttatttctaaatttaattaatgtaacttctttttaactctagtcatctcagcttaataatccccagtttgtatgggtggtaccagctttgcgtcagctccatgaaattactcgctcattcataaaacaaacctatcaaaagcaagacaaggtaagggtatagctattttttattattatagttacttgcataacttttacaataacaaaacatggctaaaattgctgagtttatagtcactatctttgtttattgatgtaattcacttatatcatctaataatcttgagtttaagcatcattctgctttcatttctgcagagcttttttttttttttaatctccttaactcattttctttttatttgcttaattttcaaatagttaagccagtttttaaaagttagaatggcattttaaaaattggtttgaaaagattaaaaagcttgttgcttgttttgtatcacaaaaagattagtttgcttaaagtactagag

SEQ ID NO: 95596 - DNA, 62741 bp, Homo sapiens
atctgcatctcacagataagggaatcaaatgagaaagtttgtaactggctaaacattatacatctagtgagacatgtagcttggcttaaaccccagcagtctgactcccgaggttctaccccactagcacagagtaaaatacagtggctgaaaacaggggccctatagcgcgacaaggctgggttcagattccatcaccgttgtttactagctggacagtttgcctacctgtgttgtgcctcagtttcccaaatgctgataatataagccttataagtgcttgtgacgattagtgaaatgtgtacacagactgtgtgcagaatctgacatacagaaaaagtggggaaacactagctttcatgaaaaatagatcctcagacactgaagtcaggctccatggctccccctcatggaaatactgtaacttactgcatttcgaacggcctcttggttttatgcccctcatctgttccttagtagtgcctatgactgctgcacattctcctctaaattacttttgtaataacctcattagaaaatggtaacagtctcagtacctcattcaacaaagtgtttgatggctcaccatgcaccaaacattgtgctagatatgagggatagaaggatggtaaatttaaaaaggtaggcaccccgccccacagctgctaatatataagagaaagacgcaattgcaattgtaacaagagcccccaaaagggaaattcagtgccctatgaaaacatacagctaaggcaagggctgatttacctgaagctagtaaatttcagggcctcttgcttgcacagctcttccaaggccccagggccatttcttttttccagtaaaattcacaaaagtaagttattttaacaaaaggagttaaaataattctctttccattcctatttctgtcaaaattcctctcatgttggatgatgttggagtggtcaccagcagttggggtgtctgctaaactgaattggggaattaatttatttcttagatcagttcagaaatacttgtgtggtttgttgtcacttcactatagagttaatgctctatactgtcctttggtggggctgtcttccagcagactggactatactttctgcccaccttgtgacatttatgtgcagggccagaggtggtattgaaatgtagaagtgtccagtggtactcagctctggaagtaaatgggaattggaggagaagcaaagtttgaattgtttaaagtgtatgaagccataagctagtatcaaattatgtaaaagtgttagcagaggatatggtttcatggatgcatagtcaaaacagaagtttgtccccatcatgaatattcacaatttagtgtttactattatgaatgcaccatgctttttaaaaatatgataataattgcatacaatagaaatttttagaaattctgtcttggccagatacaaatctgtggtggtcctatgagtggcaaatctaagtgtgtgtgaggtatgatttagcacttgaactccttattctctctattaaaaatatgcttataaaatcttcaataaaggaagaggtgatcaaagagaatgcagctccgaaatgtagacggaaattgcaattagagatgtgttagacatttaagtagtttgaaacattactttatatttgtgtgaaatttaggatactgtaaattttttggaatttgtaatttgttctaatttcttcttatattgtaagttaatattcatttttgcatctaattttgtaatctttttcttaaatggcttcccaaagtttataagcttcaggtaccaccaaacttggatgcttccctagtaggaagacctgaattagtgtagaagtcaaggtaacttttcctgagaaaacaaaatcaaagctgacccctgattatggggtcagaggcagccatactagggtgatgatgtgaaagtggggagaggaggcatgtgtgtgaggggagcagccattgctggagtgtaggagtctgccagtcactaaggctgaaccatcagataagaaatcagaagaaatagcaccaaagggaaaaatctgtcctcatgatccaatcacctcccaccaggccccaattccaacattggggattacaattcgacatgagatttgggtagggacacaaatccaaatcatatcaccaatgttgcaacttcttcttagaaacaagatgaaccccacttttaggccttttgatttcaggaaatattaaaaattaaaaataatataaccattttttctgttcatattcaagacaagctagtggtataaatattcaaccatatattcaaggatgaaggtaatatcattttattttattttatttaaattccattcctagccctatccattcctccatgattgtgggaattgtgggaaattcaaccttagtcatctttagtgccctgtctcctttcttccctctcggtatcataagaaggacaccaagtcctatacaggcctttaggggaggcctctctgattttcagttcctagtggttatatttttcctaactggtttattcctttgaggttccaaccctctgcttctgtaccaagcttggagaacgacagtaaaacagaacccagagtccaggctgcctaagtgttttatgtagctatttccctctgactagattgtagagtgtgggtaacgtagtttggatgtgtgtccccacccaaatctcatatattgaaatgtaatgcctggtgttggaggtggagcctggtagaatgtgattagatcatgggggcaggtttctcatgaatggtttagcactattccacttggtactatcttcaccatagtgagggaattctcctgagatctagtcatttaaaagtgtgcccctttgccttccatgagtggaagcttcctgaggcctccccagaagcagatgccaccatgcttcctgtaccgcctgcagaaccatgagcaaattaaacctcttttcttataaattactcagtcttagatatttctttataggaatgcaagaatggactaatacagggggtctacctaaaacttttgcaaacttctttttcatgtctaatgtatggttgtggtagacagaattctaagatggtcccatgagtcccagtccctggaattcatgctctgtataattcccttcccttaagtatggacaggaactgtgactcacttctagttaacagtatatggcaaaggtgaaagaattgtgcagatgcaactaagatcctgtgaaagaaaaacagaatatagggactgtgaactcactatgccataaggaaagttaagcttggaaactcagtcaccaatactgtcttttttgttgtcgttgttcccaaactgatagctgtaatttcataatcccaagacatagcatcatttcctctactccctcttttcacatgtttactttatcttatgtaaaatgtagatttactgaggctaatcagagcctcaaaagaatggaaccatctgcctcactgtctaccctctcttcctttttttttttttctctcctgcttgctctttcttttttaaataaagaatttcccaaaaccccctttggaaaaagcataggttacagatgctcttgtgagttgcatttttttcccagacatgttctcaaccttggctaaatgatcgctaacccacagagatctgcctcagtcactttttggtttgcagtcccaagtcagttgattttagttaatcaaaaaggggttaagactattttcagtgggcctcacttaatctggtgattgtccttaaaagatgggctggggcctccctgaggtacagaattgtccttgctggcttgatgtagtaagcagtctgctgaggaagcccacatgggaagggatggaggtgacttctagaagctgaaggcaactccagccaacatccagcaaaaatgtggggctgtcagttatatggttatgaggaaaataattctgcaaacaatctggatgagcttgggatcagatcttctccagctgagcctccagataaaaacagcctagttgacaccttgattgcagtcttctgagacccagagccaaggatccagctaagctgtgcctagactcctaactcctgggaactgtgagataataaatgattaattgttttaagttacttattgtgttactccattctcacaatgctataaagaaatacctcatactgagtaatttataaagaaacgaagtttaattgactcacagttctgcaggctatataggaagcatgacttgagaggcctcaggaaacttacaatcatggtggaagatgaaggggaagcaggctgtcttacacagctggagcaggaggaagagagagggtgggaggtgccacacacttttaaacaaccagatctcctgagaactctatcaggagaatagcaccaaaggaagaaatctgtccccgtgatccaatcacctcctaccaggccccaattccaacactggagattacaattcaacatgagatttgggtagggacacaaatccaaaccgtatcactaatgttgcaacttctttttagaaacaagatgaatcccacttacaatttggtttggaagtcaagaataacagtgccatacatatatcaagagcttaggaaaagttttattattgatatattctcaaggtttttttgggaggacagaaaatgcctcctaagctggtctaaaagttatttaagagggcaagtgttctgggctgaattgtgtacttccctcttctcccagccaaatatatacattgaactcttaacccccagtatgtcagaatgtggctatatttggagatagagtctttagggaggtaattccagttaaattaggtcattgagggtgggccttaatccaacacgactggtgtcctcataagaagaggcaatttagatatggaaaggtacacaggaggatcatgtaaagacacagggagaagatggtcccacagtggctccacaagaaaccaactctgctgacttgtggcctccagaattgtgagaaaacaaatttccatttaagccacccaatctgtggtagttttgttcctggaccaaactgagggtcaggctgctatttcttgctgccaataatgagatgtcgatgaactggggatgaagaaagtttttatttctgtaaccagttacaggcagaaggcctggaaattatcaccagaccaactcaaaattacaaagtttttcagagtttatataccttataagctatatgtctacatgtaagtgtacattcctctgaagatataaatgtttctttatcagcatttggaacatgccaggcaaatagtaaacactcaatatcatctaccatcagcctcagcctggggcctcacacccatcttcttttatctaaaattctgaattagctatgaatattctcattttacgaatgaggaaagaaatgtgatctgagctaatgccttgtgtcaacaggtatattacactaagatggagaatgatatactgaatctgtgtttgcctttaacgtgtgtttaacttcgagaaaaaagccaaggctgggcggtcgcagtcacgctgcatccggcgacagggggcggtgtgtcctgcgaaaagtcaaaacgccggaagctgcccttagtgtttttcagcctcttggtcttagggaaagtgaggccgtgttttacatccaacatattattattctgataatatgtgacytggcgccacgcgcactctgcacttaaacacgcacttaagggataaacacatacgactgaaaaagagtttcgcccttgataggcagtgtatggggtgcgcagctgcaatctgcaaacccttgcagggcgcggggtttcgtacacccgctcaaggacgcaaagaacctccattctctgccatacaaagcactcctggcccagagagcaggaaagagcatcagctaggcccagctaggcggcgccctcggccggactctgaaggtcagggccgctgggcgtccacgccgcctgggtcccagtccccgtcccatcccccggcggcctaggcagcgtttccagccccgagaactttgttctttttgtcccgccccctgcgcccaaccgcctgcgccgccttccggcccgagttctggagactcaacatgaagctaccggccagggttttctttactctggggtcccggctgccctgtggcctcgctcctcggagggtaaggcggccgggggcgcggggagcgaggacagggcgtctcgacgcgcaaagagagaggacagggcgtcacgggggctcggggagcgaggacaaggcatcctggggcgcaaagagagaggacagggcgtcccgggggttcggggagcgaggacagggcatcccgaggcgcagagagagagaggacagggcgtcccggggcctcggggagcgaggacagggtgtcccggggctcaaagagagaggacagggcgttctggagcgctaagagagcacagagcaacccggggagcgagagagaggacaggacgtctcggggcgcaagagaaagggcaggaagtcttggggcacaaagagaggacccgkcgtccctggggctcagggagctaggacagggcgttttggggcgcagagagagargaccaccaggtcccggagcgaagggcaacgccgggagtgagcaccggggcccgggtcgtattccactgtcagatgaagccctgatgtgtgtaggggaatagggaagagacgtgattttcgaagttttcacagttctgcaagtttccaacttgtgtgtaaataggtagaaagaggtagggaaggatacggcgcccgtccaccccttaaggagtgagaggggatcaggccgagcgagcactgacctttgacgtcctttgttgtgaggaaagtccatctatgtgttagttatggaattaaacactaatacaaacaaattatcataaaaatgaaacaaaaacaaaaccccagctgtttatagactccccttcccagatgtatagctgggagaggtccgtctcacactggcttccccctctctctggcccacactcctgtcaccatctccattgcacccatagtggaaatagctaggaagtgaaaacagctaggaagaagaaagagaaacaaaaacaaaaagaagcaataatatccaagacaagccctccccacatctaaattacaaaattgttataagtaaactaaaaagcacattttctttagccaggtagaaaaattaatatgtcaactgtgaaaaaacttcttttgatttgatagaatagacagccatggtgttgtttttcaaaaaatatgggcagcagkagttccaaataggaatacaaagaattagtatggtggttccctcaagtaaggtatctttcttttaaaaagtgagatttgttcagggttagggttttgctgattttttttctctccctgtgaaaactgggttatagatcattatamaggaarcccatattttctgatacttttcagagacatttctcatttgaaatctacaacagctctgtgatgtcttcagagatttcattttttaacacacatcattaggattgtagcaataaggtcatacagaccttatccaagctcttctgacaccattagacaatacagtttgagaaggagaaaatgaactcatttaaaaattaattgtaatctgacaattttgaaattcctttgctgaagaaaaatatggaagttttgaggttcagggttgggaggcaagagaggtacctgttagtgtggtttgtccccttcctagcacatgtagcctcaagtttgaattcctgggagaagaaaagtctttacatctgtgatgtgggaggttgttccagggaacatcatgtttttgtgggcaaatacaagttgttataattaaaacccctaatttgaatakttttgttaccaagaaccaaggcaaatgtttaatttgttataaaacctgtttgtgaagtgctgtgttaaattgtgctgctggctaataggcctcatttcaatttaataaatatttattgaggactggctttatgtctggccctgtgctatgccctgggactcaaaatttaaaaaatacgagccctgctctcaactgttctcaagttgctctcagttctattgaggaaaacattcagtcattcagttgtttatgaggaaacactaattaattaagtacctattaagtattgggcattctttggcaatttgtggttgaaagacattcctgccttcaatgtactatagtctcatatatgtattttaagccacaaataataaccaatgagtaggccttgaaatcaatttagtggagcaaaacagcactttgggaggctgaggcgggtggatcattagatcaagagatcaagactatcctggccaacatggtgaaaccctgtctctagtaaaaatacaaaaattactgggtgtggtttcacacgcctgtagtcccagctacttgggaggctgaggcaggagaatcgctttaacctgggaggcagaggttgcagtgagctgaggtcgcgccactgtagtccaacctggcgatagagtgagtgagactccatctcaaaaacaaaaaaatggaatagaataggatatatctaaattcatctcatgtagtaaggttgttcattttgtgaaactttaaaaaaaaaatttaccattcttccttttttgattcattctttgattactatcatgcacactgccatgtttcttttccttttgtttttatcaagagtaataactatccaacctgatcaacatggtgaaaccctgtctctactgaaaatataaaaattagccgggcgtggtggcgcgtgcctgtaatcccagctactcaggaggctgaggcaggagctactcaggaggctgaggcaggagaatcacttgaacctaggaggcagaggttgcagtgagccaagatcacgccattgcactccagcctgggcaacaaagtgagattctatctcaaaaagaaaaaaaaaaaaaagaatagtaactatcaagrgtaaaatcactatttttagaaaaatgattcctggccaatattcagcaatacagttaacaaagtaagatatgacctcaaactggccacctagaattaacttgggttagcatttggtgtatatcattccaggcatctgttctggtraaaggatggataggcataattttacttggatgtcacattttcccttagtcaacattgtttcattgttttctcacgatgaatattgtcttggagcagtataaaaccaactagatgtgttttctttattttttttaaatctggaagcctaagtatttctttattcagtgtaaaattctggaatataagctctatgcaggcaaagattttcaactgttttgtccactgtttatacctagaacagtgcttagcatagagtaaacatgtaacaaatatctgttacatgaatgaacgtgtgtactgtgttgctatgaacatgtgtatgttgctatataaatcacatttcttgctatggttcacagtcagaaaaatctgaaaaatgatagtctagtgagtcaccagcagacatcaatagactgtgaagatgcagatgtgtattataatgcatatatgacccaaactgtacatacctagaggaggcaaggaaagcttcatggaggaggtggccccaggagcctgctgttaaatcaggagttggaatttrtgtggtcccaatggcaatatagacctaaggaatagcatgtatcaagaagtgaaagagtggcttatttataaaaattcaagtggtttgtttggtattgtggagttggtgaagtatgggaacagagagaagcgtgtggagacgagatcagtcaggttgctgggggacagggtatggtgggcttttcttatttatgtagaaaattgagcatttactatttgctaggcaccttactagggatatgaaggtgagaagaagagctgattcctgctgtcaagaagcatagagtccaatggcattatggtatgatgtgccgcatgttaggttgggtgttcttgcttttggatgggatcccaaataaatagcatccgttttttccagtctgaaaaatgagtaaagatggaagccaaagtatcacttttattgtggtttgtgagaggaagctgggccyatcagctggatctcccgaagtaggcggacttacataactctggaggagggcagaacattgtcctctgaaggcagctggctcccaaaaggaagaaraccaaggagaactgttcatacccaacgatcctgtcaaaatttaccagtcatatcaactgtctctgcacagacagattgtacctcagtctgtgttgctataaaggaatacctgaggctgggtaatttataaagaaaagggtttgtttgactcatgattctgatgcctggacaagttcaagactgggcatctgcatctggtgacggcctaaggctgcttgcacttgtggcagaaggtgaaggggagctggagtttgcagagatggaagtgagggggtgttgggaggtgccggcaagagaggaagtgagagggtgttgggaggtgccggcaagagaggaagtgagagggtgttgggaggtgccaggttctttcacaacctgctttagtgggaactaatagagtgcaaactcacttgccactgccaggatgaagatggtactacgacattcatgatggatctgccaccataacccaggcacctcccattagaccccacctccaacattggggatcacatttcaacatgagttttcaagggacaaacatccaaacatccttagcaggttgactaaggggacagaaagaagcctggagttgtactacctgaacttctcacagtagggagatgtcaggactggggaagaagcatctcctgctcatgggggaggtatgtccagttttatgagagtgttgttgtttggtatatatcaaagctgagacctgaaagatgagtaggagttagccaaagggagagatgtaagaatgttttaaacaggagagtagtctatgtgaaggcccagcataaaggttatcaacagagagtggggaggcaggaggtgagagacagcttagtgagcagcctgttggctgcgttaaagagttagaactttgtcctgcagggtgggagtggagacaaatggctaaaccctgagtaatcctctcatctgttgagaggtgatggtggcctcaacgagggcatgcattgggtttggagacactcaaagttgagtgatatttaggaggtaaaatcagaggccttggtgattggttggtggtgaggatgagagatggggctatgctcagtggtgacatgttgccatcaaaattgtgagcagaaatacgatatcatcaggtaagactggaagtagggagaccaaacatccaaacaccagtgatgagggtctgaactgaggatagcattagagctaytggrgactaaaaygaactgggcttggtttgaatgtatggggtaagatgaagcccagatttctgtctttggcccctgagctaaggacagtgccactctcttgagtgaggacattaagtgggggctggagggagaagaggagtaagtgacatcagtcctgaaatgtcagtagggtctgggactcctcaagtggtatatagataaataagctacagaagtagaggagagaatgttaattctccctgggagtgttagggaaagcaccagagctctcacagctgggtttcaatgatgaatgttgggtgatgatagggagcaatttgtgtaaagacaggaaagtaggaaagagttcatgtttggggaatcctgagtactttgttttcctgagtgtaaatttcaggggagatgaggcagaagagagggacaggagctaggtcgtgaagacatatgctatggggagcgaaggaatctggatattctgcagctaccaggagcccttagaagatcttaagaagagaagtaacatgatcccattagcagtcctcggaagatcagttaaaagatgacacagaataggcccccaatgtttgtgaatgttgtgagataggggtttgaaatcaggtggtggatatagagggacactggggaggtaaaaggcatggggcttatagacggatgggatgtatcaggtgaagaggagagggagtcaccaargtggggcagggcagggcaggtggtgggggtggggttaatggatgaatcttggccttgtagcttaaggatgcatttgaagaaatttcaaacaaacttcctgcccaaactacaaagcaaactttatattattacaaaaaataatctagatctcagatatctcccaaaggtcatgataatgacatcaaaagaggggggarttttaaagttatccagagtttcttacagcccatggtagaaagcatgcaatagatgtttagcaacttttagtttttgcagaaaattctaggtagaaaatgatcagcattctcagctgtcctgcgctcttctcttcctaagttgatgaatcattctgagattgaagtgccagggtaatgataagtaagtctagaatacaaggtcaactgcacttttatcccttccagtctgggaaaccctcacactgcattgtaacataaaagcagtgatagaactgtaggctttcataattgctggaatgatgaaatgatgttgccatttacctttagccctaatttattcttcatgcttcaaaaccatatttcctactgcagcttagatatctctacctgactattccagaagcatcccaagtgcagcatttctgatgcagaactcattatcctcaatgctccaacktggtcttctcatgtcaacccagtcatttcagtcagagcatcactctgcatgcagccacttaaaactagaactcagttaccttccacagctctcaccttacttgccaggtctggctggttgggttctgggttcaggctaatttacatgttaaatgtgtgtggaatatgttgtcttctcttaatttctactgccctcggtatctctcatgtacacttaatgacttctgtctgatgagtctccatttccttttttctggctcacatttaaatcttaatttttctagaacacaaaggcagtgcagatgtaacagggatattgaggtaaagatgagagaggtagaaaaatctctctcagttcttttcagtaaacaggagacctgtttatatgctgttaatgaaacaggcaaaaatgtgatgaaatmgatcaagaacaaaagtccaagctcatgttgttgggcaagaggcaagaagaaatcatggatctagtggatatcttaaatatcctgacttgatcattacacattctatgcatggaataaaatatcacatgtaccccataaataggttaaaatgttatgtattaataaaacattaagaaaaagaagaaataattggaccaggcgatattaggtacagtggtgactcattacgtcctcattttttgggacctttgctcttgcaagtagttttatttgctaacttcccaccagttcacatgatagcatcctgggctaagcatcaccatctcttgcctggcttgttatacaagtgtcctaatagtttccctgcttccaaccttgccctctacactccatggcagccagaacaatccccttaaaacttaaggcagatcatgtccattctctccttaaaacttagaagatgtttcccacttgcctcagagtaaaagcctaagtctccgtagtggctgactcagcctgcatggtccagtcccctttacctcactgacctcttctcctgcccctgtctscctccttccttcttctccagccacactggcttcctgactgttaccccatccataagcatgccccctgcttagggcctttgctcccaatcccttttgcctaaaaccctgtgattcattcttctccttcacgtctttgctccaatgtcaccttctcaatgaggcctttgctgatgactctatttaaagtagcaatgctctatccctattctctgccttattttttccccacactacatatcaacttttaatatactacatatttaacttaatttctttatccctcattcccccaaggataatcttgctgagaatagaatattgtgtctgttttttttttttactgccgtactgccatgcctagaacagtgcctggggcttaatatatgctcaataaacacttgcttaaaatgaataaatgaataaactctatatccatcataatgtcatgtttatccctaatacttttttatgtaagcaaattcccaaaacaaactctttgcaagagcagagattctaatttttggtttaaaaaagattgtcattatagttttggttaacatgataggggatcaataagagatgactcaaatcagaggcaggcaggagtgaagaccctagctgaaaatttcaaattgcctcttaggtctgtgatttcatctctttttattttgttgtattggagaagcatctgttcagtctgcatctaactgcagacagataaccactgtaataaaatgagatgtacaccctatggcatagagcaccgacattttcaaggactcatgttcactgatacaaaatgtatcattcctcaaaaatgtaatttctgtcttgctcctggcaactgcataattcagcttagccattggagcttggagtccagctgggcagtttcttttatatttgtttagccttaccttcaggttgctgtggcaacaagatctgtgctctgcggaagctgagaatatcagtggcctctgttcagtgccctgctataagttaaggagcaggcagatgtgcttaagcaatctacacagtcatggagcatgagttaacgaggcctgtggcaagcttttggtgtggtactcagttattttaatgtctgcagggcaactgttggcatttggggtgagacagttcttcattctgcaaggctgtccttttctgcactggaacatccagtagaacatcccaccaaactatcccttgtattaccagatacctccagctaaggaccacatacactgtgctgaagtggcagtggtgtggccattggaaagaatgcacgcatggccttctagcaatcggacaaaataaattgggaagtagttatggaaggcttcctgtattcagggagtacataaggtgttttgggaatgcaaagatgtacacttttgaaactcatcctttgaaaamtatggttgtccagtgtttaccacgctgatagtttaatatggcagttarggcccagtctgcaaaactcttatgtgaattccagttggagtaaatttgatctaaaaaatattgattcaacctgaaccaacagatacgtagaagctccaagaaaatagatgtggaaatatttcattatctttataaatatagctcacactttagtgtttaatatagagtagttatgcytcaagtaaggtatatgtccttatcatgaaattgattctaggccattttttttcttgctctgttttcctctacgyacttcttgtattgtgtgcttgcctatatgattcagttttctgttagctattgttaaagaaaaaaaatttatgaacatgttgaacattcaagcaatataaaaggatatgcagtgacagtgtaataaggttattattactatggttattactatgaataggttcttgtggatacttctgacagtttttgtgcatatgtcaacatatgtatgaagatatcctcattttaaaaaaccacatgaaggggagcctgttacatgtatttctctaccttgagttttacacttaacacatagtgtctcacattgttggtatccaacaaatacttattgaataattaaaaaataatacatctatagcaatgtttacagtcagcatatacattccagctccttcttttggtagataatagatccatataactgtattttgtaatatagatgtgctctaattcattggctatgtcccctaaggaaacacacatagattgttttgtagtctttctattacaracaattctttaatgaatctctttggctattttgagtctcttgcattttcaaaacaattttaggataagcttgtcgacgttcacaaaaagctgattaggattttgatagggattttgttgaatctgtatatcaatttaggaagtgttgtcctcttaacaaaattaagctttccagtccatgaacatataatgtctttttgtttacttaggtctttaatttcttaatgatgtttcatagttttcaatttataagtcttgtacttcttttattaaatgtattagtattcttttcaatatgattataaacagaattgttttcttaatttcattttcatcttaatgtatatctttgatcatagctccttctccccctgcttctttcccaaatgaatgagtatttcttttagataaattcctgcatgtggatttgctgggtcaaagagtatttgtatctaacatttaaaaaaatgttgccagattggcctcctaagaagttgccagaattcttatcaacagattgtaagggtggctttaatcaactgtttcttgkattatagatgataaaattttgaaccttgctggtctggtaagagaaaaattatgtctccttttgtttaaatatgcttatttagttataaatatggtcgtatatttgttttttgtttgtgtggagtacctttctaagccctttgcttagtttttctatttgcaagtaactcagtacttgtatagattgatttagattttcttttcttttcttttttttttttttaagagggagtcttgttccgttgcccaggctggagtgtggtggcacgatcttggctcactgcaacctccgccatctgggttcaagaaattctcctgcctcagcctctcgaatagctgggactacaggcgcatgccaccacgcccggctaatttttgtatttttagtagagatggggtttcaccatgttggccaggttggtctcgaactcctgatctcaggtggtccacctgcctcggcctcccaaagtgctgggattacaggtgttagctaccgtgcccggcctgatgatttagattttctattcttgggcttattctaatgtttaagatgtcataatttagggtcattggaaatgactaattttttaaaacaagtggcaaaagctggatttcaatcatatattcacataagactacatgtctgtatccatgtgctttctaatgcaattggagtctggccaaccaagtgttacattaagtaagacaagcatttaccgaatgcctaactggtgccagaaactgtactatagtgatgaatataaggtcgtgtccctggcttcctaagcatcctgatatgttgaaatgaattgtggcaactccttagcaggccaatttggaagccttccatttgcctgtttttaatagggtacaatttaaagtgttgacagagatattgacaatgttgtctggttttgaaggccaattctgcygggttgagaaagacagtgggtggttcagrccaatgagaaagcaggagcaaaggccagaaggtgaaagtagttggcaagtttttggaattgtgagggcttggtaagtgtagagtttacttctacatggcagatcagtcacgaggtggggctaggaaagtattaatacgttggcaccatattgtccagtggcttgaatgccatgctcaagagtttgatttttgtctttttgactttggaaggcatccatgtttttgaggaatggaattttaatgtggaggacccatccatagtgatgatgatgacgacgatgataaatagctaaactaagtgctcaaaagataactcatttagccttacaacttccatatgagagactattattgtatgagttttatatatttgaaactggatcttcttaataatgtacctagcacacacattaaacaatgatttttgtagaaatttgttttaaatgaaatttagttgtggttccaaaataaaagccttgcctcttctttcgtttttttttttttttttttttttgtattggtttcttgtgtgttacttacaataggcayctaggagtcacatactcagaggcctaaagtccttgaaggccttgtttatgaaaggccacccagtgaaaagggctcacttttcctgtgtgagtcggggctggacagagctcaggccttgtctcaagggggcagtcgtagttgtacttaatcatgtggtaaggtgtacccaagtgttggtagagcttctgacttttatgtgaattcttccattatctaaatgttggctcaagttttaaaaactttgggctcaagttttaaaaacatatttggcctagaatcactaatctactgttatttgagatatttaccctagacattttagactagccaaaatatacttaagtaatttaggtatatatctcattgatatacagtccttatccttgaggggaaggtgcagtgtcaactctcagaactgccattttgaagattaaaagtatgatcatgtctcattagtttagatgctgtaattttggaatacatgaaggaggaagctattgtttatatgatgtaggagagggatgagtatggtgaggaaggtaggtgatagctaattttttgagggagagatttagagcttgtaactaaaaaataattctgtattgccaaagttggaagactctagaaagttttaagaattttaggtcactaaagatctcaagagaaatcaatcttgatacgaaaggtgttatttatatttttgaaaaaaacttatttctctaaaaaccataaagcaagacttgaaaatctttaaaagcctgttttgtatctactttttataattcaaaaaagcccaaccaaaatactgtttaaggttattaaggatgcttccttgtagaaacgggattgaatatgatgtgatcctgtgagatctgatcatctcaatgggtcttaaggttgaaatgaacatcttccttttaggcagagaagatggcttgaatttatattaacacatatgctgtgtattgtcagagggtaatgagaattaaaatagcttatcaatttcttcactttggtttggtgaggaagtggaatcataaggttagtattgatcagatcatataagataaaaatgtgctatgtaataacctgttacattatggacactaggaattatttttaccacatgtgacatttttacctttatatccttttctctaccagtgaggaggttgaggaaatgttttaaaataaatttaaaaagaaagtttgtatgcaaatatcttgtttaattattttcatgaagtcccacatcaaatcccctatacacattaacattaaaaagttaaaaattatgggaaagccttcagaaaattagaatacatttttttcattattattacttaatgacaaatttaccattctacttgagtgaacttcttgattcatcatcttaatgtaatagttctgaaggcaggtggcagctttaaggaaaactgccacttatgtagaaaaagattattgtagagttgcttggattactgtgctttggcaaaaggatatgaaaagaaaatgctttgtcaacatgaagctaaaataaatatgatgactggcatggagcataacaagatttacaaatgtatcttcaattattttatacatgatctcaaattttgtctttcagtaactttttttctgcttgtaaagatctaatcatacttattggatagatttggaaagtactaaaaaccaatcaaacaaacaaacaaaaaaaaacaaataattatctataatctcatcacttaaccataactgtaaagtaatgggtggactctgaagtcagacagatactggatttaagtctttattccctattattatttatctttaacagctagctacttgacctttctgtgcttcagtttttttcatctataaaatagaagtaacaattgaatttaccttatagagctgttttgaggactgtatggtaaatattgaatctactacttactgttgttatttccttctagtctttttttctaagcatatatttttatttgtagttaaaaacatactgtatatttgtttcttttttttcatttaacatcacattataaacattttcttgtgcaatttccaggtgatgaacagcctccttctaaatcattgaccacatttcttattctttcctgaggataaatttcaagatatcctgaaccaactgatgacagcctatttagctacaggaatactctggaaggaaatggtagcttctggagttttaactggagtgttaatcttgccaccatgacctaatggaatatcacataacctccctggtgtgaccattaagcttagcaggatctcagagaatagacagaggaatatgcaagctggttatcagagaaggctctggagcctgtcagtcagtttgaaccttggttctgcaactttggcaatatatatattttttatcactctgagccctttctgtacaataggataaaactaatacctatttcatgtggttgtttggaagattaaatagtttgatatgtaatcctggcaggtggtaactacttaatgaatgttagctcctattgttcattatattagatacctaaagtttgttttatgattaaatgcgagagaatggcagtgatgttcgcatgtaatgtgagtacaagctgttaacatataaaatagggcaatacaaatattttttactccraaatggattgattttcctcccatttaaaataaataacagaaatattctgttttatgttttgtggccagaagctagcatgggaagaggcatttgatttaataatccttatagagaatttttaacaattttcttcagtaattcaaaggtggaaagtgatttttgtccagattattcttgttgaaagacaaaaatgctttatgttagttttttaaaaattaaatttggtcgggtgtggtggctcatgcctgtaatcccagctctttgggaggccgaggtgggcagatcatgaggtcaggagatcgagaccatcctagccaacatggtgaaaccctgtctgtactaaaaatacaaaaatttaacggcgtggtggtgtgtgcctgtaatcccagctactctactcgggaggctgaggcaggagaatcgcttgaacctgggaggcggaggttgcagtcagccaagatcatgccactgcactccagcctggctacagagcgagactccatctcaaaaaaacaaacaaacaaaacaaaacaaaacaaaaccaaaaaccaaaacaaaacacaacaatttaatttaagcaaaacacctgcagctaataatggtagcatttgtagtgcttactatgtgctacacactgctctaggtgctttacctgtaataactcatataatcctcacaatgccatatgaagaaatttattttattgtccccattttgtagatgaaggaactgaggcacagagaggtcaaataacctgctgaaagttacatagcttgggagaaaattctgtgctatgtagtccagctccagagcctgtgctttttaaatcagaaaacaaagaataataattaagtacaataccaatatgtttgcagtgagtttgtgttaatacaagaatttgattactattaaattcaagagcatgttttaaaaaattcatctgttttttggaaatatatgtatgcaaatttaaattcattttccccttttagtttttcagttatgggacaaaaatattatatcaaaacactgaagctttgcaatctaaattcttttcacctcttcaaaaagcgatgctaccacctaatagttttcaaggaaaagtggcattcattactgggggaggtactggccttggtaaaggaatgacaactcttctgtccagcctaggtgctcagtgcgtgatagccagccggtaagtcccttacatcaagcctattggcgacgcttttgaagaaactgttctgtgccatagtattgaaaacactgttcgccagagttgtttgattagcatcttaatcttatatgaaatactagaaatattatttagattatttaaatacatctttttggaaaaagttaggtactatttgagatgaaagaaacaatgaaaattgtggaactgatgtttgggtaaacatccgcaattttcattattttaatttctccaattcagtggtagaatatttctttttctgtacacgaagatgaagttaaaaagtacgacatggagccaggtgggatggtgtgtgcctgtaatcccagctactgggaagctgaggcaggaagatcacttgaagcccagaatttgagaccagctgggcaacatagtgagaccttgtctcaaaagaaacattttttttttaagcactatatggaggttgctttgtcttcagtgggagtgattatggttactgctttaattaataattaaccttataccaggaaaattgatgcagtactttcattttattttttattttttgtgaggtggagttttgtccagctcttgtcgcccaggctggagtgcagtggcatgatctcagctcactgcaacctccgcctcccgggttcaagcagttctcctgcctcggccttccgagtagctgggattacaggcgcctgccaccacacctggctaattttttgtatttttagtagagactgggttttgccatattggccaggctggtcttgaactcctgacctcaggtgatccacccgccttggcctcccaaagtgctgggattacaggcgtgagccaccgcgcccagccagtactttcattttctataaaataaacaggtatttcaaaatatctgttattgtgatgaatataggaagggtaagaccatgtggaaggaatttcttcttattaggcatattctggtaccctrtaaactctgttccaaagtctgaggctttagagactggtttaaaaatccaccccttcaccattttgaatggtgtaaaattttaggtaagccaagtagtcatccaaacaacagttactgtgtcatttgcaattgcagattgtccggaatattttttgtttttacattgtaatgtttttaagagtttaaatatattattttcattttaataataatttctrttcatagttttttttgtagaatgtgagactgcatgaataaatgtagtctctttgaacccataaatttagtacaaaacctactaacattataccatgaatatattttctttgtaaacctggcttatcaaggaaataatttaaatctgtgagtagatratgttaaagtaaactggtttaaaagtgactaattcaataagttagtatcaaatatataaaaatgatctaaatttgacttttagaaaaaattcacattgatttttgtatataaataacatctatactttctcagaaatgcttttctttaagctatggattctctrtattcttcaatttatgaaattgaaaaatataatatgaagtcatacaaggtgtttatttctaggaagatggatgttttgaaagctaccgcagaacaaatttcttctcaaactggaaataaggtacattaaaaatcagttatttaatttagatttaggaattataacatgttcaaataatttgttcatgcgtttggtttaagaaagctggaaaatgtcatattctttttgttattttgcaggttcatgcaattcagtgtgatgtgagggatcctgatatggttcaaaacactgtgtcagaactgatcaaagttgcaggacatcctaatgtaagtgtagcaatgatgaagccaaagtgcaaracacttgatgttgataacacccaccaacatgtacaaaggaaataaaatattgatactgatgtaggacaggcaagcccgaatctggggcttagcctgggaaggttcttggcttcacccaggaaagaattcaaggatgagccggtggtagaagagaacagctttattgaagcagcagcagtggaatggatctgtgactgttccttcagagcagggcaacaccatagtcaatgtgctgggcatagcagttgagaggcagttttatagtcgtatttatacccacttttaattgcctgcaaattaattaggtttatgcagaaatttctagaaaagggttggtaacttctgagttatcagttcgttgccatggaaagggcagtaacttgctgacattgccatggcaatggtaaacaaacatggtgcattggtgggtatgtctaaagagggggtgctttcatccaggacctggtttaactagtcctcattctggtcctgtgatggaactctgcctccagagttaggcctcctcctacctcaatatgagcaagtgctgtgttgagaagcacctattttccatccctaggaaaatgccagttctgctaaagcaaagaacagagtaggaagactgctacacaacttcctttcaggaatacttaaagaatccatttatgattgatcagaaaacaaacttgatttcactttatttaataagattatgaaataacaagagcagttatccaagagtacagcattgagtktaaatgattgatgctttttgcttctcctagtaacttttgattgtcttcctcagtggaggagaacgatataaacatgaaaaactataagaaattcaaaatttctccttttaagacctgaaatatgcatgaatattttgctgttscttrgtacatttatcggagagaagccgtttcttccagtagtctcaaagatagcacttttctatgttaaagktattttcagaaccagtaacactgaatctcctgtagaactagccagaatctttactgatggtaaatagatcatcaaccacaagctgcattggttaagttaaactaaaatgacaccagaaacaaaaagccatttcttgagattctttgaaataaaatgcagtcacatggtaaatatgtttaatctgtattaattttcttttttttaacttttaaaattttattcatttattttgagacagagtcttgctctgtcactcaggttggagtgcaagtggcacaatcacggctcagtggagccttgacctcctgggttcaagcgatactcccacctcagcctcccaagtagctgggaatacaggcacgtgccaccacacccagctaatttttaaaacaaaatttttgtagagatgacgtctcgctttgttgcccagcctggtcttgaactcatcccaaagtgctgggattacaggcatgagccactgcactcagccttagttttcttaataagagaatctaccctaatttaaagacggcttaggattctgaaatttggtaactaacgtaggaggttttcacagactcagactaccaaatctcatggtattgtttcgtaggtagctgtggacttcaactttattgkattatttctattaatacatttcagaaaaaaaaccctgcrgggaaaatgtttttcctcatctaaagtttctgtaacttgccttgttcatttattagattgtgataaacaatgcagcagggaattttatttctcctactgaaagactttctcctaatgcttggaaaaccataactgacatagttctaaatggcacagccttcgtgacactagaaattggaaaacaactaattaaagcacagaaaggtatgtttatttgcttttctcatatttatttggcttctgtgtgtgcaaggttctgtggtaagctctgtgatactttaaaagtcaatgagacagtctacacttgtacaactcacagtgtaatggagaaaaatgatatttaaataattatcatatgttacaatttgagcagtaataaatatatgtttcaagtgcattggcaatccagagacaggaatgactaactctccctagggtcagtgatcaggttgaggaacaagatgcaacttaagctgaaagttcaaagatctagatgtggagaaagaggagggaaaggacatgtgaatgtcaatggatagaggcctggtggagaggaggacataagtacatagggaatgatgaaaactttgatgtcattagagatggggaaaggartaggaaatgattttgggaaggtgggttggagtgtaattgggagagttctcrataccaaaataaggagtttaatgttaattctgaaagaaataggaagtatttttgtatagatttccattgaaggtggaacaaagaatgcgacttgattggaaaggttagtgacaacaagatggatgataaaaggagtgccattcaggaggatttgatttttcttttagcaggtggctagattgcatgggagataaagtagaagacatttagaagacaataagatcaacaggccttattgatttgatgagagtatttttagatgggatgaagagtctggatgataataccaatgagattaagaacactggagggaaaatagatttagaaagaacttactaggagaacatttttgttagtattatgaatgamttacyttataaaagttcatatgtacatggatagcaaacatgtctaatgtatatatgtgtgtatattcatatatatctagaaccagcgtacatttattcacctgacagacacttactaatgacttttgggtagcaggccctatactcatgctcaaagcacagaggtggacaagaccctgtccctgaataatttggggaacttgaagggtgcgggtattttctcagagaaggtggagagtattttaaacaaggaaaatgaggaagcgttctcatgctcctcagaggatgtcctttgagggttgaggggaggaaagagggcatggagctggctaggttcctccctctgttcagaaacctttgccttataaggttcaatttcttcttttgtgcagcgcaggtgatcctagaaccagcttgagatacgctgtaggaacagagagatgctacagaggcactagctctgtgtgtgtgtgtgtctgctcacatacatacactaatagcttccatcctttctatgcactcattgaaattgaaattcctggttactcatttccatgatggcagaatggatgtgatttataattggattttggataagtgttttatttgatgttttttttttcagtgaggggcaggaagatggataagagtgggaaggggggacagggaagagtgtgactcctctctcttcccttctctgtccgaggaaccttgatctctgtatctctcctgtgtctctgcctctgtctgattttctctcgccctaccccttgctgatatctccatttcattctctactgctctgcctctgtcagctcctcatttttggttctctgtttctctcttcatctgtctctttcgtttctwtgtccttctttgcctctttgtctcttatttcttccctcgctcatctctgtgaccctcaatttctgtctgactctcccttcttccctcattattgtctttcattttaacatagactctgatctatttttgttcatcacattggattaaaattctatgagcttcattaaaaatatattagataaaatatctttttaaaagatggaagccagtttttattcttccaagattcctgtcagttattgatgctataagctgacagagtttggagaacttggaccactcagctgaggggagtacgcggtaaaggatttgttctggtactggatcgacagtcaaggaactgaagcgtgacatttttaacaatatcatgtcttccagtctctcaatgtggtatctctcaccatttatttaggtcttctttaattcctatcagcagtgttttgcatgggcattgtacatgttttgttaactttctcccaaagtatttaaatttttggtgctattgcaaatggcactgttttctaaatgttattttctaggtgttttcttgtagtatttagaaatacaatggattagttttgtgtattgatgtattccctaggagcttgctaaactcacttaatggttattacagtttttttttgtttagattcctttggattttctgcattggtaatactgttggtgaaaaaaagacagtttttatattttccttcccaactgataagccttttattttctttcttgccttattttattggatgggaccttcactaaaatattgaatagrtaaaaacttagattctgctggttcctagtattaagaacaaatcaaatacatttcctcctgatgccaggaggaaagcaattagattttcattattaattatgatttacctgtaaattttcataaatatccttcatcagctttgggaagttatcttctatatctagtttgctgatagcttttttttattattacactttaagttctagggtacatgtgcacaacgtgcaggttcgttacatatgtatacatgtgccatgttggtgtgctgcactcattaactcatcatttacattaggtatatctcctaatgctatccctcctctctcccccaaccccatgacaggccccagtatgtggtgttccccaccctgtgtccaagtgttcttattgttcacttcccacctatgagtgagaacatgtggtgtttggttttctgtctttgcaatagtttgctcagaatgatggtttccagctccatccatatccctacaaaggacatgaactcgtccttttttatggctgcatagtattccatggtgtatatgtgccacattttcttaatccagtctatcattgatggacatttgggttggttccaagtctttgctattgtgaatagtgccacaataagcatacatgtgcatatgtctttatagcagcatgatttataatcctttgggtatatacccagtaatgggatggctgggtcaaatggtaattctagttctagatccttgaggaatagccacactgtcttccacaatggttgaactagtttacagtcccaccaacagtgtaaaagtgttcctatttttccacatcctctccagcacctgttgtttcctgactttttaatgatcgccattctaactggtgtgagatggtatctcatcgtggttttgatttgcatttctctgatggccagtgatgatgagcattttttcatgtgtctgttggctgcataaatgtcttcttttgagaagtgtctgttcaaatccttcgcctactttttgttggggttgtttgatttttttcttgtaaatttgtttaagttctttgtagattctggatattagtcctttgtcagatgggtagattgcataaattttctcccattctgtaggttgcctgttcactctgatggtagtttcttttgctgtgcagaagctctttagtttaattagatcccgtttgtctattttggcttttgtggccattgcttttggtgttttagacatgaagcccttgcccatgcctatgtcctgaatggtaatgcctaggttttcttctagggtttttatggttttaggtctgacatttaagtctttaatccatcatgaataaatttttgtataaggagtaaaaggaagggatccagtttcagctttctacatatggctagccagttttcccagcaccatttattaaataggaaatcctttccccattgcttgtttttgtcaggtttgtcaaagatcagatggttatagatgtgtggtattacttctgagggctctgttctgttccattgatctatatctctgttttggtaccagtaccatgctgttttggttcctgtagccttgtagtatagtttgaagtgaggtagtatgatgcctccagctttgttcttttggcttaggattgtcttggcaatgtgggctcttttttggttccatatgaactttaaagtagttttttccaattctgtgaagaaagtcattggtagcttgatggggatggcattgaatctataaattaccttgggcagtatggccattttcatgatattgattcttcctatccatgagcatggaatgttcttccatttgtttgtgtcctcttttatttcattgagcagtggtttgtagttctccttgaagaggtccttcacatcccttgtaagttggattcctacatattttattttctttgaagcaattgtgaatgggagttcactcatgatttggctttctgtttgtctgttattgctgtataggaatgatgtgatttttgcacattgattttgtatcctgagactttgctgaatttgcttatcagcttaaggagattttgggctaagatgatggggttttctaaatatacaatcatgtcatctgcaaacaggaacaatttgacttcttcttttcctaattgaatatcccttatttctttctcctgcctgattgccctggccagaacttccaacactatgttgaataggagtggtgagagagggcatccctgtcttgtgccagttttcacagagaatccttccagtttttgcctattcagtatgatattggctctgggtttgtcataaatagctcttattattttgagatacgtcccatcaatacctaatttattgagagtttttagcatgaagggcggttgaattttgtcgaaggccttttctgcatctattgagataataatgtagtttttgtcttttgttctgtttgtatgatggattacgtttattgatttgcataatgttgaaccagccttgcatcccagggatgaagcccacttgatcatggtggataagctttttgatgtgctgctggatttggtttgccagtattttactgaagatttttgcatggatgttcatcagggatattggtctaaaattatcttttgttgttgtgtctctgtcaggctttggtatcaggatgatactggcctcataaaatgagtcagggaggattccctctttttctattgattggaataatttcagaaggaatggtaccagctcctctttgtacctctggtggaatttggctgtgaatctgtctgttcctggactttttttggttggtaggcttttaattattgcctcaatttcagagtgtgttattggtatattcagggattcaacttcctcctggtttagtcttgggtgggtgtatgtgtccaggaatgtatccatttcttccagattttctagtttatttgtgtagaggtgtttatagtattctctgatgagagtttgtatttctgtgggatcggtggtgatatcccctttatcattttttattgcatctatttgattcttctctcttttcttctttattactcttgctggcagtctatcaattttgttgacctttccaaaaacgagctcctggatttgttgattttttgaagggttttttgtgtttctatctccttcagttctgctctgatcttagtaatttcttgccttctgctagcttttgaatgtgtttgctcttgcttctctagttcttttaattgtgatgttgggtgcccattttagatcttccctgctttctcttgtgggcatttagtgctataaatttccctctacacactgctttaaatgtgtcccagagattctggtatgttgtgtctttgttctcattggcttcaaagaacatctttatttctgctttcatttcgttatgtacccagtagtcattcaggaacagattgttcagtttccatgtagttgagcggttttgagtgagtttcttaaacctgagttgtcgtttgattgcactgtggtctgagagacagtttgttataatttctgttcttttacatttgctgaggagtgctttacttccaactatgtggtcaagtttggaataagtgagatgtggtactgagaagaatatatagtctgttgatttggggtggagagttctgttgatgtctgttaggtctgcttggtgcagagctgagttcaattcctggatatccttgttaactttccatctcgttgatctgtctaatgttgacagtgggttgttaaagtctcccattattattgtgtgggcgtctacatctctttgtaggtctctaaggacttgctttatgaatctgggtgctcctgtattgggtgcatatatgtttaggatagttagctcttcctgttgaattgatccctttatcattatataatggcctttctctcttctgatctttgttggtttaaagtctgttttatcagagactaggattacaacccctgctttttttgttttccatttgcttggtagatcttcctccatccctttattttgagcctatgtgtgtctctgcaggtgagatgggtctcctgaatacagcacactgatgggtcttgactctttatccaatttgccagtctgtgtcttttaattggagcatttagcccatttacatttaagatttatattgttatgtgtgagtttgatcctgtgattatagtttttttttwaaaaaaaaatcgtgaataagtattgaatttgttaatataagccttctttctacatttattgagatgggtatatttttaagcctgttaatatggtgaattacattaattaatttttgaatattgaacaccattgcattcctaggctgaatcttccttcattttggtaaattatcctagttatatattgctagatttgttttgctgaaattttcttaatgcttactttgtcattttccaagtgttacttttcattgagcttcttagcttctgtgcttgcttagtttagtgattaggatttgaggggagtttatatgcagatgttacctcgtcctttgcacctgctctggcagctttgtccaacaggtgataggttggctacagccttgctttgcgaaattgttactttaacctgaatccaacaaaagcctcttgtgccgccatcagaggcatattatataagtgttcaacatagtgtgatactcttcatatttggatttttttttagcatcttaagttacttaacattcaagttaaaatgttggcctcatgtctattattgtcttaaaattacattttgattgtatctagataaaactatttttcttaaaaaattttttttgcttttcttgcatgtatttattgaaaaaatatatgacagcctactcagatattgtacttgattttggactagctttggtgttgagtcacatggattactttataccagaaagctagaattccttatacctaagaacatatgagaattctatagtgattcccacaagttgtatattaaataaaggtatatgatgtaacaggtgttggaatacagaacaagcaaaatgtgaaatattctttttaaagacattacctaattttaaccaaattttcacttatttttacttccttctttccttcctccctccttcccttccttcctcccttcctttctttttttcccttataaaaatctttccttccttctttttttctttctttctttcatatctaatgtttattgagtgcttattttgtatcaggctttgttctaagtgctaaatacttattaactcatttaacacttgcaatgaccttgcaagtaagtgctcttttattcccatttatagacatgggtggaaactgacgtacaatctttttttaatgtaggaagtgaatttttaaygctcacatttacagatgagaaactatggcttattaattacctaagtgttaactattactattaaaatcgacaattgacataatttaaaaaattagttgttgtaagtggwctagtagagaaaaagaaggaactgtgactttttattgtagtcatagtcacttagtttacacctgatacttggacagttagtgagtgacgatattttactgttaktcagctttttcatctataaaatatacttgataataaattactactccaatatttagtaacagaacaaggcgttaggtgtagaagcctcatgaaaaatataaattgttttacagatgtacatgtgctttttcttacatgtgaatggacatccgatagcctagctaacataaagactttggtggaaataacttttaagaacctcagagaatttaaaactaagaagtagaagcaacccaaggaagcttgaaccatatggagcttgtgttggggaaagggaaagagtgaagtgaataatcttaccagcagccttgtgatagaggaagagaataaatgtaaatcascaactgaagaaagaataaaaacaaaggactgttttagttaatagagaagaagaaacagttttcaaggccagaggccttggaagcattgaactaagtaaagtacattatactgtttttacagtttaattaaattatcagaaaacacaagattttttaaccatcttgctgttcttctggagtccctgatgtgtgaaccgtaaacacaagaataaatttcaaaacattcctttttccaacccatagacattgtacttggccagttactcttccttgtcctccataatggagcaccctcagcctgtccagtctctatactagcccgtttgactgatccagtacacatgccctgattagaatcattctttacctgagccatagagtctccattcccagctctagtccactcctcactgaaggattaccagttcaggggctagcatgcatactttagcacagtggtccccagcccttttggcaccagggaccattttcgtgaaagaaaattttttcacagaccaggggaaggtgcagggggtggttttgggatgaaactgtttcacctcagatcatcaggcattagagtatcataaggaatgtgcaagctagattccttgcatgtgtagtttgcaatagggtttgcgctcctrtgataacctaatgtcaccgctgatctgacattaggtggagctcaggcagtaatgctggctcacctactgctcacttcttgctgtgtggcctggtttctaactggccatagactggtatggggctggggtgtgggggtcccctgctttagcacttaaaaacatgctacatctagttattgtttcatgttgtaagtctccttttccatcaactctccgtccattacaaattcttttatcagggtgcattacttctgccctacctgcaaagcctttccattccttccccaccatttcctaactcaacactgaacacaaakgtggtgctttgtttatgcagtgaaacattttggagacctgcaaaaggaaggtgagttgagtacatacttaacacttctttcaattatgtccttcaactttactattggagggaaaagatgaccagtcattgacatgatcagttggaatggaagcaaatgcaccttgtttcagaagtgggaagagtagagcatagcagaaggctttccttattcgtcagtagtgtgagtgcaaggtgtatgttgcttagagtatataagaaccacataagtacatttctttatattgtgtccagagattttgtttttttctagaacagtgggtgcatctaaagaatatttgaaaacacatttttagttatcagttgaaatttattaaggtggtattagtatccttttgaaatcacttttttctagagtcatctcgtttgatgggagagttcaacctcatctgttaaaatttcttagagcaactgtgtaccttattttgatgttttttgaagataaggtaaaggtaaagcgatttgagaattttgaaaataaattagtttttctttctaagtagtaattagaaatttcttggcaaggcagtagtagttacatagtagttaagagtgcaggctctagagcttaactgccaagttccaatcctggttaatacttattagtcctatcaacttggacagattagcttgctgtgcctgtcttttctgtaaaataatgttgataataaagccttcctcctaggattgctgtaatgattataagagctagtgtctataaagtgttaagaatagttcccggggcagactagtactcaataaatgttagttatgaaagaaaatgttaagtttcctccaagataaatgtatttttaccacgtcttttacaaggggactatcaactatctgaaacttaggttttgactcataattaaaatragttagaaaaaccagagccctgatatcccttcttactataattaaacttaaaaatagcagcctacatgagggacatatttatattaaatgtttaaatgagaaaagtgtttccttagtagataatattatttatrtagggttattctagtttttaaatgttatagtcctattttgagtagcttttagagaattaaggatttttagattttcatatgggctctcattgaaaaatggctcggagacaggtatcctctgtgccctcatcaaaaagacagagaagtttgtcttcttaccatgattgtcagtaagattaattgctagcaataatagtagaagagttagaactgcaaccaacagctcagttgtgtatttaggcatacaaggagttcagtgttgcttatatgtgacatataatgcctggaggggtaggagatgaggccaagcaatgtggtctttatccttcggtgataggtaaagttaaacaaggattaaaaaaaaattaagatactttatttctgtttgttggaaagttgacataatacactatactagtcccccattgtggggaccacaaatgaccacaaacttaacagcttaatatatcatatgcttataattttataattctgtttttttcaagtaaatgcacagagttgcttggctggtttctctgcttcagatcttataggctaatatcagggagtcacccagcagagctcatgtcttggaggctctagaaagagtctgtatccaggctcatttaggtcgttggaagaatcaagtttcttgtggttgtaggactgaagtgtatatgttcatggttactgtcagcttagggccaccctatctcctagggacctctctctgatccttacatagggactggtacatctcagagccagcaataccacaatatgtctttctcatgcttagggactgactttctcttctaccacatctctcttgcctgctccttaaaattcatctttctgactacagccagagaaagttgtctgtttttaagagttcacgtgattagactgtgttacttggataatcccagaaaggcccctctcttaaatcctgtaatctttcttaatgtcttcaaagttattttgccaagtaaaataagaaattcagttcttaggaattagggcatgggatctttaagtggggccattctgcccacatatatttcttatcttgttagaaaggaaaccctcagaacaacaagaatattttgaaataagtaaataatcatgtaatatctgtaatgtaaaacatgcttccttagatatggcacccttatgcactgctcaaccatgtgtagcagccctgacctaccggccgttcaacaaattcttggatgtgtctgtgaaactagggggctgggttgcctgttggagttaccttccattctggtgatgtttcctaacgcaacttgccaaattattaatacacagctagtaaatggcagtctttttgcatgagagcggaagagtaataggtggaatcaacaacagcagtaaattaacaagtaatccttagaatctaatgacatttgctggatacgccctatgttcctgttttacaggtgataaatctagggtccagagcagggatgcgacttccccagtctcatagctacacagctagtaaatagtggaatcagtttctgagcccaggtgtctatactattccccttctgttggtcattggaactaaatttgtttagtgattctttcaattcatagtttgtattgaaaccagattttagaacttttgaatcttcttttgaaattagatcataatcttgcacatatcatagcttttttgatagataatatgatttttgatgttcttttattactatttttttccatttcaaaataacaaaggatggactaacataatatttatttcatttattgcttcccttctctattttcttaacctcattaataatatagattcatttctgttgtctgctctgagctgttagaaacttgacttttataaagcttttccatgagcagttattctaactgaaataatgggcctctgtacaagaaggaaaatatatgtgactaaccctggggmtctaggaattctttactttgcactttagcaccactgttcatttttttgaagccgataattgtttcaccttgcagcattaatgctattggaacagtgcagtttcaaacctttatctcccttttacactcatgagaattaaaagctgcagtatattattctaagaggtgggctacccaaattttctaggctgagaaaataaaaccttaaagggataaaaagaatagtaaaataactttcatttcagcatctaaattgtagtaggatggcttaactcctttcccacacttggagaaatgtatttgttcagtcttagttgaaagatagtgcactttccattggagcatttgctttgtatttgccacttttaaagcagttttttttcttttgtaattttgctataagaatgatacagttagcatctgttgtcaatgtactgtaatggagcccactaatgttctacatccctcctctttcatggagtacgattttggaagcaaagtaattttcagcaatctgaaaggctgtttgatatatagaaggagttaccagaatgattaacataaccattcttattttttcctatcctcaaaatggtactcctgccccctcttccacccccgtgtttcccaggatgtgctgagttttctttctactctggaacatgctgagagaaagagaaactaaatatatggagcagagaaaaaacttatctgaatattcttcaaaatactttccttgtagtccttcaaatttaaatttctaaaagtatttgctgttatgtaaaagatgtaaacttattttgatccttttgcaaatattaagtattgtcttatcccgtgttatgaataaataagaagtagagaaatcactgatttctcaggacctaaagattacccttttaagcctttatttgtttatttatttatttgtttgtttgtttatttatttattttttgagatggagtctcactcttgtcacccagactggagtgcactggcatcatctcggctcactgcatcctctgcctcctgggttcaagtgattctcctgcctcagcctcctgagtagctggaattacaggcatgccctaccacacctggctaatttttgtatttttagtacaggcaggatttcactatgttggccaggctggtctcgaactcctgacctcaggtgatttgctccccttggtctcccaaagtgctgggattacaggcatgagccactgtgcctggccttattcagttaatttattgagaacctgctgtgtcctagacactattgaccactgtatatgcagtatcactttgtaatatagcttttatacaatcattttaaaaagaaatttagaaaacaagaaaaaatattttatatttacctacatatttactatttctttccttttgacaatctcagtttctctataatatcattttcatatcaccttgatttttgaagggtatttttgatggatatggaattcagagttaagttttatctttcaacaccttaaaaatataactccattgtcttctagcttacattatttttagaaatgagaagacaatgaaaatttttgtctgtgtttgtgtatttttattgcttatttttacctttggctgcaattaggattctatatatcattggttttcagttattgattatgataatgtattgatttttttccctgtttatcctgcttgggattcatttagctttctgcattgtaagttatagtttttaccaaattcggaatttttttagtccttattcaagtgctttttcttcctctgtgactctaactatacgtttgttagaatgctagatactgttccataggtcagtgaggttctgggtttttcctcagttttttttttcccatttgtctttcattttggatagtttatattgctgtgtcttcagattcatggatcttttcttctacagctaagcttatttgttcaatttttcctttcagatgctgtatttttctgctktagaagccatattggtttctattttgtattttccatttttctcatcatataaatattttcagtgaaatcttttaaaatatttgtaatagcatttaaaaggctgtttgtctgctacatctgtcttctctgtcatttctgggactctttgtctattaatcatttttctccttgttaggtttctgtgtctttttatgtgcagtaattttttattgcatgctgtgaatgttatgttgttgttctgtgtttgtgtctgtgtgtattttaattttcttttgaggtgtgtggttttttttattttggaaagcttctaaattacttatgcatcagcctaatcatttttaagggtcattttaaagctttatttcagcaagtatatagtagtccttactttggggctaatttaaccctcctactaaggcatttttttttctgagctctctactgaaagctctggatgttcagtgaagctgcttagaactcccatgtctcccagccctatgcaagctctgggaattgcatcacttacagcttcctagtagttgttctttgcctggcctcaatggaatctcacactaaacatgtacagcttatttgtctaaagactctttgagactccatgcagctttatggagttctattaatatctctgcctactttcctccttggaggaactcttagaaaccttagtttcctcaggctccccaaaccgatctctatcttcttaactcagtgtgaatgccattttctgcttagattcctcctcctcatccttccatctatatagtatctttaggcaaaaagctagggtatctcagggcttagtcattttccttctatcagagtcatagtccttccctgcctgctgtgcagtatctgtatataattgtagcatatgtcttactcagttttcttgatgtttacagcagaagggtaagttcattatggctggaggcagaagtccctgctagtttaagtttaattctgatttattcttattcaagtagtacttagttaatgggaatcctgaccagctgattatacaaggtgcaataggggcatgcctctgagatttgggctttcgtattgactcgccaggcatacattccaagtaagtgcagattgggccatcctaaatcataagattagtagcaagacatatcaattttcttaggttactctctcattaatttagagtgagtgaagttttaaaaaatactttagtttttcttataccctctttaatcagatcccatttttataaataatgttttccttatgtgtagtgatacatctatattgctaatcaactgtatccttttaaaatttcaggagcagcatttctttctattactactatctatgctgagactggttcaggttttgtagtaccaagtgcttctgccaaagcaggtgtggaagccatgagcaagtaagtacttccttgtcaatcctgttgctgaacataactaatacagttggtggctcagggaactgtattcctgctttctggtgtccatccagagaaaagtaaacaaagacttggattcaccatgagacatacattttatctcccagataagtcctatttgtctatagcagcgctgtcctgtggaactttctgcagtgatgtaaatgttctgtaaatatgcactatccagtatccacatgtagatattgaacccttggaatatcccactgtgactgagaaactaaattttaaaaattagtagctgtatatggctagtggctacatattagacaccacaggactatagcttttttgctctcccatagatctttatcagtgccatccctaacccctctcataagcacacgtttattcttttattgtagatactgtataagattaatgggactaacacagactatgagcacttcccaagtccagtggccttttctcagcagagtataactgcttttttttttttttttgagacaggacttcagtctgttgcccaagctggattgcagtggtgcaatcacagcttattgcagccttaatctcccagactcaagcgatcctcccaccttagcctcccaagtagctgggactacaagcaggtgccacagcgcctggctaatttttaaaatttttttgtagagatgaggtcttgctatgttgcccaggctggtctggaactcctgacctcaagaaatcctcctgcctcagcctcccaaagtgctgggattacaggcatgagccactacacccagccatgattgctttttgaatttgtcctccactggccttttccattgtctttattataatggggcttctcatcatttcattgcttgtctggcttgctataatcatggtatatttctttactaccagtctcttccccctgtattttgtattcacattttcaccagaattatctttctaagaacatatatgtctgctcacgacactccccagctaaaaatcttagatcatttcctgtcactctttggaataaaagccagaactcactatggcattctaaacagacttgtctctggccattgttaattaatttatttattcaataaatatttattgtgtaccttatatatgcttcgtcctagggatatgatagtgatggaaatagaacagtcctcgttgttagctgagcttaaatttttttactattccatttattatttccatgctttaatttccattgaactgttccatgtttccctaaacttaccatacagctttcatatgtctatggctgagttatattgttgttggaattttgctgtgatgttttgcttacttcctttgagatgttttctctgtaatcatttcctcctctctgtgccttaaaactttgtttaatccaatctagtgagaggacaaacactaataaatagattctaaaatgaaggtaatataccaatgtagcagagagagagagcagggcatcgcgggcctttttttttttttttttttttgagacggagttttgctcttgttgcccaggctggagtgcaatggtgccatcttggctcaccgcaacctgtgcctcctgggttcaagcgattctcctgcctcagccttccaaggagctgagattacaggcatatgccaccacacctggctaattttgtacttttagtagagatgggatttcctccattaacgtaacattaaacaatctgacttccccacttggaccagaagagtctggtccgtagctggtgcttcatgcttgttgagctgaattatggtactcttcttttagtagtcccagagcatttttaatatttaagtcagtaaatacacattagtttgagatagaaagaaatatttattcacaagctgaatcttagtctgaaaagagataattaccattttttaaggtcaggtagtgttggaaataaaggatgagaacttgactattttggcagcatttgttcaatgtcaatatttgttttgtgaggactcttcagtcttgttagagctttttatctcatgtcctttaagaactgatttggtgctgcttttattgtgttcctgcatataatagatgctcattaaacatgtgccttcctttacagcttgagttcccatcaaccttcttctcatactttatagtacacagtcttactaaataaggcattataggttcccaaattctacatgttgtttgggcccttgtcctttactcatactgacccatatgccttggctgtcttccttctccatctgtattagtccgttctcactctgctatgaagaaatacctgagactgggtaatttataaagaaaagaggtttaattgactcacagtttccacatggctagggaggcctcaggaaacttagaatcatggtggaaggcacctcttcacagggcagcaggaaagagaatgwgttccaagtgaaggggtaagccccttataaaactatcagatcttgtgagaactcactcactatcatgagaacagcatggggaaaactgtcttcaggattcagttatgtctacctggtcccacccttgacatgtggggattattacaattcagagtgagatttgggtggggacacagagccaaaccatgtcaccatcctaccttcttaatctctcagctcctcctttcccctgcctcttgcagcaaactcctaatccttcttcacccatcagctcagaatgttaccttttcagagaagccttccttgtcactcccacttaggttcttcttcttttaagcaggtatagcttacatcacacaattcccagcctagtaactgattcattatataaccaggctcacctctcttgagagggagggactctcatttgagagcagggactgactttatttgaggctaagcaatatttatagtattgacacatggtaagtatataataaacattggttgaatgagcaataataatggctaacatattgcatatattgttcttagcatcttaacatgcagagataactgtatgaggtggattcattatcagattacagtagttcttcagtatatcagctagcttaatgacagttgaaagatcatgctagcaattgaacaaatgtatctggcacacctctgagcacagagaggatggcttttcctctaggcagattttcttaacaggttgctcagtttttcataggataatatagactctgctcagtacagtaattctattaagacatgaagcaatttagagtagatacactataaataaatgcccagggtagctatggcaatgaactttgtcaaaaacatcactcagagaagcaatttttatgtatgttctgtctgaaagagatacagcccacccatttctctaaaatacattcatggattaagtcagattaacaggctatcttgagattacgtgtaccctattctgtagaactggttttactgaattggcctttgaaatgatgctataagactattaacggatgtctgatagtttcatagaacttagcgcatttttaaaattatactttaagttctgggatacatgtgcagaatgtgcaggtttgttacataggtatacatgtgccatggtggtttgcagcacccaccaacccgtcatttacattaggaatttttcctaatgctatccctcccctagctctccaccccttgacagacccagtgtgtgatgttccccttcctgtgtccatgtgttctcattgttcagctcccacttatgagtaagaacatgcagtatttgattttctgttcctgtgttagtttgctgagaatgacagtttccagcttcatccacrtccctgcaaagtacatgaactcatcctttattatggctgcacagtattccatggtgtatatgtgccacattttctttatccagtctatcattgatgggcatttgggttggttctaagtctttgctattaagaacagtgctgcaataaacatatgtgtgcatgtgtctttatagtagaattatttataatcctttgagtatatacccagtaatgggatggctgggtcaaatggtatttctagttctagatccttgaggaatcaccacactctctcccacaatggctgaactaatttacagtcccaccaacagtgtaaaagtgttcctatttctccacatcctctccagcatctgttgtttcctgactttttaatgattgccattctaactggcatgagatggtatctcgtggttttgatttgcatttctctaatgatcagtgatgatgagctttttttttcatagtttgctggctgcgtaaatgtcttcttttgagaagcgtctgttcatatccttcccccactttttgatggggttgtttgtgtttaagtttaatttgtttaagttctttaagttctttgtagattctggatattagccatttatcagatggatagattgcaaagcttttctcccattctgtaggttgcctgtgcactctgatgatagtttcttttgctgtgcacaagttctttagtttaattagatcccatttgtcaagtttgaacttagcccattttatctattgcaaggatacagtgtcttaaggagattgttatactgtacaattttccttttgtaagtctagaaagacttaaagcatttttcgtattagagacaattgtgcttttcctgagcaattagcttgctttttctttatgggtactgtggattgtgtaactgattaggcttaccttttttgtatagagtcatgggaagaatagatacaaatttgtgatgtgactattgcagttatatggaacatcacacacttcagtacatttagatattagcctcattcttggctccgttatatttcgttatcctggcttttctctctctttatcttgctttttttctttccttcttcctttcaaattatcctgtcttcctcatttgcattatatgaattcttttaagctacctcgtcattatttgaaattacattaagtatatatacacacaaatatacatatgaatgtaaattcctaaaatgaatttagattttaaaagagctacctgtaaagtaagcttttaaaacaagttcctttgaagttctttgtttgctattagtgttatatttttcttcaggacattaagcaagattttgttagattcctatttcctttcaagtttggttcaacaattatattaaagcctagttagacatggatgtggtttatattttcaatcgatgtactcttttactcaaataaagcacttgtgatattacagacattgtaatccaatgtacagggctatgagtaaagttataatgaactttgtaactacaagactgaactccagaaaatgtgagggaagggcatgaagcactcacgtttttatgtgaataatgaatacctactctaaaaatgtgtattgacattggacaaaagtatatattctaaactacaaatggtaggtggtgtagcatagtggttaaggacactaaaatgtaaaggttaggttgtacagtagagtgactaagggtacagactraagctagacctcttgagattgacaaattggccatatgacatagagaaaatgatttaacctctctgtgccttagttacattatctgtaatatagggaacaataatagtacctacctgttggggttgtaatctctggcatgtagtaagcatctagtgagtctcagttattactgtctttaacatatggtataatatttcagaatgtatgttgttgattttaatttttaggtctcttgcagctgaatggggtaaatatggaatgcgattcaatgtgattcaaccagggcctataaaaaccaaagtaagttgtattttgcttgttatcacattgtgaatgattaaataatgaaacactgataggtatattctggttgttgtgtaaaggactttccagagatgcctaggtttagagccctggttctagggaagaggcctttgcctttattcattatcgaatataagaaataaggaggcgggcaggaatatagcagctatgcaatttcttcataatgtcaatttcagtgtcttaatcgtttgggatcttttataccatcaatgttggcactttgtctgatttgtttcagtggtctgttattgtcctgtatttgttaactttcrtgacattttaaaggctcctacattgtctgacatccttttttaaaaaaaatcaaggaaatgtaactwtatttttagtttgagagatgctttggtaacttattatataggctttgtcttgttatargtaggtagcattttccttgactcatgcttgtgccctttcactctcagtcaattatgcatgtcatctaacgcccacatgtctctgattataagtccttctgacagcatagatttcacctataagtaataatccttgtggatactcattgcaacttgtaattatctctaatgttgttacagatgttgctcagaatatccacaccttctctgctctctcattatcccaaaataacttcactcacacttctcttggttttcacctaaagcaagtatttataatgccaaccagatgtaatgttgaaagaccaggaaaaatttggtaacttgtttcagttgtgtaaacatattggaaaataatactaaaggacttttgggttataggtagctctgggtattaaaaataacttggaaatggccatattagtttatttagcagtttaaaggatgggaaatagaaacaaaaacttcctgagtgattgaaacttgttgactatcttatttatctgacaattcaatactaaacagtctaataaaattagtggaaagaaacttaaaaacatacattaaaacacatgattcagggtggccctgtcctaagcatatctgaaaataggcttatagacacaaacgcttctctccaagaccccaatatctagggaaaaatcacctgcattttatttatttaacctatatttattgactgttcactgtatctacgggtactgagaaagatacagaagtatctctgagaaagtgcttgccactaaggagtttacagtctagccactgagataggagttgtacccaaataataactacttactgttaaagagattaaaagaaaactgaagtgtagaaactccctagcatgcactttttagaaccaggactgggaccagttgcaaccccttgtctctgggctttataacctcctgggaagaactggaggtctgtcatggagtcccctgagtgtttgttctgtcttatggctgcattattgaggaaaactgccacctaaacttcaaggcactagtacagaaaaatccagttgtttttattaatcagtgcacatccataattcatcttggtctgttccttcacatcattgacagaaagcaaattgtttggccaatttagttgtagtttttctctctctagaatctaattgaatttctacatacttgttttcttccttttccaatactttgggatgaaagaaaaggaatttcctcttaaatatttcctatgagccacttttctgtgtttattaaatgaaaagccagtaataccactgcctttaccacctaagcttgtacatatttcaggatacctttatatacattttttcatttgatgcttataacaattttgtgaggtaactaagatagatatcctcattttacatagaagaaactaagattaaaagggttatattttccagtgatctattttttttttaagaataatttggtgaaattcttttttacttacaaagcctaaggttttaagctgcatggcagcatgccattttatacacattttttcttgagtaggaaaggaattgattgaaaaacccgacacaacctaattgttttcttaatttctaagggtgcctttagccgtctggacccaactggaacatttgagaaagaaatgattggcagaattccctgtggtcgcmtggggactgtagaagaactcgcaaatcttgctgctttcctttgtagtgattatgcttcttggattaatggagcagtaagcgttgtttatttctcttcacttttttttcaggagtgtgtttggggcagggaggtctgttgtggaaccaatcctgacaatgctgaatgtaaatatcatttaaaatatgtatttagttgtaaataatataaaatattatatatattgtttagcctatgacatttattcagtgatgtattagtctgttctcacactgctaaagacatacctgagactatgtaatttataaagaaaagaggtttaagggaagtgcagggggttggggaattccctttcctagccaagggaagccctgacagatggtacctggaaaatcaggacactcccaccctaatactgcacttttccaatggtcttagcaaacggcacaccaggagattatatcccgcgcatggctcagagggtcccatgcccacagagcctcgctaactgctagcacagcagtctgaaatagaactgcagggtggcagtgagactgggggaggggtgtccgccagtgctggggcttgagtaggtaaacaaagtagcctggaagctcaaactgggtggagcccaccacagctcaaggaggcctgccttcctgcctctatagactccacctctaggggcaggacatagctgaacaaaaggcagcagaaacttctgcagacttaaatgtccctgtctgacagctttgaagagagtagtggttctcccagcatggagttggagatctgagaacggacagactggcccctcaactgggcccttgacccccgagtagcctaactgggagacacctcccagtaggggccaactgacacctcatacagccaggtgcccctctgagacgaagcttccagaggaaggatcaggcagcaacatttgccattctacaatatttgctgttctgcagcctccactggtgatacccaggcaaacagtgtctgcagtggacgtccagcaaactccaacagacctgcagctcagggtcctgactgttagaaggaaaactaacaaacagaaaggacatccacaccaaaaccccgtttgtatgtcaccatcacgaaagaccaaaggcagataaaaccacaaagatggggagaaaccagagcagaaaagctgaaaattctgaaattcagagcgcctcttctcttccaaaggaatgcagctcctcgccagcaacggaacaaagctggacggagaatgactttgacgagttgagagaagaaggcttcagatgattggtaataacagacttctctgagctaaaggaaggtgttggaacccatcgccagaaagctaaaaaccttgataaaagattagatgatggctaactagaataaacagcatagagaagaccctaaatgacctgatggasctgaaaaccatgacatgagaaatacgtgatgcatgaacaagcttcagtagctgattcgatcaagtggaggaaagggtatcagtgattgaagatcaaatgaatgaaatgaagtgagaagagaagtttagagaaaaaagagtaaaaagaaatgaacaaagcctccaagaaatatgggactatgtgaaaagaccaaatctacgtctgattgtacctgaaagtgacagggagaatggaaccaagttggaaaacatgctgcaggatattatccaggagaatttccccaacctaccaacgcaggccaacattcaaattcaggaaatacagagaaggctacaaagatactccctgagaagagcaactccaagacacataattgtcagattgactaaagttgaaatgaggaaaaaatgctaagggcagacagagagaaaggtcaggttacccacaaagggaagcccatcagactaacagtggatctctcagcagaaactacaagycagaagaaagtgggggccaatattcaacattcttaaagaaaataatttttaacctagaatttcatatccagccaaactaagcttcataagtgaaggagaaataaaatactttacagacaagcaaatgctgagattttgtcaccaccaggcctgccttacaagaactcctgaaggaagcactaaacatggaaaggaacaaccggtaccagccactgcaaaaacaggccaaattgtagagaccatcaatgctacaaaaaaactgcatcaactaacgagcaaaataaccagctgacatcataatgacaggatcaaattcacacataacaatattaaccttaaatgtaaatgggctaaatgctccaattaaaagacacagactggcaaattggataaagagtcaagacccatcagtgtgctgtatttaggagacccatctcacatgcagagacacacataggctbaaaataaaggcatggaggaaaccctaccaagcaaatggaaaacaaaaaaaaagcaggggttgcaatcctagtctctgataaaacagactttaaaccaacaaagatcagaagagagaaagaaggccattacatattggtaaagggatcaattcaacaagaagagctaactatcctaaatatatttgcacccaatacaggagcacccagattcataaagcaagtccttagagacctacaaagagacttagactcccacacaataataatgggagactttaacgccccactgtcaatattagacagaacaacaagacagaaagttaacaaggatatccaggaattgaactcagctctgcaccaagcagacctaatagacatctacagaactctccacctcaaatcaacagaatatatattcttyttagcaccacatctcacttattccaaaattgaccacataggtggaagtaaagcactcctcagcaaatgtaaaagaacagaaattataacaaactgtctctcagaccacagtgcaatcaaacgacaactcaggtttaagaaactcactcaaaaccgctcaactacatggaaactgaacaacctgttcctgaatgactactgggtacataacgaaatgaaggcagaaataaagatgttctttgaagccaatgagaacaaagacacaacataccagaatctctgggacacatttaaagcagtgtgtagagggaaatttatagcactaaatgcccacaagagaaagcagggaagatctaaaatgggcaccctaacatcacaattaaaagaactagagaagcaagagcaaacacattcaaaagctagcagaaggcaagaaagtactaagatcagagcagaactgaaggagatagagacacaaaaaacccttcaaaaaatcaatgaatccaggagctgttttttttgaaaagaccaaaaaaattgatagaccgctagcaagactaataaagaagaaaagagtgaagaatcaaatagatgcaataaaaaatgataaaggggatatcaccacctatcccacagagatacaaactcccatcagagaatactataaacaccactatgcagataaactagaaaatctagaagaaatggatacattcctgtacacatacactctcccaagactaaacctggaagaagttgaatccctgaatacaccaataacacactctgaaattgaggcaataattaaaagcctactaaccaaaaaaagtccaggaccagacagattcacagccaaattccaccagaggtacaaagaggagctggtaccattccttctgaaactattccaatcaatagaaaaagaggtaatcctccctgactcattttatgaggccagcatcatcctgatacgaaagcctggcagagatacaacaacaaaaaaagagaattttagaccaatattcctgatgaacattgatgcaaaaaacttcagtaaaatactggcaaaccaaatccagcagcacatcaaaaaggttatccaccacgatcaagtgggcctcatccctgggatgcaaggctggttcaacatacccaaatcaataaacataatccatcatataaacagaaccaaagacaaaaaccacatgattatctcaatagatgcagaaaaggccttcgacaaaattcaactgcccttcatgctaaaaactctcagtaaactaggtattgatgggacatgcctcaaaataataagagctatttatgacaaacccacagccagggggcaaaatctggaagcattccctttgaaaactggcacaagacagggatgccctctctcaccactcctattcaacatagtgttggaagttctggtcagggcagtcaggcaggagaaataaataaagggtattcaattaggaaaagagaaagtcaaattgtacctgtttgcagatgacatgattgtatatttagaaaaccccatcatctcagcccaaaacctccttaagctgataagcaacttcagcaaagtctcaggatacaaaatcaatgtgcaaaaatcacaagcattttttacaccaataacagacaagcagagagccaaatcatgagtgaactcccattcacaattgcttcaaagagaataaaatacctaggaatccaacttacaagggatgtgaagtacctcttcaaggagaactacaaaccactgctcagtaaaattaaagaggacacaaacaaatggaagaacattccatgctcatggataggaagaatcaatgtgtgaaaatggccacactgcccaaggtaatttatagattcagtgccatccccatcaagctaccaatgactttcttcacagaattggaaaaaactacttttaaagttcatatggaaccaaaaaagagcccacattgccaagacaatcctaagccaaaagaacaaagctggcatcatcacactacctgacttcaaactatactacaaggctacagtaaccaaaacagcatggtacggtaccaaaacagagatatagaccaacggaacagaacagagccctcagaaataataccacacatctacaaccatctgatctttgagaagcctgacaaatacaagcaatggggaaaggattccctgtttaataaatggtgctgggaaaactggctagccatatgtagaaagctgaaactggatgccttccttactccttatacaaaaattaattcaagatggattaaagacttaaatgttagacctgaaactataaacaccctagaagaaaacctaggcaatgccattcaggacataggcatggacaaggacttcatgactaaaacaccaaaagcaatggccacaaaagccaaaatagacaaatgagatctaattaaactaaagagcctctgcacagcaaaagaaactaccatcagagtgaacaggcaacctacagaatgggagaaaatgtttacaatctacccatctgacaaagggctaatatccagaatctacaaagaacttaaatttacaagaaaaaatcaaacaaccccatcacaaagtgggcaaagtgtatgaacagacacctctcaaaagaagatatttatgcagccaacagacacatgaaaaaatgctcatcatcactggccatcagagaaatgcaaatcaaaaccacagtgagataccatctcacaccagttagaatggtgttcattaaagattcaggaaacaacaggtgctggagaggatgtggaaaaataggaacacttttacgctgttggtgggactgtaaactagttmaaccattgtggaagacagtgtggtgattcctcaagggtctagaactagaaataccatttgacccagccatcccattactgggtatataccgaaagaattataaatcatggtgctataaagacacatgcacacgtatgtttattgcactactattcacaatagcaaagacttggaaccaacccagatgtctatcaatgatagactggattaagaaaatgtggcacatatacatcatggaatactatgcagacataaaaaaggatgagttcatgtcctttgtagggacatggatgaagctggaaaccatgattctgagcaaactctcacaaagacagaaaaccaaacaccgcatgttctcactcataagtgggaattgaacaatgaaaacacttggacacagggtggtgaacatcacacatgggggcccgtsgtggggtgggaggagcggggagggatagtattagcagatatacctaatgtaaatgacgagttaatgcgtgcagcacaccaacatggcacatgtatacatatgtaacaaacctgcacattgtgcacattcaccctagaacttcaagtataattaaaaaaaaaaaaagaaaagaggtttaattgattcactcttctgcatgtctgaggagggctcaggaaacttacaattatggctgaaggggaagagtcataacttaacatggtggcaggcaatagagataaagagagggagagagagaaaaaagggagacgagagagagagagattgaggattacaattcaagataagatttttttggggacacagccaaaccatatcaagtgataaattaatagatgcaggttaccttggtagatatacctttaagatgatcttcaatattgggtagatatttgaaattgtggagatgttagaaatagaattataaactgagtaaatcaatttaggtttaatcatgagttttatctttaaaatttkggcttgatttaaagtgccaaagagatattccatccaattagtatgggaaaatggctagtggttcagaaactttttaaaaggagttagtttcagagtttaaaaatttgttttttccaggtcattaaatttgacggtggagaggaagtacttatttcaggggaattcaacgacctgagaaaggtaatgcttttgtgtgtataatgtaatatcagcagctaggatactaagctttaaaaacatgtaaaaagsacattaaattgacatcttttttgtgttaggtcaccaaggagcagtgggacaccatagaagaactcatcaggaagacaaawggttcctaaraccactttggccttcatcttggttacagaaaagggaatagaaatgaaacaaattatctctcatcttttgactatttcaagtctaataaattcttaattaacaaamattcattgaatatgtattatgtgccaggccagtgatagccattgtatattcaaagataaataaaatgaaatatagtccttcaaaacattaaaaaaaaaaaaaggaggcatggggagagtaggtaaaggctcctctttacctattgatagaggtaaaaagtacttagaagtgcagagagaacagatctttgtgacttggaaaatcaggagaaactcaatggtggcggtagcatttgagttacataatatactatacctatattaatagggcctaaaagaaagaaattagaggatacacactaaatataatagactttgcctttccagtatactttcttttcactggacttgtgaattatcttctttgggtaactcagtattaactcaaacctttaatttttactaggacctatttgtagccaggcattttatttagtactgaataagctatagccgttgccctttttaaattcattatctagcaagatagtcaaacttataaataattatttatgatacattgtgataagtattattccagcagtatttaagtgtagaggaggaagtaattcattctgtctccagagtttggagaatgtgatgcctaagagatagcatgccatcccagctgtaaaagaagaatagatttctctgggtaaaagaggtaaagaaagcctataaaatatttttgtatatcatttgattaaatttcatctttggtttgactaatttgtcatcctgaaaatcaaataataatgaatccaaagtctcaagtctacagagctatacttttgagcctatatttttaaaatgtccattttgctttcccaggagtcrgttayaacatgttcactagactgactatccccattgcccaagttgacacaagaggaaaccagcttccatcttacctcatctgaataaatctgccacaagcccatggaaaccccaattaacattgacagttaattgtgtacataaattacatttattacatttaattgtgtatatataggggatgttataggtttggaataagtggcccaacatttccaattatactgactttcactgggcttttttttaggctgttgcactttttctccacatgcttgcaatacaatactctcaaaataaaacgcagacaggtacctagtctccattttacctttagtactaatcctgtgtattagtctgttctcatgctgctaataaagacataacccaaactgggtaatttataaaagaaagaggtttcattgactcatagttcagcatggctagggaggcctcacaatcatggcagaaggtgagtgaggagcaaagtcatgtcttacgtggtggcacccaagagagcttgtgcaggggaactcccatttataaaaccatcagatctcgtgagacttattcactatcacactattgtgttgatattgtgttcacacaccaataatgatggtttatcactcactccatttccaaacccaccttcccacccacctctcaccaaacacacaaagacacactctttccctccactgattccaccagtatagccatatttctctttctggttaaatttatactaaatgtttacatttatataacttaataaatattatttttttccagtgttgtctcaaccttttttaaaaaaaaaattcagattacatgataaatcaggtccttttttagataaatattatttttagtgttctattgttttgatgtatcattatttaatttattgggaatagggttatttatatttattgtttttatctttttaaatttttatagagacaatgtcttgctatctttatcagtctggtcttgaacttcagatctcaagtgatcctcctgcgttggcctcccaaagtgctggggttacaggcatgagccactgagcctggctgttgaaaattttttgttttttaatgtttttcaagaatgctaatgcctcccttgccaatgcattttaaaattattattaatattacttttgattggcaaatcataattgaattcatttatggggtgccctgtacatttaaggggtacagtgtgatgttttgatatgtgtatacaatgtggaatgattaaatcaagctaattaacatatctatcacctctcttacctattggcctttatggagagacatttgaaatttacttttattagttatttttaaatatacagtacattattattgactatagtcaccctgcagtagatcttaaaacctgttctttctatctgaaattttgtatgctttgatcagaaacccccttcttcccactccctcaacctctagtaaaccatcggtctactttcttttcttttcttttttttttttttttgatatggtgtctcactcttgttgcccaaactggagtgcagtggcatgatcttggctcaccgcagcctccacctcccgggttcaagcgattctcctgcctcagcctcctgagtagctgggattataggtgcacgtcaccatgcccggctaatttttcgtagttttagtagaaacaaggtttcaccatgttagccaggctggtctcgaactcctgacctcaggtgatccgcctgcctaggcctcccaaagtgctgggattacaggcgtgagccaccgtgcccggccaatcatcattctactttctacttccatgagttcaactttatttgatgccatacataagtgagatcacaggttacttttatttttcagtattataaataaaactatgaacgtttttatgtataacacatttttagaatttggaattttttcctcatttctagaagtggtattattaatcaaagttatgaagcttttaaagtttttttgatatacatatccaattgttattccaaagatttgtgtgagtttaaacccccctgagtaatgtgtgacactgcccgtttcaacaaatagctgccaacaattaaaactattcaccaattttacacgtaacgaatgatagtaccgttaaaaacttattttattattagtgagattgaatacttttctacacttttgaatttcctgtttgtcttttttacctgttggtatcttaatggggtattgtaaaatttttggtttgtatgagtttgtatgcaattttttcctctgttaaagacaaaaatagttcttttaatagtttcttagtcatctattacatcattattatgtgttattacaaatggttgatgagaaagcaaagcttgcagcatggcagagaggatcagagaagagagatcatggagatattgactaacagatattttttcctgagtctgaaagagaaacaaacattgtttatgggtaatcactgtattctatgacagaccacatgtgggctgtaaccacatcaatgttcaccttaagaattattactttgtcactcaataccttctgtaagagtcctgcttctattgtactagtggaagagttaatactcagtaaattaaagattattggtaacaatatcactcatcttaccattaacatgtgaaaccacctccaggaaatgtttcaggtatagagtgacagccattgtttccttattgttcttgtggaaactaaaacaataagaatttaatgactttgaataatagaattttagagctagaaaagccttagaaaatgcaaattctcaatgtttttattttacagttgaggaaactgcagacctagaaagttatgtgacttgccctaggtcacacagtaagtcaagctcatgtctctcacccagttagatatttcttgggatcataactcaaatcaagagccaataacagggtttttaggaggtaacagttagacattacaaaagcctagaagaggagaaagcccatcaatttttttagcttgttagttgaagtatgacttctaaaaatgcacaaatcatgaattattacaatacaaatgcactcaggtaaccattctccaggtcaagaaacagaacattaccaggaacccagaagcctcccttctgcccaccatcgcgattcctttcctccttctcacaactaaccactgtcttgacttctaaccccatcgttaagctgttttgagatttatataaatagaatcacacaatatgtattcttctgttttttggctttctttctgtgtaataattgcttatgcattctcattgttatattccatagaatataaggtatatatgaatataccaccatttatttgttagctctgctcttagtggacatttggattgtttctagtttgaggctatgccaaacataaagctgccgtgaaccttctattcttttggcgaaaatatatacacctttctctgttagattggtaatacctagaagtgaaattgctgggttttagggtatgcttgtgttcaaatttagtagatactgtcaaatggcttccaagactattcacaatttaacatcccaccaagctgtttgggaacttacactgtgctgcatcctcaccagtagtgagcattgaaattctctttactttgagtcattctgtgagtgtgtggtggcatctcatttgttttaatttgctttttttttttttttttttttttgagagagggtctcactcctgttgcttaggctggagtgcagtgacacgatctccattcactacagctttgacttcctgggcttgggtgattctcccacctgagcctccctagtagctgggactacaggtgcatgctaccatgcctagctaactttttgtagagacagcctttcgccatgttgccaggctggtctcaaactcctgggctcaagtgatcctcctgcctcagcctctcaaaatgctgggattacaggcatgagccactgcatctggccatttgcatttctcctgattactaataaagttgattaatttgcatatgttattggacatcatttgggtatcctctagtgaaatatttgttcaactttctttttttttttttttttttttttttttttttgagacggagtctcgctctgtcgcccaggctggagtgcagtggcgggatctcggctcactgcaagctccgcctcccgggttcacgccattctcctgcctcagcctcccaagtagctgggacgacaggcgcccgccactacgcccggctaatttttttgtatttttagtagagacggggtttcaccgttttagccgggatggtctcgatctcctgacctcgtgatccgcccgcctcggcctcccaaagtgctgggattacaggcgtgagccaccgcgcccggcctcaactttcttatacatttttctattgggttatatttttaaatgttggtttctaggagtaatcttaatatattttggatatgtgcctttgtcaagtatatgtgttgcaaatatcttctcccactctgaaatttgacttttcactctcttaatagtttttttttaaagtttgtagtcattttctgaacagaaattcttaattttaatggagcccaatttttcaatttgtttcttcataattggatgtgaagaagtattttcatgcatgaggtattgaagttattctcctgtgttgtttacatatgtttcacatttatgttgataataaacttggaatgaattttgtttgtggtatgagataggcattgtgcctgtaattttatatttgcctatctagattcatttttttcattcttcaccctcttctctgctcaaggaagcagacctgtcatttataggtaagtgtgactgatgtagctgaggtgtaggaatttctttgtctgatagtgctcaggaattaaagtctaccatgatagtcctgatgctagattcatgtcagttattcctgacagccctctaggaagtctcttcagaaatttccctatcataatttgttgttgttgttgttgtttttctttctttgctcatgctgttactgtaagaatgccaaacctggtagagttttggcgcatacttggtagtgaacagttatttttctatgaattaaatataggaaaattctgtatgtccctgttattcctttggatatctttcatgaagaaatatttgactgtgggccaggcgcagtggcttacgcctgtaatccc

SEQ ID NO: 95597 - DNA, 12801 bp, Homo sapiens
gaggtaagggggcaaggaagcctgatagaaacaagtggagaagggcatgggatgtgaaaaagtggagcagcaacatttgcaggttgtggtgcagtctgtggttgccgtcctcctgccctgctgcaggtcctatgtgtatgtatttttaaatcaatgtatttaagtactataacaaccacaatagtaactgacctctgtaaaggaatgtttaggttactaaacacttttacaggttatctactctacttaccagtttttacttacagttttcaaccaatattgcctttcaaaaacaggaaaagataatcttcacttaaccaagattagcgtttttcattttcccccgaaagtccagaatgggaatgacttgacattgaaaagccttaccaacaaattaaggaatgacacgtaggcagcacagtctttcaaggggctattttccaaaaattcatttaaaaaacagttcttggctgggcacggtggctcatgcctgtaatcccagcacttggccgaggcaggtggatcacctgaggtcaggagtttgagaccagcctaaccaatatggtgaggccctgtatctactaaaaatacaaaaattattagccgggcgtggtggagtgtgactgtagtcccagctactagggaggctgagacaggagaattgcttgaacccgggaggtggaggttgtagtgagcccagatcgcgccactgcactccatcctgggcaataagagtgaaactccatctcaaacaaacaaacaaaaaaaaatcaaagatgacttaaaagactggagagacacaagagtcttggatacgaagactcagcatagtaatgatgtcagtcatccccaaatgatctacggatttgacataattcctatcaacatccgaataaataaaataaaataaaaaccagttcttgttccaaaagtaattgaaatacacttctttttcatcaggaaaacagtgtctaggttcctaagatggcccacaaatgcccattttacctcccacaattctgctgagctgcagttcacactcattacactagcctacgtgttgaggcaattccctctggaactggggaattccaccaattccctctactcctttaatgagtatgatttgcctaaaaagccatgtcaggaattccgaagtcaccctagacctcttcctatctcacatcttctatatccaactggccactaaagcttatcattactacccttctcaaatccacctcaccatgccgtatttccatcrgcttttacttgattcacgtcctgagacctagtctccctcatagtacgtgaactacatagtacatagtacatggagtgaggagggtaacatgccttagcgggatgatggtttctcggaagttggtagattaagagatcaaaatatggaaggggatatccatgttggcaaggatagatttgactaaaatgtgctatgtccagtgaacgaacaaatgtaccatgcaatgttaaagattttgaatactggtgaatattcgtatggagttggttttgtatgtaagtgtaatattgatgtattacagttgattaggagattgctaatacttgcttatatgcatgtactgtaagctgtttagtactataaggcttatgtatgtactatgtacaatcaagcattaatagtactatatattattcatggggactagcaggttggtagccaggtgaccaggcctccatttcctctgcctgctttttaatgattaatattcctcaggctcttttctttgtaaaagtctcatcaggggtggcactactggaccatctaccatggcaactatgaattcatattttcagcactgatctctcatgtgctccagatccacagattcaatgatctattatacatgtttgcggacagctaaaattcaataggctcattttttctttcttccaaaaaatctaccccaccccctagccaccaccaattccctctactcctttaatgagtatgatttgcctaaaaagccatgccaggaatttagaagtcaccctagaccttttcctgtctcacaccttctatatccaactggccactaaagcttatcattactacccttctcaaatccacttcaccatgccgtatttccattggcttttccttgattcacgtcctgagacctagtctccctcattcaagtctatatgcaaccagatatgatcatttctctgtcttcctaaaagttcagtagcttcctattgtctgcagtagcatttctcaaactggcaaaagagtaccttcaaaattaaacaaaaaatttcaaaaacctcccctacataaattgaactggattaaacaatgttaagcaggcctctcactagcaaggttttgaaatcttacaatgcacaatactacatatttccctgtcatgaggaatcggggtggaggggagccccaactgggttccaaggacaaagtcaaaacttattgcaagacatgtaagatcctacagattctggccctgcctagctgtcaacgtgatctgccattcatcaatgattatcattcacccattacaaaccttacgtgtcattcacttacaacacaatctgtagttcttcaaagagccctactgttttctgactctaaatcctttatatacaatattccttctgcccagaatgccgcccttctctaacttagtctggttgaagagctcctacttgctcttccagggccagctcaggctactaaactttgattgtcccttccacctcctagcagaggactccttcaacctttgtcctgcctctgcagatatcagagcgcttgtccaacactactgaatttagagactaaaaaccttaaaggttgggaaccaggcaggcatccagcagtgtagctgaataaaggagacagggcaagactcggggaagaaggggtggaatccctcttctttttctagtcaaaatttgacaacaaagtaattttgtctttggtatgctcctacatctcatccctatcctcctttcccagctctcccaataccctgtgatatggtttggctgtgtccccacccaaatctcatcttgaattcccacgtgttgtgggagggacttggtgggaggtaattgagtcatggtagcaggtctttcccgtgctgttctcgtgatagcaaataagtctcatgagatccaacggttttaaaaagaggagtttccctgcacaagctcttctcttgtctgccgcaatgtgagacatgcctttcaccttccgccatgattgaggcctccccaaccacatggaactgtaagtccattaaacctttcttttgtaaattgcctagtctcaggtatgtctttttcagcagcatgaaaacagatcaatacaccctgtgttcccaggtcccttagtgacctcatgtaactctatacaacccccaccacagcactcttcttcagatcaactacttgctcttcctcttaatcaggagcccttctgttcagaaattattttattttattttattttattttagacagagtctcaccttgctgcccaggctggagtgcagtggcacgatcttggctcactgcaacctccgcctcccaggttcaagtgattctcctgcttcaacctcgtgagtagctgggattacaggctcccgccaccatgccaggctaattttttgtatttttagtagagacagggtttcaccatgttggccaggctggttttgaactcctgacgtcaagtgatccacctgcctcagcctcccaaaatgctaggattacaggcgtgggccaccacacctggtccagaaattgatacataaatgtgtgacagcttcttgtggctattaacctaagatgaatctctaagaaacaaaatttaaaaagaagtatggagaggataagggtggagcaggcactgtaacacacagaaaggcctgctacaggttctttgcctggaaactaagatcagatcctcagtgggctgcgcaggggaagtcattccagagaattttatgttcaatcaacgtgtaacacctaacacgctcctacttgacacaggcacactctttcctaaatgcattccattccctcaactttctaaagttcccataaggagtcctactatgtgctaggaatccagcacatgcatgataaaactccatcattcttttttcatcattttcaactggctactattaagtgcaccatatgggccctgagaatgaagcattgaaaaaggcaaattcatggagtttacaatctagtggaagacacagataaggaaaacaataaataaacgtgccatttttctgacagcaatgagtgcattcaagaaaataaaacagggtaataggataagtagtgatagggcaggggagtgacagagtgtgagaagggctcctttaaccaggatggcagagaagacctctctgtagggaagacgtttgcattcttttttcttttttttttttgagatggagtttcactcttgttgcccaggctggagtgcagtgccgtgatctccgctcactacaacctttgtctcctgggttcaagcaattctcctgcctcccaaatagctgggattacaggcacccaccaccatgtctggctaatttttgtatttttagtagagatggggtttcactatgttggccaggctggtcttgaactcctgacctcgtgttccctctcctcagcctcgcaaagtgctgagactacaggtgtgagccatcatgcctgtcggatgtttgcattcttcatagagttctatttgtctccttcctcacaatgacaaccataacagctacatcggctgctgctactgccacaaatacaatctctgctaatattaccactgccacctcagtatccatgaggaagacccttccacctgtggcctcttcgttccttgacttcctctctttcagtgatcttgtccaccctgacccacctcagccactcacttccatgatcataccctagacctgaccattaccaatttttctaccaaaactttcaatgtctcattgcaaggctagataggagactaccatcttctccctgtccagctcgctcccactagtgactctaactatctttgcctgcatgagacgtccaatccatagatcttcctttgttttcactgtcccccacccacttgatgtcctctctccccaacttactgagctttccttcgatgcttagtcactgtaatcactctcttgcatacattccagctcctcaccctcctcacatctgcatactcacttgacaaaatcccgaacctgtttcgattcaactctctgcctgctctgcacctgcaactgacatgtggctgagggaaaatacaaaaccacgatggctgatgactggtctcactttaaattaatgactgctagccacaagtgagtccttagagctgcgtgcctggcaaccaaactagttccctagatattccttctccaagtctcctaaaagactgttacatctattcctctctcttcaaagtgccaacactccctctcccatcctcattctatgcagatgatctcatttcctattttattgagagaatagaagcaatcggaagattaaaaggacttctcaaagctcctacaaccaaatatgttacaatggaagaggtgtctcccatctaggggcaactcttccacttgtctactagattcccacccctctcacctactcaagattatggctataacatttctcctgtcttctaaatcattaatttttcctgctctaccagatcattttcatcagtgaacaaacgtatctcttgacccacttccctctctaagaactgccccattttttctctttccttttacactaaagctttggaagtgttgtttccaaagtctctcccctactcatattcttcctctctcctctctccctgcttccccccactgattcatgtttttctattcctcttggacactagaactgatccactgcatcttcttgtgcagcgctgtccatgtccctgagacaccatggtgaaaatgaaggccagagtaaacgagttggctgtattgggttcctggtcaccaaggctgcttttaactctggcaaagtgtatattgtcaccaccaatgaccccatcattgacctcaactacatggtctacatgttcccttctcattccacctatggcaagttccatggcaccattaaggctgagaatgggaagtttgttatcaatggaaatcccattgccatctcccaggagcgagatcctaccaaaatcaaatggggtgattccggcattgattatgttgtggagtccactggtgtcttcactgccatggggaaggctaggactcattttcagggggtggggggagccaaaagggtcatcwtctctgccccctctgctgatggccccaagtttgtgatggacataaaccatgagaagtacccaaacagcctcaagatcatcagcaatgcctcctgcaccacaagatgattagccccccggccaagatcatcacctgacctgccttctggaaagacctggcaaatatgatgacatcaagaaagtggtgaggcaggcatcttcacctgccttcaggagggccccctcaagggcatcctgggctacaatgagcaccaggttgtatcttttgactttaacagcaacactcaatattcaattttcgatgctggggttggcgtcaccttgaacgaccactttgtcaagctcatttcctgctatgacaatgaatttggctgcagcaacagggtggtggacctcatggtccacatagcctccaaggagtaagaccccctagactgccagccccagcaagagcacgagaggaagagagagactggactctcagctgttggggagtccctgccccactcagtcccccacctcactgaaattctcccctccttaacacattttcatgccagaccccctgaagaatgggaggggcctagagatcctcaccttgtcatgtaccatcaataaagtctcctgtactcagcaccccccaaaaatctgatctcaagaattcttaagaaatgtaactccatgagatttacaagacttcctaagttctacaatgagaattccagttgtaccagcaaaaatgtctggaaccataggtacagaaaagtataaggccatacattaagatttttctattgcattttaaaatgtatagttgttgaggttttgggaaaaattataaaaatagagaaaactacagaaagtaacatcatacttatgttcccattatccaggactaatgactgtgaatattctggcatattagcctcatgtatttaaaatttttattgtggagaatttcaaacacatataaaagtggagaagagagtagaaggaatagtatgatcaatctccaggtacccatcagtcaacttcaaaaatgatcctgccatggtgaacattttttcatctgttcccttacccatttccctcacaaattgttttgaaggaagccccatatattgtataatcttaactacaatataatcagtatacatctgtaaaatgtatctttgatatcctcttcacatttataatagcctcatgatgtcacaatttttttaagtttgtttaaatttggttccaaataaggtccacacattgcaattacttgatatgtgtctcttaatctataagttctcctgccatctctctctctctcttatttatttattttttttgagacggagtctcactctgtcccccaggctggagtgcagtggcacgatctcggctcactgcaacctctgcctcctgggttcaagtgattctcctgtctcagcatccagagtagctaggattacaggtacccaccaccatgcgcagctaattcttgtatttttagtagagacggggtttcactatgttggtcaggctggtctcgaactcctgaccttaggtgatccacccaccttggcctcccaaagtgttgggattacaggcatgagccaccgcgcctggtctctttttttctcttaaaatgtatttgttggaaaaattggctgtttatcctatagaatgttccacagtctggagtttactactgcatccctgtggtgtcatttaacatgctcttccatcgtttgaatttcctgtacattgctggttggatctagaagcttaatcagatttgggtttatttttttggcatgatcacttcattggtggtggtgtgtccttccattaggaggtacagagttgtcataatgtctctgtgtgatgttagcagctgttggtgctccactgggggttgcaaagtggtgatattagaattctgtcatcccatcttcatttattagctggaatacttctataaaaagaaatgtcccctcacctactgtatgtttctatagaaaggcaggaaagatgcttgatttcttccctttacttagcagtttttaaaaataatgagctggggctgggcgcagtggctcatgcctgtaatcctagcactttgggaggctgaggcagggagatctcttgaggttaggagtttgagaccaacctggccaacatggtgaaaccccatctctactaaaaatacaaaaattagctgggcatggtggtacacacctgtagtcccagctacttgggagactgaggcaggaggtttgcttgagcccgagaggagtaggttgcagtgagccgagattgcaccattgcactgcagccaaggtgacagagtgagacgctgtctcggtaataacaataataataataataataagtttgttacttagcaccctccaatagtgagatttttttcccatctcactacggcaggctttcacccttcaccattccacctaaacagctcttgtcaaggtcatcaatgatcctcatgatgttcaatccagtgatatagccttccgtcctcaacataggtgaagtgtcaacagcatttgacacattctttttgcaacatttgttttttcactttctttctaggataatctactattggttttcttcccatctccttctctatctcctttgttgatttctcctcttctgcctgagttattttttctaactgagatgtaattcacataccataaaatgtaacctttcatagtgtacaattaagtgtttttttgtgtgctcacagagttgtgcaatcattaccactaattctaaaacattgtcatcaccccaaaaagtaaccctttatgcattagcaatcactctccatccctacagctgtgcctctgacaattatgaatctactttgcatctgtatggatttgcctattctcctccttcacttaacattggagtgctccagagctcaatcccttttcctttttatctatccttaagtccttggtgatctcattcagctctatggatttacatacaatccacatagtgacaacaccagcatgacctctccccttaaactctagatttggatacccagctgcctatttaatctgtcccgatggatatctaatagacatcccaaacttaacatgtttcaaaactagctgctgatctcctagaacctgctccgcctgtatagcctttatcacagattttgacaatcttatccctccagttgctcaggcaccaaaaccttagaatcatcttggactccgtcctctctcattcacaccccacatctactaaatcgggaaagcctgttggctctaacttcaaaatacagccagaatctgactatgtcttacaacctccactgctattactcttttcttttctttttttctttttttttttttttgagatggcgtctcgctctgtcgcccaggcttgagtgcagtggcgcgatctcagctcactgcaagctctacctctcgggttcacgccactctcctgcctcagcctcccaagtagctgggactacaggcgcccgccactacgcccggctaatttttttgtatttttagtagagacagggctccactgctattacttttatccaaaccaccatcacttctcatctagttatttcagtgatctccctgctaccacccttgtcccttctacagtttattttcaacccagcaaagggtggttctttaaatatatgagttaggtgatgctgatcatgttataataataccttttgcacctgctacgtgccaagccctacaaggccttacatgatctggccctgctactctccctgtcattcattcattcattcataccactctacactggcctccctgctgctctgaaccacctcgccagcatgcttctatttcagggcccttgagttgctattgtctctgcctgaaacacacttccctcaggtatcatcatggctcctggttcacttattcatttctttcaggtcttagctcccttgtcaccatcttaggtgaccatcctatccaaaactgccacccacccctaatcccagcattccctattctcctgccctgctacattattctccataacaattattatcttctgacaaactatgcatttgacatttttgtttattgtttgtttcccctccatagattttttaaaaaattttttattttaaaagaattatgcaaaaatagagatgggggtctcactaggttgcctaggctggtcttgaactcctgggctcaactgatcctcccacctcagcctcccaaagtgccgagccaactccgcagtagatttaaggtctcctgtgaaaagattttggtgactttattctctgctatattcccagcacctagaacagtgtttcacaaaaaggtgcccaataaatattagttaaatgactgaataataacaccagtaaccaattaacaggcacaaactgtgtagttagacaactcacattcatgatatcacttcgttttcataacaaccccaggaaggtggattattgtccgtattttacagatgaggaaactgaagagttgagtgaatttcctagatacacacctctggtaagtgccaaaacgccaaatccagcttccacagggtcacagtacagctgttcttgcccctctcaaagtgccttccccaaaagatgattattctttttttgagacggagttttgctcttgtcgcccaggctggagtgctgtggcgcgatctcacctcactgcaacctccgcctccccagttcaagagattctcctgcctcagccccctgagtagctgggattataggcatgctccaccatgcctagtttttgttttttttttttggtatttttagtagagatggggtttcactatgttggccaggctggtctcaaactcctgacttcaggtgatccgcctgccttggcctcccaaagtgctgggattacaggtgtgagccactgcacctggccaaaagatgattattctatgggtattccagactcttaatgcaaacacgtacatggacccaaataatgagatttccattttaggagttatccaaaggcaggcaaggctttgtaggtttattttgctttagtggctgtgcatctttggaggtacagccacaaaggacgaacttggtcctgttcagacttcagagataacagaactgacatatgcatcagtgggaaagaacaatgtgacaggagtaggagattaattttttttttctggagtgaaaattgtgtacagcagaggcaatttatcgtgtcgtatcatcactgaaattatctccctgctgtctgccagcccagctttgcttcagtggtttccttagtgttatttaagcaaataaattatgtttgcttctagctttacttgtttacatattttgtgcactgctttagtaagagagtgcattttaataacttttatgtatctaatagtcatagatatttgtaacaatattttcgcagtcatatagtaaaaacaaacattgcattcttgacagggtcagattgaccatcatttgctagcataatcctttatctttgatgtcaacagcactaaattagatacagtttaagcaaaaacacttgagcataaagacttggtaggtttttcacacagctggacttcagttgtggaaggttaaggagagtatagttgaagaggatgtttttaaaggggtcataataaggcctgttttaatgctgcttgaaggacgtaagattttgaaatgggagtccccataaatggactggagaatctacacaacatttggaactggtctctttcctctgaaaatataaccttggaagttggtattagctcaattttacggaggcatcttggggaaattgcaataaccttgccccttgccttctatttctcatccatttctagttaaaaaatgtttacaggcagccccactgaccacttttaagagactgtaaagaaaaagtaatgagtgatgattgaacataggtattagcatgtttcttttctcaatatctttgaaattccagctatcttgtgcaggagcccaggcattaggatttttttattttattatttttggagggtgggggtatgcagagtctcactccttctctcaggctggagtgcagtggtgcgatcttggctcactgcagcctccacctctggggttcaagtgattctcctgcctcagcccccgagtagctgggattacaggtgcctgccaccacgcaggctaacttttctatttttagtagagacggggtttcaccatgttggcctggctggtctcgaactcctgacctcaagttatccacccaccttggcctcccaaagtgctgggattacaggtgtgagtcattgcacctggcctatttatttattattatttttcagacaaggtctggttctatcaccca

SEQ ID NO: 95598 - DNA, 35706 bp, Homo sapiens
  misc_feature (1)...(35706): n = A,T,C or G
tgggtgcaaaagtaattgcagttttggccatcaaaagtgatggccatataatatcataaaacttggcaaaataagtcattatctcttttttgatgtgaccacaaaattaagttttaagtatattttatatgctttccctaattaaaacccatctagctttgaattgagtaaagtatactttaaataggtttttaaataagagtatacttgggccgggcgcggtggctcacgcctgtaatcccagcactttgggaggccaaggcaggcagatcacgaggtcaggagtttgagaccagcctggctaacatagtgaaaccctgtctgtactaaaaatacaaaaaattagccaggtgtggtggtaggcacctgtaatcctagctacttgggaggctgaggcaggagaatcgcttgaacccgggaggcagaggttgcagtgagctgagattgcgccattgctctccagctcctccagcccgggtgacagtgcgagactctgtctcaaaaaaaaaaaatgaataaaataaataagagtataccttttgtgggaaaaataagtatttctgttttatgatgtttatagtagttacattaaaaatgactaatcctaccttttgtatggtaggtcctttttatttagtgtatttattatttatttcgtgtattatttattatgtatttattatttcactgtggtcaggacttttattctcaattatttgaagttttcagaaattctatataaattttagtgttttcatactcttaaaatcttgattaaaaaattttttttaaaagcagtttttaaaaagaaaggctttgaggctcactctcacatacagggctgatatttagccaggagatgagaggactctgttcaaataataaaatccttccatgctgcttggtaaatagccacgggtcccagccactctagcccttccctgtaacttgctgcaaaatgtctgatctgccagtataaaggccagtctctggtacagaaggaggtctctgggaccctgtggcaggaccatacccatctgattggctgggactggtgccttatttgggtgatgctggctgtcacccctgctgacatcctttaatttaatcttgggtattgacttgtgttcttattctctttctccttcctttttcctttcctctgaaccccttccctcctttctttcttctctccctccctttctcctcctctgtctccttctcgcctttctttcttttcaattttttcttttttggcagggatcttgctgcctttgacaaatcccatgatcaagctgtccgaacctaccaagagcacaaagcaagcatgcatcccgtgastgcaatgctggtggggaaagacttaaaagtggattaaagacctgcgtattgatgattttagagatttctcttttttaaatggaattcgtaaagaaatataaaacttcagctcacaattaaaactgtctttttagttttggctttttattgttttgttggtgattttactgaaataaagttgagctacttcttcttatagtggcatattctttgtaaattttaacaaggtttaatcttttgatttacaaattaaaaaattttgaattagctttatattaattttctctcagtatgatcacaaaatatgtcaaggtagtattttacctgatatatgatttaaattcattaatttgaatctgctgcagattcaaaaattcaacatggttaggattttgctttgctttttaaataaccttaaacataagtccgggcgcagtggttcatgcctgtaatcccagcactttgggaggccaaggcgggtgaatcacctgaggtcaggagtttgagaccagcctggccaacatggtgaaaccccgtctctactaaaaatacaaaaattagctgggcgtggaggcacgactgtaattccagctactcaggaggctgagggaggataagcactttaatctgggaggcaggggttgtagtgagccgagatggcgccattgcactccagcctgggcaatggagactctgcctcgaaaaataaaaaattaaaaaaaaaccttaaacatgaatgcttagttgtatttgcacaccacctacctggtggacagcagatgaactccttaccagaatgtgtcaaccctagcaggagctctcaactccctcctcctggacccctccggctcatccagtgggcttgtcctggtctcctgtccatcaggggtcagatggccaccccaagcaccagtctttcccatccctctcacagtctgttcaaagacaacaaaataacttgaaccaaataaaagacaaacataacaaagcacccctgccaatgcaacgtagtgccccagggcatctcagcacacatagctgtactaggtagaattattagtgtattagctctattagttagaattaattagaaccatagctgtgttagaattctttgattgcaagtaacagcaatccaagtgaccagaagtcaaaaagggaaaaggaagattattttaaggatgctaggtatggggagattatcagaacctgggacggacagaaggggtctgatgcccaggactgcagcaccgtcagtgctcctgtccctcacctctgcctctctagtccacgttgtacaggccggccactctccagctttactgttacaaatagctctgaccacatggggaggctatcacaattccaaattcccagaggtgagactctaacccaggttgggtccacctctggtcaaataaattgtgtaagaggaatggtgtcttagagtataattgttggcatggggtgggggtggggagcggtgtcctgaccaaataacccctcaaagtgctaatgcagtgactaaagttacaataggagtgaacacccaaggtgggacaggtatggaagagacatattcctgcctattcccggaatcctgacttttccctggctctcactctccctagcagtttttgttttgttttgttttgagacagggtctcactctgtcgcccaggctggagtgcagtggcatgaccatagctcactgcagcatcagcctctgggttcaagccatcctcccacctcagcctctggagtagctgagactacaggcatgcaccaccatgtctggctaatttttgttttgtagagaaagagtttggccatgttgcccaggctggtctcgaactcctgggctcaagcaatccacccgcctcgttctgtcctcttggtcacttatctatgctgcagtgtgattctttctccaggctctgctctcccttgccttccttgccaagaatacagagaagggagttcagctcaaatcactggcataagatcatgttctaagattagactttagcaaatccatttacccaaatactgctctttaaggcttctgccctatgagcttacaagacaagctgtaagttaatgtcgtttttagttatcacttagtgatactgaaagtgaattgtgacaagggatgcttgaagggtggcatggaagggtgctgtgaagaaggtagagggcgctaaagacaaacttaatcctgcttgctggtttacctaggggccagctcggtgcagttcacatttcttcagttcagctagtaagcatatgctaaatgtctttgtgccagatcggatatatacataattatggatgaacacagacaagtaatttcctagataatactaaagaagagctatgctaaggcatcccagagaagggccacttaacccaactgaagaatttagggaatgcttcctggagaagaaaaggcctaaacaggcttaaggagtaagaaagatctagacaggcaaaggaagttggaaagtgcgtttctggagaaagaataacaaggaagactctgctccacaatgcgtagggcctgagtttagaatcctcaaactgctgggggtgacttacatggctgggaggtggtatcacctggaagctccttccctcactagtctgatgcctgggctgaaattactcagaagctggtctcggcagtgacagtcaactggagcatgcagtagtttgggttgttttgcagcatgaagatagttagacctcttattagtcatctttatacagctttatccatcaccagacagtaagcctcatgaatgtagagcgtgtttgttatttatttcatccccagcacctcgcatagagcttgttacataacaggtgttgaaaaaatatttgttaaatgagtcaaggaatgaatgggggggggtggggcagaaggttaaggtggttcacatgtgcagtcctcagttttctcacagatgtaggaagtaaggtctccttctgagaattagaggtggatgtcgagaaggtcctggcagaggggtcaaagttttggaaagtcactgtgggctggatggaataaaagggcaataccatcaaactatgtgatcacaggactttctctatcagtgtcttctgcctgggtgaacagatatgacagtttcttttaattttaaacagggtcttgctctcacccaggctggagtacagtggtataatcataactcattgcagcattgactgcctaggcttaagcaatccttccaagagatggctgttttttgtgatgactaaggggatgggtgttattccaagtgtagacataagtttagggatgcaaaggaatctcagagtgcttaagaaagagtggtccagtgagcgactagggaccagcttcctaggatagtaagtgaggatgctggtgggaagtggagggatgaagagactgactggaggtcaggtccaaggctggcagtgactagagtaaaagggcagctggaaggttgtggtcagaaggtggaatattggaatttcagatttcttaagtgtgtcaaattcaggtcgtgacagattccagggtgatttcttaagtgtgtcaaattcaggtcatgacaaattccagggtgcagtcatggtgtgggtatctgaagagcaagtttcaataaggctcaaggaagggtagctatttgtacgcttcctgggaagctgtcagcagatgagagggactctgggtatgagtataggtgtttttcttgagcaaccatgtctctcttcccaacagaagtctgatttagtggaaacagacttttcaggatttttctagtgcaataatcaaatctctaaaaattggcttacgatgaaagtgctgcttagtcaaaatagcatctgcatatctttgatgccgtaatcatgctatccagagttccttaataccaatggtaataaggcgggtgcagggagcagttatctgtggtgaagaagcttaattgggtgagggatatccatgtgccaagatgaaagagcatttatggaactttatagctttatgattcatacagaacatttataaagcattatagttacatggagtattggtgtccagatactagtaatcacagacacttctataatatttccactatgccaggtgttgtgttgagggctttacatatatgaactgacttcatcctcccaatagccctttgacatatatactatcatcattaccattatcttcattttacagatgaggcaactgaggcccagagaagtcaaatcacttgcccacaagtcatacacttagcaaatggcagagccaggatttgatcacaggtaaatcctgcacatactggaaggaggcagttagcccctaggccttctgataaggaaatacagggtaatactcacctaatcaaggctaataagtagtagagctggactctcatccacggctgtctgagcccctaatctccaagtcagagtggttcatttgcccagatgacgacctttagttgtgaaaatgatctctggcctttgcagtcttccctggtggaaagaaagcttcagaaaaccttactggtgacaggaagtagttgctcaatacatgtttgtggaataaacaaatgagtgacgattgccacactcccagtgtcacagttggcccrcagaacacgttttacagttgagtaatctcagataaagacaggaacatggtgtttataagctgcccttaatggcagagaacacagacagaaacgagggaagagagagaaattggggaccctgaagaaagggggccagcagcaggtaggtgccatcagggacamgaacagcacctcccagggtgggagaccccaggcctttctggcagcaggtctggatggaaagtggacaggaggctcacccgtctgcatcccctgctcctgcccctgctcggctacaaaaaccaaagggacagcaggtacctcaataaatatttgtccaatgcatgaatgagtaaaggtgaaggagggggagtggtttgaaagtctattctcatccttccagctgaccacaccccggtagccactcctgcataaagctctcccctcctgtgaccagctgaggacctcaggctgcagcggagccatgcccagatacacggtgcacgtacgtggggaatggctggcagtgccctgccaggacgcgcagctcactgtgggctggctgggccgggaggccgtgaggcgctatatcaagaataagcccgacaatggtggcttcacctccgtggatgacgcgcacttccttgtgcgccggtgcaagggcctgggcctgctggacaacgaggaccggctcgaggtggccctagagaacaacgagttcgtggaagtgggtgagtggctgcaggagagggcygcgaacgggtgcggtttggcctggcttagtctttgcagcattgaacccccacctcagggaaaatgatgagcagaggtcaggcttgccgaggctggccctgtgcaggcacatgccacgcctctggggatcttaagtcctcacacaaccctgtgagatgggtaggattctcctccacctctgatggaggaraaatcagagaggaggtaacttacccagactccagcagctagtaagtaacaaagactagactggtactcaaggctgcaggtctgaatccctttgcagtgactgaatcattttgaggttattttgcctktcgaaagaatccacccccacccccagactggaggccggcagcatagcatcagttcagattttgaagaaaataaagctgggaatggggatggaagtggaattctgtcttgaactttcatctaaacccctggtctctgccctgacacctacctttctgctttttgctctcctcctacataaagatgctaagaccacatgaaaccatctgaagcagttttaaagcagccatttctatagaattcatgggccaatgatgggccgttccttggtttaacagggggaacatggctgtacaatgtgayctgtaacgagtctcccgtgcattgttttagttatagagggtgatgccatgtctcctgacttcattccatctcaaccagaaggagtttatctgtatcctttcccacaggctctttggtctgctctgggggtggctcctgcagatggtggggctgggggtttttccacaccaccctatatgttcctttacctggatacagatacagcaagtaccgggagcctgaaaaggtaagcttcaaaccactttctttttcttcagaaaattaaggccccttatttaagagggaggaaagccaggaaaacttctgagaaaacactgtcaattagaacagggctggccgggagcagtgactcatgtctgtagtcccagcactttgggtggccgaggtgggcagttcacttgaggtcatcagtttgaaaccagcctggccaacatggtgaaaccccatctctactaaaagtacaaaaattagccaggtatggtggcgtgcacctgtaataccagctactcaggagcctgaggcacgagaattgcttgaacccaggaggcagaggttgcagtgagccatgtttgtaccactgcactccagcctgggctggagactctgcctcaaaacaaacmaaccaaccaaccacagggctttatccagctctgtagtggggaaagggggcttggaaaggcattatgcttttgcaccaataagcctcctyttatgcaagatgcatttttatttagcatattcatgtttcacgcaatgatcagatctctgaaatgtcagtttggttctgttggaggtgtccctactctggttagaataatcaagctgttcagactcactgagatccccttcttttgtgtagtacatcgagttagatggagaccgtctgaccacggaggatctggtcaacttgggaaagggacgctacaaaataaaggtatggggagggaggggaaagatgtcctctggccatttytgttgcccgtggaagtctttaacgtgctcagttctgatcaacattttcctagctcaccccaacwgctgagaagagggtgcagaaatccagggaggtcatagatagcatcataaaagagaaaacaggtatctttttatctttatgttataaatatttttataaacaaacaaaaatccctgcatttaattgcataatgtctctttttatyctagttgtttayggtattactacaggttttgggaaatttgccagaactgtaattcctatcaataagctacagtaagtttaaaacacacatatgttcacgttccacctaccctcatcttttaaatatttttcaacaagggaaataattcacatttgccccaatttacagatcagaggatgaggcttgggttaccttgcatgtgagttggtattgaaaacccaggctggctggtttctcccattgccttccttctgtccctccaaggatttgaccatgattcccttcattttccyagctgagggaacattttctcactgcaatgtatctaagagggtttttacctttctgttgcagggagcttcaggtcaacttagtacgctcacattcttcaggtaagtcaaaacgttgggtgcctcctggatcttgtgtgattagatgaataaagcacagcacagtgtgagttatccagttatagtcacaaaaagctagtttctcaaaacagcatttcaagaactaggtgccgaggtgagaagggatgcagaaagaatyagctgagcctcagaaaaagaaatgggccaggtggagggatggggttggtatgagaacacatgtcccatgccatggagacastgttgcattcagggaaggaaataaagcctggaactcaaagaatgagttaggatgggcatagtgagatgggaaagactgtcaccaatcagcacccatcagatggtaaagaagttgtgctaaggactctggatgctattctaaaggtgagtgggaggtcaggggttcactgaagcttcccaaaaaggggaattgagaaggcaaaactggggtcttaacctttgtcaggaagatggggctcagacaagtcagacaggcaggagggagagtagtccaactacctgagccgagaggagaaggtaatagcaggctgggctacatatgggaaagattggagggagggagggcaattgtcaggagacaraaaggagtttgcttttcttggagaaaacatcaattctgttttgcaggtgttgggaaaccactaagtcctgagaggtgtcggatgctcttggctttaaggatcaatgtcttagccaaaggatacagtggcatttccctggagaccctcaaacaagtcatagaaatgtttaatggtaatgcaatggctccctagacggaacctctgtggaggctggacatgtaccacagggtagaattgattggccagatgctgaggaatcacctgagaagacatgaaataattgaaatgagtgggaaatgccgttggcaaaaagtaggatagttagatgggggaagaggagaaagtcgatcagagatgcttactcctatgaactttaacttattctgcaagaccctttccctagcatttgtcatcttcaagactagaacaggactcttaagtctgcccttacattcaagcctgcctagaagaaacttggattaagtggtacaygaatatggttagaaaaattgcatgatatcaatgtccatcccaaaggccaattcagtagttctggttggtgcctgggaatctgaaatcgtaatgtcccccaggtgatggccagacttgcacactaaaatccaacttcttgcaagggtagaacagaaatgcaaagaggttaatgactcccttgtaatcaagaagccatgtagtggcaggatatgagggaactcaactctggagctttcttcttggataggaaaattctaatgtggaaaccagatttgcagtgattggaggtattgtcccttctcacaggtaaggacaagccttctaggtcagtggagactcagaactctttgaggggaaggagagggaggagaagcagtgctgaggcagtcacaaacagcaaaacacattcttgagtttccatgttatggacgcaagtggcacgtgaataggatctgccaatgagtggagagcaatttcaatgagcagtctattgtatatacagggctgtgctgaacagactagtagtgattccaacacctatttttactcctaccttggtctgccatactatatagccctaaaatcccagatagtagcactccaaccttaaacccacctgtactttatgggggagtctaaggcacctctgagaattccccagcgtgaactatcagccagaagytggtctgtggatggcactgccatacccgactgacattatttaacagttggaaaaaatgctgctgtcaggaatctgattttatttcagaaaaatgaarcctcttttttggtaactttttgggaatttcttagaaaatggcacgtgttcattgataaggggcagtggagtgtagactgggtgactggcaaaatgaaaagactcagttgcctatgacttctcttcccctgggaaaccttgttaatgctttggtgcaccacctccttctggaacattttatattacttttccaatgtttccaaacattttccaatagctgtgaatggctaaacttggtcaaatgaatgtcctttaatttcatatttagataatttctaactatttttcctataataaacaatgaactgtaaaacaaaaacaaaaacaaaaaaaacagctagttcctgatcacttcttcaagatatattgctaaaatttctacaagtggaagtactaggttgaattagagcacacagattttgagggctttgcatccagaagtgtcctccttccttcttcttatttatttaggagacaggatcctgctttgtcacccaggctggagtgcagtggcacaatctcggctcactgcaacctccacctcacgggttcaagtgattctcccatctcagccttcccagtagttgggactacaggcatgcaccaccatacttggctaatttttgtatgttttgcagagacagggtttcaccgtgttgcccaggctggtcttgaactcctgggctcaagtgatatgcccgcctcggcctcccaaagtgctgggattacaggcttgagccactgcgcctggcccttctttccttcttgctgactttccctccagccctcctttcctccctgtctcctctttaccttyctctcttcttcctctccacccccactcctctttttctttctataacaattcatccaggtcccttacatattagctgggtttgaagaattgtctttccccaggtatctatgccataaagtgatagatattggaggcagggtgtttgcgggggcagtgggggcactcactggcaaagcaaggagagtcagaatgcagtrctcttgaactaattgctgcctacttctctcccagcctcctgcctgccctatgtcccagagaaaggaaccgttggtgccagtggagaccttgccccrctctctcatcttgctcttgggctagttggagaagggaagatgtggtctccgaagagtggctgggctgatgctaaatacgtaagactygtagcagcttctatctgcagcarttgccccaggttggacrccaactgtgcttgcatgcttcrtatcacctagtccttacaacagcccagtgagggagcycctactatccttactttacagatgagacagcraaagcttagaagtcagactaggcaagactgttgttagcttctatactcggctgtcagccttctgggtttggtcatcaccttggtgaaaaggcataactgctactgttaatcccaactatttatcctgcacctacaacatttccagtgcctagcagggaggtcacacactctcacaattttaattacgagctggtctcacaggtgcagtggtatggctcatagcacttactatatggcttctggaaagcaggtttcatttttccctaagctcttaccctagtggctaatcaaaaaagcctgtttttgataaagctttggtgttttcttcatctgtgtctgaatttcattacagcagcataaagcatcatttaatgtatcatccctgatgaactgctgggagcttccctgatagtaagtgaaaggggtagagggccccagaagaggaaacagctaaggaaatagataatccttttggggatgcagcttctagatcatctgtcttccgtgcaggcttgtctttgattatttcactatggacagcgttttcctccgaccaccctcatacagcaatcaccctgacctttctaaacagcaaattcaagcatgttctggtgaaaacttgtaatgcttcccattgtcctcaggataaaggctaaacttaaagtggctttcaagggtcttgtttgtcacattagcccctaatcccttctatgtgtggttctgcattgcagaaactggaggttgcttggagaaggaatgttctgggcagagggtctggtacaaatacgttcttctctctcctatttctgcttctgaaacatcttctagggatcttttgaagccagaagttcaagaccagcctgggcaagaaagcgaggctccgcctctacataaaataattaaaaaattatcctggcacagtagcatgtgcctgtagtcccagctactcaggaggctgaggatcacttgagcccaggagttcaaggctgcagtgagctaggattgcaccactgtgctcgctctagcctgggttacagagacaggtgtctaaaaaataaaaagaaaaatagaaaagccctctaagaagcttccgtctccgctgctccacttcctacctctcgagttccttgtgaccctcctgtatgctctcctagcaaatgattgttttccactgcaccccacccacttcccacatcctcaagcactgaatgtastattactcagattgccctgagcttgcctgtcttcattttgcctactcctagaccgaccccaacacccagaacagaatccagcctctagctgatacttgaatctgtgaaattgacrtagtaaatgggaccagctctgtccttctcttaccttaacttccccttccttctttcctagagagaccttaacttaatgactctctacttcttttctttcaasggaagattgttctgcccatcgccccctcgggattctgtctccatctagtagagggaattttataatcccctcttcattggtgctcacacatgtgccacaaaaaccctgctctgaggttttgccagtatttaaatgaagcactaatgaggttagaggactttttaggtcaagctctggaggcaagggagcgtgaactgggaggagtccagcctgagcacaacacagatgcatgtatgtgtgtcagatgcctgcatgtcaggaggcagtggtaaaaaaggtgaactgctaaggtrgaaactgaacacgaaggacgtagaaaccaaaatttagggttgattctatagamaatggagcccctgatttcagtacaaaaattaattgaaagataagtctgctttcatgactaaagaacagaactagagaatagaccagagaacatgaatacagccagttcctgtaggtctcatttcttataagatggacttttgggcataaagagctattattggattccatatgatattggaaataggctagtatttcatttgatacccattttcatatttttaatcattctataggtgctagaagcccatggattgaaaccagttattttaaaaccaaaagaggtaaggaaactcaagaaaaatatgttcatagtgcatgagtttttatttatgcagtattttcagttttaatctcagcctcaatcattccttaaatgcaacttgcatgtttgcttaaagttcatccctgaagaaggggcaactccgtaagaatttaaaagattctttatgccaggcatggtggckgatgcctgtaatcctagcactttgggaagccgagacaggtggattgcctgagctcaggagtttgagaccagcctgggcaacatggtgaaacccatctctacccgcccccccsgccccgccaawaaagacaaaaattagccaggcatggtggcgcacacttgtaatcccagctaccctggaggctaaggtgggaggatcacttgagccctggaggtcaaggctgcagggagccatgatcgcaccactgcacaccagcctgagcaacacagtaagaccctgtctcaaaaaagaaaaaragattcttcatgccacaatgcatagggggtctcttaggaacttaaaacttcaaatcgagttctgttaggatctctgagagatagatgttctcagcccaaattccttagaatgctctaagctaagagtcttggaccagaattgggtttttttggatgtctcatctataacagtaagaatttaaggaagaaatgcaacctaatgcactaaagattttatgtgcagtctacactccagagctgcattgctgctttgggaatgkggatacttaatgagtgtttcatttgccagatttgtgcttacgagttcacatatgatagcacttattcttcaagggcttaaataaacattactgtcccgcactttagaaaacataaacataattttttatgtttatgactggctaatttttctcttatgaaagcaaaagatacaaaatccacgggtatgtaggttcgttacaataatcacagtaggaaactttgctctctcccccgacagggcctggcactcatcaaygggacgcagatgatcacatccctgggctgtgaagctgtagagygagccagtgctattgcacggcaggctgacattgtggcagccctgacccttgaggtgctgaagggcaccaccaaagcctttgacactggtcagcagggttcttccttttggttgttattcattcaaccagaggtggtggggcggggtggctgagatctttagacacagaagtggtgggggcaggtagtagggaaggagaaaacccaagtgcctgtggcgtacccagtgtgctgcctcttcatctaggctatggcacaactgatctttgaaagaactgcaatttacagatacacacagcccggaagttgagtgacttgcctgagagcacccagggatctgggtgtgtcaagctctgtgctgtcttaggaatctttttacaggacttaggagtcctgtaaaaaggagtaggattagagttggtcccgactagaaaattggggaagaaaaactgtcgaattggtagcttatttagaaagtagtgaattttgacgacctcccaactataatatgaaaaagggcagaacattgtctaaaagtgaatgagttaaattaggccactgtagggctccctcctgttattcgccctgttcctttaaggtaggcccagtgtcttgagtggaattcccagtggtctcaacatatagtttgctctcagatatttaaagtagaaggagtcaagtcaataaggaaaatcgtgctttcggagttaagtttctaattctgagtggtggctaaggacccctgggacttttgagggctgtgtcagcaccgtagatggtcctgaaccattgatggtcatttrttctaatatcagaattactcgacctggcatggtggctcatgcctgtaatcccagcactttgggaggccaaggtaggaggatcgcyagagcccaggagtttgaaaccagcctggggaacgtagtgagacccccatctttaaaaaaaataaataaatggaattattcagactttttctccttcatcaattctagacattcatgctcttcgacctcaccgtgggcaaattgaagttgcttttcggtttcggtcactcttggactcagatcaccacccatcagaaatagcaggtctgaccatgtttatgggagtgacctatttggttaygtgttttgtgaaaagaattggtaacatgatccctgtctcatcccctccacctcttccacagagagtcacaggttctgtgatcgcgtccaggatgcatacaccttgcgctgctgtccacaggtaaaataaagaaaaaaaaaaaggtcaataaaaaatgccaataaagtttttctttccccaggttcaggatgaaaaattttaaaataggaaagtgttagaaaaacatgtaatggtcaactatagtccaaatttcttactgtctctatgaaaagttatgtatattttacctttatgtgtgcaattgttgtaaagtttctattctatatggtgaactatttgttttcttttgattgttcaacctactttcagaggacaacctctttttttttttttttttttttttgagacagacaaccaacaaataacctctttgatttggagacagagtctcactctgtcaccctggctggagtacagtggcatgatctctgttcactacaatcttcacctcccaggttcaagtgattctcctgcctcaacctcccgagtagatgggattacaggcatgtgccaccatgcctaatttttgtatttttagtagagatggggtctcaccatgttggccaagctggtctcgaacccctgacctcaaatgatccacctgcctcagcctcccaaagtgctgggattacaggcgtgaggaccgtccccggcccagacaacctcttatgttgattcagtgccctaacttttaaaaattcttagtaataaaatcataaccagttagtagagttgtactgtttctccctgttaagatgaaactttaaccagatagtcagaggtgtttacaggaaagtcttaattatatcattttgaaactcaggtgcatagtaatggttataccttacttgcattttatgggcaatataaattattttaaatgaatttgtgatgcttaactttaaattaaaaatgcagatgacctgggttggcattagrcatctgtattacagatgtgtaatttacatatgacarttagagagccagtcatctcaataaaccatattttggtctgtgccaaatttcagtctatggtgtaatagagagtcctccctagaataaataccctcatttccctttagtcagcaagttatcttttctagctagcttattgagcaatagatcaaaacacctatgggtaagaattgccaaattagatctacaggaagattaagtcctgatgtaagacttccctgatattttaataacgatagcagattctatgtgacaggcaccattatcactgtctttcatttattaattcatttaatcttcccaactataagatactctttctcccattttgcaatggggaaactgaggcacagaattaagtatcttgcccacgatcacacagacagataattacttccttgacttctgggagaaaccagagccaggtgctgctttatagcattgtggctatttctggggtttgtacagcgtagctgccttatgtgtgagcatcttctaatgtgatgccttcrtgcttaatgaactttaccgccttggataatagctaccatttgagtaatctctgcgagtcacatctaagaatttgtttgcattattttatgtacttctcaaaagccataagtgctattgtctcttttctaagtcttcctatcttttaactataaacctaaggaacttgcccaagtcctaccactaacctgggagtgaatctgcctgtgtctagagttggcattcttcctcccacaccatgctgctttgtatagattgatctaatgtgaatatatatgataatgaatttattctaatttgtttcagtgaaaacccaaaagaattataacaaaattatcttcagttcaaataatttccatggttataactttaaaataagatcttctgtattctttataactttaagataagatcttctatattcttttaagaatattggtactcttcaggtaatcaaatgggtcatataccttattttgattgtattttaggtccatggtgtggtgaatgatacaatagcatttgtgaagaacatcattaccacagaactgaacagcgcaacagataatcctgtatcttttgattgtatactaacctgcaattatagaattgcagctggtaattttaggatctactgaaacaatcattttgtgtagcttctcagttccattgctccatttcacagagtaaatgaatcagtacctgaggctcagaggttaactgactttctccaggtcagagctggtaagtggcagaggtgacctgtgaacttactctcaggttccaagtctaacatgctgtactttcaaaatggacctattcaagatttaagaagatatttccagcattggctgacatgtttcctgaagacactggccctaaaacccactgccaaggttgttggtggaagggtgaagacgtgggtcacaaatgtgattgcagaaatgctgaacaatttatgcaggcctctctgctttgagtgagagcagtttgcattatgcagaggtcagccttttaacacttaccaaagtattgattaaagagttatggcttcctcatcctgaggtttttggcatttttttttttgtttatttttagacggagtctcactctgtctcctaggctggagtgcagtggtgccatctcggctctctgcaacctctgcctcacgggttcaagcgattctcctgcctcagcctcctgagtagctggaattacaggcatgtgccagcaggcctggctaatatttgtatttttagtagagacagggttttgctgtgttggccaggctggtctcaaactcctgacctcaagtgatccacctgcctcggcctcccaaagtgccgggattacaggtgtgagcgactacacccagcccccatcatgagtttttatttgtcatgcgcactttgctcaaattagtgcttttgcgtttgttcaaagaaatagtaaaactgattccatttctcaaggatggaggtcctctcttaatggtgtggcttatctcagagccatctggtttttctctggaatgttccatgatggctcagttccccagatgttgaggtgatcagtcaggagtcacactggcacagttttcatggagatagcactgcctctgaagataatcaaacgcctttggaatctatttttcctattccacatctgcctcagttctgaatcctagagaaagtgctgagtaagcagccccaaaagcaggtcacaggctgagttagaagatggttatgtgatagctccataaggtttcccatgagatggcttttgtatgtatgtgttttttgacaagcttacttcagaatgtgtgttttatgttctctcacattgttttacactgaagtcaaacccacactaaataagcctcagaaattgtgggtctctccattcacctcaataccaccccatcccccagatggaatagtagtttttatgaactctatgtagtcttatctcacgtaccagtcttttcactgtagggaagaggtatctattctacatttacatcattgcttttaaagggtatctcatagtttttagaaattaccattcaattactgaatatggggcaggggataattaattcctcactaaattcttctgctaccaattgcctcagcaagaatttcagccaaaagtcttttatttttttcaattaaagattgctaattattgataaatttccaataggctaatatttgggagttctcttgcaatactgctgttacctgaaagaatatgtgtctcaattttctgttgcagatacggagccccatcacacatgctggatattatgggagttaaattctaattgttttaatctaatagccaacaaacaaatttggaacaactagaggacaataaaaacatgtctaagttctaaattgatgcagaattccattgctatagggattcagagaatggagaagaggccaagaccaaggagctagacccaatgggctcacagttacacatgcagaacagagtaatccacacttgagtaggttaatgtaacacatacatctctaactctttcaaagttagaaactttcttgcacacagcaagttctcagttaataggtaatgaatattcttgagcccaagaggcaaagattagctctttagaaccaggaagaaggatctgttactgccttttcctgggtgcttgctggtttaagtaaagtgcatgatggaatagaattatctgaggccgggtttggtggctcacacctgtaatcccagcactttgggaggccaaggtgggctgatcacttgaggccaagagtccaagaccagcctggccaacatggcaaaaccctgtctctactaaaaatacaaaatttaactgggtgtgatggtgcatgcctgtaatcccagctactcaggaggctgaggcacaagaaatcacttgaacccgggaggcagaggtcgcagtgagccgagatggcgcccctgcactccagcctgggtgacagaatgatacagaaaataaaaaaagaattacctcagagtaataatattcagcaaatttaaacttgccacctacttaaaatggattcatgaggacatattggccaccatctgctgttgaacgctgacaccagattactgagtaaagaatttgaaaattttctcaaaattgattgttccagacattttggtagttgctcatcagcagagtttcccattcaacagattcttctatggaacacaaatttgcagtgcccattgaagaaacagaagttgctttcaaacagatgtgttggtctctgttttagtttcaggctataaaccttttgagggcaggtactaaccaccaggttagtacagttatggtgctttagaatctaatctcaagagaaaacatcatttcaaggttcatgttttttcagcctccaaattgggtgtacatgatccacctttaaggctttttgttttttgcttttgtgcccctttatatctcttgcaggaagacttgtctctttccctccaccycacatttgtacacagactgccacctccacgttaaaaaagaaggcaggaaggggttgtacttgaagtraccagcaaacrttatcttcaagccttaacctcttttgaaagatggtctttgccaataggggagagacartttctggaggaaacttccatggtgaatacccagccaaagtaagctttttaraactgctcytgacccagaaggcacatttcaatataggctgactaaatggagaccctctttcaggccctagactacttggccattggcatccatgaacttgctgcaatcagtgagagaagaatcgagcggctctgcaatccctccctcagtgagctgcctgccttcctggtggctgaaggtggtctgaactctgggttcatgatagctcactgcacggcagcagcccttggtaaggacactgcccctttcccagaacacacgcccgtccatctaagggtctttccatttcacctagaagtatcawatgtggtctgtgagtgagatctaacttttcaccacttttatctgcatcctagttctctcagtgcaaaggtaacaggttaactctaatatttttcagaaaaaaatagtttaaaaacttcgatactgttatgctgaaatataataatacaataataaggctgtaatggacaatttctctgtggaaagcaatttgacattgcatrtgaacttcatctctatagcttttttccaaatctatttgaagactattggaaaaagactaagatggttatagttaatggtgaaacttgaaccaacctataattaaactttgaacttttaaacctataattaaactttggattcatttcactagatataacaaccactaaaaacataaagatgttattgcaacattaaaaaaatgcttataagaatcaggataccctctgtgaagattgagcttcaatatagtttatttctgactcaagattgtaagagacagattaacacatcagaacagtgcctggcactaagtaagtactaagggcctcatttatgttcattcacttaattgcacaattgtcacctgaggtaagtgctattattgttatctatagatgaatatctgaagatctgagagttaagtgacttgcccaatattgcacagctagcaagatgtaaagcagaattcaaaccctgaattttggcatgcaaaaatgtgcttttacttcaattaatgaggatctcattttaatcaatacttaatcctaaaatagggttgtcaaatttaacaaaaacacaggatgactagttaaatttgaattatttgggacatacttgtactacaaaaattatttttttaatctgaaatcaaaatttaactgggcatcctttactttatctaacaaccctaccctaaaaggcaggatagcatgagttattacatgcgtagatgctagatcagaagcccagctctgccatttactagctctgtgagcctctttatcctgttgatcctcaatttacacctgcataaaatggagataagtttacctaagggggttgtttggaggattaaatgaattgatgtatataaagcctggcacatcataagcactaaaaaaatactagttgctattaatattattcccaaccaacacaaataaccaactaagagccactgaattcacctcctctgaccggtatcttctatttgcttacttgcttattaataaaatacccctttaacaggtagaaatttctcacaataacgtagtagtgggggagtagtcattgatttctagagaacaggatggacattgggaagcctcatttgaatatgttttagtttcccaagctgcctattgaggttgtttggcttgctttcattgtagtaaaattagtgtttttctttttttggcccttgtaagttatctttccgaacaagccttaccacagtttacttatctgtatagtccacagtttagggtccaaggacttgggacttacagtgctgaaacctggaaagtccttggccaaccaacatgaccttgacaaagtagcatgaccctagtttaaagcgagatcatcttaggatgcgatcccatgcagcatagaaaacaactgaagcctcacccatgaccactcttaaagccagagaaagaggagaagagactttgagtctgacctttcctgacttctaagctagggtgagggaacttcataacctaagtttttgctacttatagtgtagtcctcagaccaacaatatggccatcacctgagagctcgttagaacagcagaatttcacgccccacccaaagctcagtatatttgttataacaaggtccctgagtgattcatgtgcactggaaagcttgagagtcccatgtcttggtcctccctagaattcccccacctcccagatatttctggcagtcatcgagcccctgtttacatccatttatgtcatccttgaacactctgaagtgttaaatcttcttgcccaagatttatgggtccagcctcagtccccaaatgccacatcggaattctggtgacacaaccaaattgacgtcaagtacctgaaaatggccatcatgtctctttctcccctagtctccctggcatgctatatgcttcccaggttgtcatcttggccttgttatattagaattcccagttctcccatctccgtcttacctcagaactcactattgctttagagtcctcacttggggaaaaaaaaatgacctgcttccttttcccaaagcagctttctaccatcaggtgcttggataatgtccaagatcttctggagagtgtatcccatgctgtggagcactctgtggaagccacgggtcctttagacagctcatcctrtgaggagcacttcttaactggcactggtctcttgcrgtttctgagaacaaggctctgtgccatccctcgtctgttgactccctctccaccagcgcagccacggaggaccacgtctccatgggaggatgggcagcaaggaaagccctcagggtcatcgagcatgtggagcaaggtaatgctgatgagttcggggtggcgggcctgcctgatagaccactgtgccygtggttctcaagtgggatctcccaccagcarcatcagcatcacctggaaacttgttaggaaggcagactctcaggcctccttgcaggctggctaattcagamactccaggaggagagcggagyaatctgtgtttaacgaaccctccaggtgattctgatcttcactaaagattaagaaccarggaaccatgcagaactaagctggtcctttggctggctttttttttctcttttttttttttttttttttgaggcaggatctctatctgccacccaggctggagtgcagtgttgcaacaatagctcactgcagccttgaactcccaggctcaagtgatcctccttccttagtctcctaagtaactgacacctcaggcaagcaccaccacacctgggtaatttttaaattttttgtaaagatggggtcttgctgtgttgccttggctggtctcaaactcttggcctcaagcgatcctcccacctcacccccaaagtggtttttttttttaatgagacttttaaaacatattcaaagtggagagaagagtaccatgaactctcacaccccaccttgattcaacagcacattcaatttatgaagtacactatgaactctagtgagtgcagacaggtcacagtgggagaggatgaagttgtggaattcackgtggacctggaagcaatttctcatcttctagtccagtatccccaccccgcaattcatatggaattggaaaccacgagatgtaaagcatcttgatgaaatgcatacaattatttaatagaactggggctcaagatgaggatcagctcttctttctgacttccttccctacccacatgacccaaacttggccaacaaacctttgttagaggatgtgaatgggggacatggcagattttgctagtgcagatgaatgggcagcttcctgggtaggtgtgcaggtctggtaattattcaggtaaatgtctcaattctccccttctcagcattaaagatayagtcaaggggttagaaaacaggttaaaatggcaactaaataccaaagcaacttcattctaccaatagacagagaacaaaccatctgttagttgggtggtgatgggtgtcaactttgggaaatccacattccttaagcatgaagtcagactttcataagctaccctcttggaatttcttgtttcagtgctggccatcgagctccttgcagcctgccagggcatagagtttctacgtcccctgaaaacaaccactccgctggagaaggtctatgacctggtgcgctctgttgtaaggtaagatcaaacaggtctctgaaaattacatcagttcagcactgtgaaccctggcagggtttcatgtttggctgatgggcggatgtgctctccctgtaggccctggataaaagatcgcttcatggccccggacatcgaggcagcccacaggctgctcctggagcagaaggcaagctggctccttggcttgtttcttaatttttaattgttacaggaaagcaaagtcggggatggagaaacattgccttattctattgttttctggccattccttgggaatgagcaaaaaggtatttgagcaacaacttgcagcaccactaagaagccatataataaacactaagtgcaccagggtgcagccaacggttgaatatctaaggattagaaacagaaatggattttaaatggagttttgggacaatattcatggggaaaaaaataagatgtcaggttcattgatgcctccccacccctgcaagatgtcctctttgattcaaaagtgcgttcccttctgggtgatgctatcacaactaccaccactgggtgcaatggctgcgtagacctggagagaaaaccaaggcccgggtgtttacttcagaagactttcggtctgtctagtgctctggtgagatgcgggtttttctttcttgcatatttccactggttacattgaccgtatactcagctgccaggtacagatgcccagcatgctggcttatcttttaaatatcgtttttgaagtgctttaaaccttttgaataacttgtgggtgttatgttccctagaatcgcttgatttccttaaaacagttgctctgctctggggcagtgatttttccctgtgattttcacacccattatttctaagcatgccctgcactctggatggggaagctgcttgcctgctgccaactttggtgctaggagggaggtatamgagaggttagcctttaagagtattcatttgctaaggtcataaaaaataataggaaagsctccttggctgtcagtggcaatcagttaaaaagcagatataaaccaaaaacagggccttaatttcattcaatttaaaaaaaaatttttttagagatgcgggtcttgctatgttgccaaggctggactcaaactcctgggctcaagtgatcctcccactttggcttcttgagtagctgggactacaggcacatgccaccatgcccgtccagggccttactttgagatgatgttatgcttaagaaaaaaaaaaaaaaagaaaaaagaggttggtgggtgggaggcaaaagctaaccaaggatctgaggcagtgcctctccaacattaaagtggctatgaatctgctgggcatcttgttaaaatgcaggtgtggattcagtaggtctgggtgaaggccaagattctgacttgtcccaggtgatgctgatactgcaggggcayaggccacgctttgagtagcagggtcaaaggaacagagcacctgtggcatggaaataaggcaatagggaaatacaattcactgccttttaccatttaaggcttgctttagaaaacacacaggtccaggccatgtgtggtggctcacgcctgtaatcccagcactttgggaagctgtggtgggtggatcacttgaggccagaaattcgagaccagcctggccaacatggygaaaccccatctctgctaaaaatacaaaaattagctgggcctggtggcatgcacctgtaatcccagctactcaggaggctgaggcacaagaattgcttgaacctggaaggtggaggttgcagtgagctgagatcatgctactgcactccagcctgggcgacagagtgagactctgtctcacaaaaaaagaaaaaaaacaaaaaaacaagaaaaaaaccacataggtactgttaagaccctggagcaactatccttcactctatccacactgaattctctgggttttgttatttgcttgcttgttttgcttaggaaaagtatgcagcttaaaatctttatgatgactttagaaagttttggactttgtatatttacagtctttaatgcaaccaaagactaattgacacaggtcatgtgtcaaatggcttaaaataaaagcaagcaaacagcagctgtgtcyggtcatgtatagagtatgttttgacttcggatgaagttgatgtttaatagcatgtggaaacaatgtcgtcaatatttcaactttgttttgtccttgcttttcaggtttgggaagtagctgctccatacattgaaaaatacagaatggagcatattccagaatcaagacctctttctccaacagccttttcactgcaatttctgcacaagaaatccaccaaaatcccggagtctgaggacctttaatgggctttgtcatgaagtagcagatgagagggcagtcagtttagcacaaagcaatactaggctgaaggagagacctgagaactttcctaggtagatcaatccattgtatmattcagttcttctaaagcctacgttggttaggctgatggcagtattatagttgctaaattcagcactgtgttcctgttgtcgtggttcaagacccaccaggtattttcagattataaaacttttctttctttcttaacagtttcaacaggccactcactcttaagggtgagaagaataaccacaattgtatgtgcctgttttttactcttagcattagatgaattcaaatttggaaacagattgatagcaattttttctaaaaacattagacttttgttaacctttttttttttttttttaaatttgcttcaacaagctctccaccagttgactttctttggctaattttactttgcatgatatgccttaatatgccttcataaataaccattttaagtcataatttgtccttaagctgcttttttcttctattaattggatcatagtaaagagtagtcaatagggtcttcagctattaattgtagaggtgattaaaaccaacaaggagtttcatgtgcaaaggagataaggaatgaatataaagattgctatttgggtggctcttattaaactgtgtattttgtacttatcactacacgtatcccccaaatgcttacatgggagtttgaggttagtattttcacttccttggtgttagtactctattcacattcttattgtaaccttcctcatttcacagataaggaatctttggggattaaccaacctcctttctgtaatggtaatcattaaaataagtcctattgataaaggtcagatggagccctagagtgtattactgcatctatttttttccccgagaagataaaggaccttcagggatggcttaagtgtatctgtccagatgaaggatgggtcacatgacctcttggcttcccaagtctaagctctgtgactttgcaccagtgtgtgcatatatgtgcaaggcccttcaagtggtctgaaaccgtggctctaaaaaccacagctggtggagaggaggacagacacacttgccaccttgcctacctaattgccatctaaaatgggccgaacagtggatttcacaatagagttttcaccctttagatttacaacctgtcaggtggaaactgaagtgaaaactgctgcmcacagcaattcagggagcaaaaaatgtgctgaggagactgtttacctaaaggttgttcttggtgctattcyttgtcaaaatgtgaacacacacaaatgaggtttgtgcattgtcatccgtgggctgccattgagccagtaacccccagtggtctcatggtgctcttcgctccagtttggggaatgctggattctttcagcccctgcagccctccaggtcaaaatgacactttgtcactgagttttctacacagctctrttagtaactgacagcacacgccttcaagggaacttcaagggaaacatggaataaactaagtctcaattgccttatggtgtcgctttattcttaggtatttatagcaaagttaagcgcctctaacagcagttaatcaagcttctgaaggattcagttgacagatgtcaaccgttttaagaacaatatgcttgactcagtacactctttttcccattggctagcaacaaaagagttggaggtatcaggatttcctccccagccccgcaggctcacctggtctttgtcacaagttgtctcagggcagctggaggaggcaaaccctaaagaacaagggcttttcaagtccctgttgtgccacgttcgctaatgtcctgttggctaaagcgagtcacgttccaggcccagagtcaatttgggagggtaacactcaagggcatgggcatgtgatttgacgtgatccatgggcctgtatctgacaatctaccacatgcataaaatcccatcacaggctgggtgcagtggctcatgcctgtaatcccagcactttgggaggccaaggtgagtggatcacgaggtcaggatttcaaaaccaccctggccaagatggtgaaaccctgtctctactaaaattacaaaaattagccaggcaccgtggcaggtgcctgtaatcccagctactcgggaggctgaagcaggagaattgcttgatcctgggtggcagaggttgcagcgagccaagatcgtgccactgcactccagcctgggtgacagagtgagactccatctnnnnnnnnnnnnnnnnnnnnattacaaccggcaaaattcaaaagcagtatacatttcatactgctttaaacctgtgtctgatttttgggtctggtcactggattgctttttattaaactttatggttctctttatggttcattttgctttttttttttttttttttgagatggagtctcggctctgtcacccaggctgtagtgcaataatgctaccttagctcactgcaaacctctgcctcttgcgttcaagcaattctcctgcctcagcctaccgagtagctggaattacgggtatgcgccatcacacccggctaatttttgtatttttagtagagatggggtttcaccatgttggtcaggctggtcttgaactcctgacctccagggatccacatatcttggcctcccaaagtgctgggataacaggcgtgagccactgctcccaactcattttgcctttttgcttacttttgttgagagtattaatttattaaatgtaaacattgtaaatgtaaatgtaaatgtaaaaaatagttggagaacattagtttcagcccagagggtagacttcattagtctaacatacaaaagacagttaaattacaatgctacaaaggctatcatagagatgtgggaatgtggggaagggcgtccagctccagtttcccatgtaaggaagagaaggaaagcattctgggcagagggaaccgtattgcatggccctgagcagctcactgtcccctaaggaacagtgtgaagattggtgtgattagggcttagaactcagagctgctcagaccttaatgtgcatgtgaatcacccggggcttattagcatgcagattcggactcagcaggtctgggtccagccagaggttctgcattcctagcaaactccgtcagttgcacgggcttgcagcacgctggcctgggaggactagggcagtttgggtagatgtctttttctgtcttctttcaaaaaaggcatgaatgccatttgtttaaagtgagtgcctcctagatgaaaaatcagatgtgcttctccttcttgtttcttcaatagaagaatctaatcttgtgttgcttgagttccagggaagactcgacctaacattccgttttggcttttatgtgtatctcctgcgccccaaatgttcagtgcctaggtgactggtcacaggggagccatcacacacagcaactgtgtgccccctacactgtctcaagacttcttaaataatcgcatgaggttcagagctccagagaccccattgtgattgtgtccggaattggtgggttcttggtctcactgacttcaagaatgaagccgcggacactcgcgctgagtgttacagctcttaagatggtgcgtctggagttgttcgttcctcccggtgggctcgtggtcttgctgagctcaggagtgaagctgcagatcttcgtggtgagtgttacagctcataaaagcagcgtggacccaacgagtgagcagtaacaagatttattgcaaagagcgaaagaacaaagcttccacagtgtggaaggggaccccagcgggttgccaatgctggctcgggcagcctgcttttattctcttatctggccccacccacatcctgctgattggtagagccgagtggcctgttttgtcagggcgctgattggtgcgtttacaatccctgagctagatacaaaggttctccacattcccatcagattagttagatacagtttccacacccaggttctccaaggccccaccagagcagctagatacagagtgtcgattggtgcattcacaaaccttgagctaaacacagggtgctgattggtgtatttacaaaccttgagctagatacagagtgccgattggtgtatttacaatccctgagctagacataaagactctccctttgggaggccgagacgggcggatcacgaggtcaggagatcgagaccaccctggctaacacggtgaaaccccgtctctactaaaaatacaaaaattagccgggcatggtggcgcgcgcctgtagtcccagctacacgggaggctgaggcaggagaatggcgtgaacccgggaggcggagcttgcagtgagtcgagattgcgccactgcactccagcctgggcgacagagcgaaactccgtctcaaaaaaaaaaaaaaaaaaaagactctccacgtcctcaccagagcagctagatacagagtgttgattggtgcactcacaaaccttgagctaaacacagggtgctgattggtgtatttacaatccctgagctagatataaagactctccaagtccccaccagactcaggagcccagctggcttcacctagtggatcccgcaccggggctgcaggtggagctgcctgccagtcctgcgccgtgggctcgcattcctcagcccttgggtggtcgatgggactgggcgccgtggagcaggggtgatgctcgtcagggaggctcgggccgcacaggagcccatggagtgggtgggaggctcaggcatggcgggctgcaggtcccgagccctgccccgtgggaaggcagctaaggcccggcgagaaatcgagcacagcgctggtgggccagcactgctgggggactcagtacaccctccgcagccactggcccgcgtgctaagtcccccattgcccggggccagcagggctggccggctgctccgagtgcggggcctgctaagcccacgcccacccggaactccaggtggcccgcaagcgccgcacgcagcccctgttcccgctcacgcctctccctccacacctcactgcaagctgaaggagtgggctccagccttggccagcccagaaaagggctcccacagtgcagtaggggggctgaagggctcctcaaatgccaccaaagtgggagcccaggcagaggagatgccgagagcaagcgagggctctgaggactgccagcatgctgtcacctctcatgatgacaacaatgtgcaatgttacccttaaccttccagtgaggggcattttgagttgctttatattgactacagcaaagcctcattcattcaggctctattaaactgaaattagtgatcacttggagagttaatctttacttctcaaatcatttcttaccaagtttggtaatgcagttgtgattataaagatgatcgaaacacttaaaaagatttcaaatcaacttacatggcttttaaaaacacccatttatatgtaaataattatcgactctttacaaataattttgtaatttcctaaaaactctaatagacaacgctgctgatctacttccaggctgaaaggaaacaacaacaataagagcgacagcaaacatttattgagagctgtaaaatgtgtttcacccaattgtaatgtaaagaatcgaaaattttaaaaaatttccaaaaaaattacatgattgtagttggtaaaaatgcacccatttcaggaaggcccctgtgcctgtgtataaatgatgtgtcttgaacgctgctgggaagctctattgctgagattgagaagaccttagaaacggaaggacactcttcatcagaggacattaattcatttgacaagcatctagaaaatgaactacttggggaaaggaaatactatttgcttaacagaaggctatattttagcttcattggggcgtatcacttagatttctttcgatccctcaatgttcactaaatatagtttaaaaactgagatgtgaaatacagacacaaaatggaaattttaagccaagcctacttttccccacaaaggcatttttgtgataccccaccatattaatctacagaatatttgtaaccaatatttgtgaactaattggatgttttgtgattttaatcacaataggtttacctgtttatatgtcaaatgcatgtgttaaatgaaaataaatctatcccttgggttttttgagtgacttaaaaagacattgaagtacatttaggtttaagtgatataattcttgtaaatattaaggtgttttaacttttaatataactatattgacttatttcatatagtcaaaaagtcttctcttttcaaatctatcatgttttatagatgagttttcctttagctataacatattcaattaattcatgatggcctccgaactggtaaatcaaatgctcccatctagaaaaaaaaaaaaaaaacaacaaatattacttcaatgtgtgcaagtaaaaattattactttatcaataaatgctaattttaaaatgcattccctacacatttatttacacccagtcaatggtatttgggctttctaaaaaaccgtatataactaactggtctatggtaaatcaaacattgtttaataatatcatttaagtacttgatcttaaaatatttgcttcattaaatgatacataaatgtcaccatcagcattatatccaatacagggagtggtttctgatcatggagagaattttaaagcaggtgtctctggaggacttgaggtccaagggctgcaatgggctcgtaagagtcaagtagccataggatttacaacttgtaggtctagaacagtaaaaccctgatatggtttgctgctatgtgcccacccaaatctcattttgaattgtagcttccataattcccacattgtgggagggacccagtgggaggtaattgaatcatgggagtgggtctttcccatgctgttctcatgatagtgaataaatctcacaagatttgatgtttttatgaatgggagttcccctgcacacgctctcttgcctgctgccatttaagacatgacattgctcctcctttgctttccgccatgattgtgaggcctccccagccatgtagaactatgagtcgattaaacctctttcctttataaattacccagtctcggtatgtctttattagcagtgtgataacagactaatattacactggaggcccaggtggcaacagactatgggtgggtgagtgataagtcaccaggaacaggaaaactaagtttaagcttttgggagccagtcggcatgagaaatcagagagggaatgaatcagaaccaaagtgagaagccagagttgggagcaagttgaaaatcagaagccgagcagaaaaacacaaacacatgccagagggcacaacccggccaaagtccaggtaaacagagcagaaatctggaaatctacgaaagataccagacagatgaagagatcttgaaaacttggtctaccctgttgtttagggtctgtcagtagatttgctctttggaaagggatcaagataga

SEQ ID NO: 95599 - DNA, 34837 bp, Homo sapiens
  misc_feature (1)...(34837): n = A,T,C or G
aattctgttatttcatttatcatgaattttttacattaatttatatatttaaaatagtgaattaaaatattgcttattttgattactgagtttttgctttccccttaaattttatgcatgaagctagagcttcactggccttaccctaatccttgttctgatttctatactttgagtatcattcaaatttctcagtgagctggtgtaactcttacaatgagaaaaataataaagatatattcattttggggataaaggacacccaggagtttatatttaaaaatgtgcccgcagcagaaacaatggacaacacattctattttgggctactcatttaaatatgtgcctcaggaatctcaaagagccatatataagagctaaatatcccggaagcagagcagcagatgattaagaacacagactttggacaagcctgatttttgaatcttggtttggtatttacttatgtgtgagcaagttcatgtatcattcaaaaaacatttattgagtacctactatgtgtcaggtactgttctacgtgtgggggacagggcaatttttaaaaagacaaaaaagaacaaaaactattgtcttcatggagcctacatcttaattactcagcatctctgagcctctgcttcctgtttcataaagtggacacacctcttaaggctttcttgaggattcagtgggcaatggatttaaccaagtggggtgcctggcttacagaccagctcagtaagtgggaactattatgtgctaatatttactaattagcatctgattttagttccagtggttataaaaacaaatatttaaaaaattatgtcaaagcttataaaagagaaaaaaatgaataaaaactataacattgacattatactttttcaaatgactgaacattttttcacaggcattaaattcattctcacgggggaaaagaaagatcggtgaaaaattggtgacaacctgtggttgatgagtatttggaatttggatggctaatactaaagatttgtagattttctcaattttacactctgtactcatctccactcttaggattctgatcacctctttcttgtcacattttcactcctttggtccttctatctatctaaattcactctccttcccactctcattccctttatccttaaagtctttttgcaatgagcatctttatccatgggttcaaggactttttcactcacagaaaaactggaagttctgttcctttaaaccaattgctaagagcagatatctgctcttattctgtctctattatatagttcatataacatgtaaatgcaatcagcagtctccagatgttgttatacttctatacttccatatgcatgaattcctgtattgatgaatgaaaggttggtgaacaaaagggagggagaggaacagaaccagttattgttaggaagggattataaagtcccctttccaatcagaaaaaatgttgaagtcagtggatgtctttgttgtgcgaaataaaaatagcatgatggctaaacaaaggctctgtaccaaaagagagggaaaatgttattggattgcatagcaaatgcctgaaagttcacatcttaaatacacgttcacatccaacttccaatagatgaaaaagatcaaaagctcagaaatatcaggaatgtaaaatggtggtgtataactgccagccatccattttagaggtcgcataagctaaatgattaagaacatagactctctctatgtcccttaatcctcacacttcaatttccccatctttcaagaggaatgatgcaaatagtatctaccttgtgggattgttaggtaagttaccacgtccagcctttggatggcctcagttgcatagtatgtgctatgggagtgtaagcacatggagaggtgcactctgagggaggaatgtgcctggtgtgtttcaggaacagtaaggacaccagtgggccttaaacacagtgaacaaaggggacagcaccccagatgaagccagagagacaagaagtccaagatcacgagggccctggaggccattttctcagtgaaatggaaccattcaatgaatcactctgatgctgagctgagaagagactgtagaaagggaaaagggtcacacagggagatctactaggagactacagccactgggaggcaagagataatgctatcccttccttgggatagcagtggaagtggtgagaggtggtccgattctagatgtgttttgacagtagagtctacaggattggctgatggtttggatgtggagtatgagataaagaactgattgcagaaaggatggagttgccataaatggagacagagaaggcagtgggggaaggggcacttgggaagatcagaggctcattttggaacatgtgaaatttgagatatatattagatatctaaagggacatgggtgtaatgtatactgttctttcaagtgaacaccatgctggttgatttaattaattgttgtgttcctttaatagctgtacaattatatgtggtctctgagtcaggtctcttgacaagtgtcattgcaagggtagtaggaatggcactatggaaagacccctggcctttgggggcaggtaggtttaactcctgcctctgactcttatccactctttctcttgggtctagagaattatgcttaatgcactgtagaatcttctatcaagtatgaataataacaccttccttacaggcctggtgcaattttcaaacacagataatatatgcaaagtgcctgctcatagtaggcttgtgaagaagtgatcccttatacttttttcaaactagatattgtccagatccttcctctttctggcccactctgtcaactgccgccatttgaaatgggagcataactgacaactactttttgtaagaaactcccaatcaaagttcttgaaacctggtcattggagaggagtctaccagcaatatcagtgcaaatctgggggacctgaatcagcttcatgtagagtcttaacattctgagctccaggggaagtggggaaagaggagtgggatttgataaggcccagtcctaagtttctaaaccaactctaaataaaatgaataataacactgtctaccagatattattcgaatcagtttatttgtttttttgcaacaaccccctctaaaacccaatgaaaacgaatttccagatgatctcaatgtgagataaaaagcaatgtttatcttcacatgcatatgaggatttagactggttctctcagacccaatgcccttccatttttttttcccacctcctctccgcctaccttggacaaatactaggaaaaggggctgtgaactgtgtccttggatggtgtggggagatcacagttagcaattttttgtttacctaaaagccaggagccactgggtccttggcctgcttagatgcacgctgccgcttctgactaggtcagagcacagcacaatgatgaggaaattactttcaccttgacctttaaggcactgctggcgtcaggctatttagtatggacgcttctgttgacatttctgactgccccttttgcgaagtgaaaaaaaacaaacaaacaaaaaaaaaactggaggtcaagaggaaggaaggatgggttaaggagtcagcatatacaagtcagataatgtgaaaagtattttataagagctgctatcgggatgttggttattaccaaggaaaaatgtgtcatccttatccatctataactactgaacagtaactaaggaaagaaattcactcatcctttctgcttttgcaaacctcctgtttgcaggagcttatcaggtaatgttgtctgtctggactgtgaatcagatgcacagttcacccacaaacataaatacctatgaaaaagaaatataatttcttttagactcacccagaacttgcaagctttaagtacatggtctgtgaagtcaggagaggaactatactattggctgaaatctaatctttaacttaattggccaggaagacaaatagcaggattaaaacacacgaataatagtaataatacctattacttgtttagagctgggcactgggctaagtgatttatgttttattttatttaaaactcagacaagcccataaagtagaaacagctctccctatgatgaggatgagaaaacgaggcttcgagaaattactgtaaagaaattccccaaggtcaaacagcttataggaaacagaactcagactaagacaagtttattgaaccctatttttctataattttaacccatcctttatacatacaattgcatagttctgcaaatatgcctaaaattgcaaaatgtaactgattaaagtcttcagcagaaattttataatagaaaattttaatatttctctgtgaattagtgactttatgtgtttctattccccactatttctacttctctttttaaagacatagaaatatatgtatgtataaactttttaaaagctatgcacacacacacacaaacaacctgtttgtgattgtgtatatgagctgtgaataatcttctgatgccccctcccccccacccttagggtctctttcactcacattgtctatatattttccaatttttatctttctctttcctaactgatctctcttttataggccataatatgaagctaaattatattcttatttatcgtggtcatctaaaggagtttttgctttctgttccaggtttttttaatgagactaaattaacttttatattttgtgggtttgcaggcttagtctgcttttatagtatattatttgtgtccacatctatcacttttattgtaaagtctttactgggcagggaaagcgcctttcctatctttgtatgttccacaagacttaacacagagcttgtgataaacatgaataaacgaaatcaagtaattaaggactcaaaagcctgggcctggcagtgtttctatagcaattggtagcaggaagcgacgaggctgagaatcacagaccatcttccataaacttgattctgtctccaattttggtcgcaagttgcttgtaggcccaccagacacagctgaggggtgggagggggcatgcggaggggcggacactgagctgaaacctattttacctcagcgagtttggatccaggagcctttccaacctatcgttcgggaaggcgttgtgggaaaagtgggcggaggtgccaatcgatcctccagtctcggctctatcctcccccagcccggttcccggtcatctcagggaccgtctggtagctgatcccggaacgcagctggccaacggataagtgcgcggcacccgccacccgcgcggacccaggagcacctcccctaccgcatccccctcctccccacccccaggttccctcggctcgcggccctccgcgtcccgggctcccgccccagaacctgtgggcagatgtttcctccacgcagtaccctcccggggctctgcctccaggctcgcgtcccagcaccctaggcagaggtttcccccactctgtcctctcccggggctctacctccaagctcccgtccctgcccctgggcacagctttcccctactctgccctctccaggagcgctatctccaggctcccaccccaacccccccgggcagaggtttcccccatggccccccttccggggctctaccccaggttccggtccctcactcccgaacactccgggtgccctcacccagccaacccttgacgcgcttccacataccacgtgatccacacagttcactttgatctctcggggtgaccaagcttaagtttccttatctgaaaagtagggacactagtctccatctcgtttactcgggatgggacaagacgaccaaaaaagagaggattcctcatcaggtttattactcgttgccattcttgcaatgattaccgcccccgttgctgtggttgggggaggcgagcaaagggcagcggctgcgagcgcccgcccccgccccaccctcccagccccggacagcgcaggctgcggcttttcgtcctccactgagtcctgccggtggcccgagcccggtggcctcccggcgaccctcrgcgcgaggcgacatggcargcggccacagcctcctgctggagaacgcgcagcaagtggtgytggtgtgcgcccgcggcgagcgcttcctggcgcgggatgcgctgcgcagcctggcggtgctggaaggcgccagcctggtggtgggcaagtaagtggccgggcgcgcagggtggggaccgccacgggcggagctggccgctcttcctctcactgtgcactctggagggaaacaacgccgtgaaagcgtccctgcacagagatacacgggcaagccagcctttggggtacctgttgctaacacgctctgctgcttggggttgtcattccgtccaaagagctcagagaggaacaccccattggaacgcatcagggtcctgcctctgctggtaaaatatcactgtccaaccatcagaaggggttgaggtcctccccagtgcttcttaaagggaggccagragaccacctttgtcagggtggcctgtggttattttattcttacggcagatttctgattccacctgcgtcccccactccctatccctagaattttagaatcagcatcactggggctggagttctgagacctgaatttttcaaaagtacctttcacatcctcgtgatctcgtacactaaagctttagaaccacggagaacatttagacgataatggccctgagtgataataaatcaagatttgaccatcagaaaacaagatatttctcttactcatctgagcttcctgccagatatgaataaaagaacaaagtttgagggcgacctggggtagcaagggaagttggatgagaatttgaatccaaagcgtgccatggggccacaattgcacacgatcaatgagtctcacaaactgaccacggcttatctgaggcagtttagggttgtgcaagagcccagcttttaagggactgtgggttggtttaattttatttatttatttatttatttatttatttatttatttatttatttatttttgagacgcatgagccactgcgcccagcctattttttgtttttttgagacagggtctagctctgttgcccaggttggagtgcagtggcatgatcttggctccacctcccaggctcaactgcgatctccacctcccaggctcaagccatcctcccacctcagcttgacaagcagctgggactacaggtgcacgccaccacgccaggctaatttttgtattttttgtagagacaatgtctcactgtgttgcccaggctggtcttgaactcctgggctcaagccatccacctggtttggcctcccagtgctgagattacaggcgtgaaccaccacgcccagcytgactggtttatttttaattaagggatgaaaacattcccaatttactatgaaaatattatttaaaattttgcttagaaagttgaaaaatatgtacctgggttgggactggagtatcttataaaaattatatcaatgcgaccaggcacagtgactcacgcctgcaatcccagcactttgggaagctgaggcaggtggatcacctgaggttgggagctcgagatcagcctggccaacatgatgaaaccccatctctactaaaaatacaaacattagccgggcatggcrgcgcacgtctgtaatcccagctactcgggaggctgasgcaggagaatcgcttgaacccgggaggcggaggttgcagtgagctgagatctcgccactgcactccagcctgggtgacagagcgagactctgtctcaaaaataaataaataaatacataaataaaatgatactaatgcaccaacatgaagtcctgggttccaagacatgttctatgttcacatcaaaaccacaaaaagtagggaaaggaaaaggagggagctgacttgtggtctggaagatggggctttttcatttgagtctgctacattgttctcacagtttgttggatttattacaatgaaataaatttacaagaatattgagaactttgccattcaaatatgattagctcggtacaggatggtgttgtttttattttcacttactatcatcactgtcttatatattaggttggtgcaaaaatcaagtatagaattggaataattatctggttatttgagrtgctttgaaatatatctcccacctcattatctgaatgttttaaggtaaaagtgttttcagggtgaattatttaggtgattgtcttaaattttcacatcacttcccttatgcagaacctgtgtgttcaaggacaacttaatcctgctcttcttttggtagacaagaagaacacaggctgtgagtgtgagtgtgtatagggagaggggtactgattaaaagcacagagaagtggaagaaagttccatttcaaagcccagaattggatggattttaacagtgtgtgttttttttttcccaacaagtatatacataccatggtgtgtcctgattagaatgaatctcagtaagatcaactaatagttaatcccctatatgctatagatatataaaatgagtcctggaaaagaatatggtttgagggacaccagaaactcccccttcctaaaaataaatatctcagtgattgtctgccatagggtgtaaattccaccattgtgttcattcatttaggtctctaaaggtatctcattcttaaattaagttctctctctctttytctgtgtgtgtgtgtgtgtgtgtgtgtgtgtgtgtgtgtagattgcagttaatcttgaagaggctccyaggtgtggaaaagaagcacaaactgtcatccagttkacaattgtcccatccaaaggctaaaacctagatgaaaatgtctaaatgaacaaaacaaacaggaattaaaatatagattcatacacaaggaccatttgttttagcacttcagaggaggggcaaaaatggaaaatgttgaaggaaaaattggtgggtgttatattttccttcctagaagccaattaaactgtcaggtggacaatgaacctaaaataggacattttcattcattcacaaatatgtgctgagtagttagattgtgctcagcgtagaggatgcaaaaatgactaagactggttcagacctcaaagagctcaaagtctactgggaaacaagacacatgaaaagataattataatacaatatggtaagcacaaaggtagagagatgtgtgcatgcaggcttattataagagactgcacagaggggtgcctgaaccaatgggaggatcgggagaggtgtcagatttatctactataaaacaagaccaatttttaggttttagaaactgagacagtgtatgtgccaattctaaattttcacaaagcaccctgagagccactcaaagaarcatcatcctccttaaatcatcatcattactgttttcattataattatactttagctcctaaagtagggtcttgcttgctaatttgctttactttcagaagactctgcagaatttttcttcctaaatttctcagaatacaaagtaaataaaaccacatgtgcctattatttgtatcccctaaaaaagtatatgtgatatacgttcattgtaggaaaagaaaatacagatgaacaaaaaggaaaaagtcactcaaaccccatcattaggtgaactaataccaacatttagtgcttctgctttcagatgttttcctatgcaaatagaatcacataaaaatgcatgctttagaaaaggaagctatgcatattgttttgtattcgggttttttcacttagtcataaatagtgaaaatctcaccatagcagtaatatgtatctttgtaattttaatgactaccttaaaaaaacacttttgggggaatgctttttgttggtttccttcaataactgccctcattatgtcctcaacaaaggaacataagcctttgttcaaacataggtacatccacagatgaatgagagaaccacactgttgaaaggtagataagcatgggattagtggggtcaggaagaggaccyagtgccctcaaaattcacctcctgcacagacggagaatgttagagatttatttcttaggtttgactttgttaaaacaacctctcttaaagcagtgtcagtcattaactctttgcataagagcattctctttgttctttcccattcaagggtcaatttctaatcctgccggtcctttccaccaccagattcactgcacactgggtagattatctaactgggccagataaaagctgttagtgatgaagaattgtcttaatcaggatactaaattctatttcaagacttaatttcttattccaccctaagtttatcctccccaaatcycccacaatcattatttcttttcctatcataacatcttctctttccatccagtttcttctgctcttccactcttacattttgttaggttaccccaaccacttctgtcccagttcggaatcccttatcctaaytgcttttcacaacacattccagctctcaggtttatagccctcaatctccatgttggaaatacraatttgttgtaagtgaccaagacctaaattaatagtggctgaaacaagatggaagtatatttctctcctatgtgaaaatccagacatacgaatgcagggctagttgattgcaatactccatggggtccttaggagccaggcccctgctgccttgctctcccatgcatggcccactttcttacactcactccatgacccaagatggccaccccatctctagttatggtgtctgcattccagccagtaagaataggaagagaagacaatcctaccggctagaccttagtctcatagccacacctggctagtgggaggtggggaaatgtagtctgtattttgggtcatcatgtgtccagctaaaatttagggctctactagtgtaaaaaaagggaacattgatcttggggaacaaatggcaattgtctgctacatatatttgacgtttaaagtttttttaattgtaaattttcatgggtacatatatatggggtacatgagttattttaaacagtcgtacaatgtgtaataattatatcagggtaaatggggtttccatcatctcaagcattcatcatttcctggtgttacaaacattccaatcgtactccctcagttattctaaaatgtgcaacatattattgctgattgtagtcaccctgttgtgatatcaaatactgggtcttattcactgtatctaaccatatttttctagccattaacaatccccatttttctcctctccccttctattcttcccagcctctggtaaccatcattttactctctatctccatgagctcaattgttttcatttttagctcccacaaatgaatgagaatatgccaagtttgtctttctgtgcctggcttatttcacttaacataatgtcctccagttctatccatgttgttgcaattgacagaatctcactcttttttatggctgaatagtactccattgtgtgtatgtattacattttctttatccattcatttgtgggtgggcacttagtgtacttccaaatcttggctattgtgaatagtgctgcaattaacatgggatgcagacatctctttaatatactgacttcctttcttttgcatatagatctaccagtgggattgctggatcatatggtagctctatttttagtttttgaggaactttcatactctccatagtggctgtactgatttacatttctaacagtgtacaagggttcctctttctccacattcttgccagcattttttattgcctgtcttttggataaaagccattttaactggggtaagatgatctctcattgtggttttgtttgcatttctctgatgatcattgatgttgagcaccttttcatatacctgtttgccatttgtatctcttcttttgaaaaatgtctattcagatcttttgtccatttcttaatcagattattaggttttttcctattgagctgtttgagctccttatatattctggtttttaatcccttgtcaattagatagtgtgcaaattattttctcccattctgtgggttgtttcttcacattgttgattattttctttgctgtacagaaggcttttaacttgaagtgatcccatttgtccatttttggcttggttgcctgttcttgtggggtatccctcaagaaattgttgcctgaaccaatgtcctggagagttttcccaaggtcttctttgagtagtttcatagtttaagttcttagatttcagtctttaacccatttagatttgatttcattcttttgcatatggatagccagtttccctagcaccatttattgaagagactgtcttttccccratgtacgttcttggcatctttgctgaaaatgagttcactgtagatgtatggacttatttctgggttcactattctgttccactggtctatgtgtctgttttttatgccagtaccatgctcttttggttactatagttctgtagtataatttgaagtcaggtaatgtgattcctccagttttgttcattttgctgaggaggctttggctaatctgggtcttttatggttgcctcgaatgtggctagagacgcttttccagactcaggttcaagatagaagcacagtaaatgttgactaattaacaccaaagaatctgaaaacatattttaagtcactcatcagatttctcacaagatttccccaaatttaataactatttcttgatttttcttcagagatggatttataaaagctattggtcctgctgatgttattcaaagacagttttctggagaaacttttgaagaaataattgactgctctgggaaatgtatyctaccaggtatttacctctttttcagtaaaggtctacaagtagctttaacagttgctcctgaaatgtaaagaggaagagtaacagcttattttaaagtctcaaaataatatttaaaaaaaatcatcgttccatgtattgaatttctattattgaatgtatagctgctttcaaacatggtttcaccttgaatccttataactgccctgtgtgggaggtatcattatctatactttacagattagaaaattgaagctaagggtgaaatatgttacccaaggttcctaaacaggaaacagacaacctaggaatcaagcccattcattcgactccacttcttcccactcacatgctgaatagaaaccagctgtgttgtgtttaggttcaaaaacagtcaaaagaactttattaatccatggcataggagaggctaacaaggcagctgctgtctctaatactagaaatactctaaatttgtataggatgtgaaacaaaggatccagctctgggcagaaaaagaaaaacaaaaatcctagagctttcactgcagttcacttgtatctttgatgattgacaacagaatcagtttattaaccatcatctcctacattatgttgtatggcttcatataatcatccaaaacaagtttcacaaactttcagttctacacaaacaaaagggcttcatatttatatttttttatataaaatttttatacttttaaatatttattgtacacatctgacagagcttctaactgatgggttttcatttgtttgtttattttgagacagtctcactgtgtcaccaaggctggagggcagtggtgtgatcttggctcactgcaacctccacctcccaggttcaagcaattcttttgcctcagtctcctaagtagctggattacaggcatgcaccatcatgcctggctaatttttgtatttttagtagcaacagggtttcaccatgttggtcaggctggtctcgaactcctgatctcaagcgatctgctgatctcggtctcccaaagtgctggtattataggcatgagccaccacgcccggccttccttatgattcttgagagtcaggagacaaagtcagggtgaaatgttatgaaaaagaggaatatagcagaaagcaatctgagtaggcgcttttgattttagtccaatcagagccaataatgagtcatttaatccataaggtatctaaaacattttggaaagacacactttactgaattgtacctggataaacaaaagtttcaagtgattgctttacagtttctccttaattaaaatacatttctttcttgaaaatagattaatctttctgatttcacattttcccttctcagagttgcagggggaggggattgtagtattgttttcatatccagattattccttgtgataaggttcatggttttgccaactagggggcttgacaacctaatttcaaagcttatttgggccaggagtagtggctgatgcttgtaatcccagcactttgggaggctgagtcaggcagatcattggaggctgaggcaggcagatcgtttaagcccaggagttcaagaccaacctgggcaacatgrcaaattttagcttgtgtggtggtgcatgactatagtcccagctactagggaggctgaggtgggaggattgcttgagcctgggaggtcaaggctgtagggagctgtgagtgtgccactgcactccagcctgggcgacagagtgagaacctttctcaaaaataaataaataaaataaaataaaataaaataaaataaaataaaagcttatttggtgagcatggacttactgagcaaaaggagctgtatttctgtaagggatattttcatcatgttgcatcacctccttcattagagctttctagaccaaccatacaacagggcagtcttcttttctctctatcaagggaaacagacagacaaattcttcctttcatgctcctccaaaatggatggccaccatcacactttccccagagcagcagggtatagtgctgctgtttgcctgctgtctaagtgctctctatttcttaattgtaagataacttgatttattgattataggtttggtggatgcacacacacatccagtatgggctggtgaaagagttcacgaatttgcaatgaaggtaactgcaacaaatcatggcaaatcaaaataaagcacaaatatgaagtcttttgctgaagagttagtaggctatcaagctttgcaacatatgtcaacatattttttaatggatatttttacttgcttgggtatgggaaacaaatgacaacaaaacttatttataactgccccaaatcattgtattatacacagggctattcctgcccactaatgtctccctctctttccttccccacattcccattccaaatcgctatctctagtagcttttgaaagggctccaaggaatagtttgaaaattrccattcattggagtaaagcttggaaaaatatgttactaatcacaaaaataaaataccttaatttttctgttataaactgagacttattaagaatcacaaaatgtaagctgtgttagtcctatattagctgtaaccaactcctaaatccctggttggagagattttcacatgtgttttttaaaaaagaaaaaaaaagatgtgcctcctagcagctaaactggcttatttcaggaaaagaaaaaaaaaattcttttcttcagctatcatgtacctgcttcaacaaactagagctgtttttaagattgttttattaaatcacagaatttcagagccaaaagcagtccaatcctctcattgtatagacggagaaagagatttacagtccaatcctctcattatgtagatggagaaagctgggtctagagaagggaagagtgttgactagcgtcaccagctggaggatggcagaacccagatgaaaactccggccaggagaccccaggcctgcatcctttctctgcaccacactccttgctgcccagagtaactggagcccagtgggaccctagaaagagcctctttgagtgacaaagatcaagctccaaactcggatggccaaatattgagacaaggaaacttcctggggccgctttagtggagatctgaataattgcaatggggttccctgcaactcctgaattgcctaagctttgttttctcaaacaagctgagggatggagggagggctgatacttagcaagtacacattgcgggttgattgacttgttaaaataytgcaatactcctgtgccagttttgttttgttttgttttgtttgtttgtttgttttttgagatagagtctcgctctgtcacccaggctggagtgcagtggtgcgatctcagctccctgcaacctccgcctcccgggttcaagtgattctcctgtctcagcctccagagtagctggggctacaggcgtgtgccaccatgcccccgctaatttttgtatttttagtagagatggggtttcaccatattggtcaggctgttcttgaactcctgacctcgtgatctgcccacctaggcctcccaaagtattgggattacaggcgtgagccaccgcgccaggcctcactgccctaagatcccaacaggccacccaccacatctcccatctctaccactccagtctcttcccargaccccttcggagctccccacaatccagtgtctggcagactaggggcttccaggactgtgtatcccagcacctttctaatctgatgggttggtgcccatgccatatggcttcttaatcattatataatattgcccctggaagtagattcttcagacctccctgcaacttcctggcatgtgctggcctaaaggtgaggcgtgtgttcagttggcaggagccacctacatggaaattcaccaggccggaggagggatccactttaccgtggagcgcacgcgccaagccacagaggaggagctgttccgctccttgcagcaacggctccagtgcatgatgagggctggcaccacgctggtggagtgcaagagtggatatggcctcgacctggagaccgagctcaagatgctgcgcgtgattgagcgcgcccggcgggagctggacatcggcatctcggctacctactgcggggctcattcagtgcctaagtaatctcagccagtgggggcccgggtttaactcagagcattgaaaacgaaccccgggggtggaggcgcattagcactttagctcttgcagggagatggatagaagtctttggaaagacctgattctaatggccactcatcccgcagactcggttttaggaaggcgatcccttagcctcatcagtctgctagtcctttaattatgatagaagagatgtttcaagctctttgggttaagacaaagaaatggctccgtgtaggtcgtttaaaattacacatattaatttgaataatttcccatgataattaattagcatttctaaaagcactttagaagttaatagtaatgctctttargaggtagctcaaaccttgtggtctaggtgactcaaacgggttcgtttttgttcatctgcttgctttcttaacagcaaacatttttgttttgttgttgtaaatgatttttagccttcccctttatctaaaagttcctcctacatggccttactgtagagaactctgttcctttctgtacttgcattttatttgtccagagttccttttggtcctggaatttctaaataggaaggctcatggttccaacagccaactgaactatctaaaagaaatccaggacytgaacatgcataaggtgcctccaaagtcttagtgtggtcttaaacattgataacttaaatagataaatataatactacagacttacaatcattatttaaaaatttaattgtttaaatttcttttacatttatctgattttgtaaacttcggaatataaattccgtttttaggccaggcacagtggctcacacctgtaatcccagcactttgggaggccaaggcaggtggatcgcttgagctcaggagtttgagaccaacctggccaacatggtgaaaccccatctctactaaaaatacaaaaattagcsaggcgtggtggcccatgcctgtaatcccagctactcaggaggctgaggcacgagaatcgcttaagcccgggaggcggaggttgcagtgagccgagattgtgccactgtaccccagcctgggcgacagagcaaaactctatctcaaaaaatatatatatwtttttttaattgacaaataatatatttatcatgtagagcatgttgttttaaaatatgtataccttgtgaaatggctaaatygaactaattaatatatgcattactttacatacttatcactttttgtggtgagaacacttaaaatctattttttaacaatttttaggaaaacaatacattactattagctatagtcactttttaatggaaaaatataaatatttaatatcaataaaaattaacttcatgttatcttcaatcagaggaactaaaaaagtaacattaaaatttattattcaaaattaacaaaactagttgtgtagaaaagacataawtatttaatatttccagtgatctttgttgtaagtttttagcatttatatttctgaaattattaaagctcaaaatttcactgagactcttgagacattctctatagaaaacagtagattttttttcaaacagaatataaagtgtataatagtctgttttcttttgcagtagaaaggatagtgtggcatggtggaaaagtctcagtttgaagtgatgccagacctgggtttgaatccagcttggctacttccagctgggtgattttgaggtcatgacttaacttttctgaacatgaattactcatctgtgaaacagagctaaatgccaccctattctatatgattgtcttgagaattaacaataacttgcgcaggcagggcacggtggctcatacctgtaatcccagcactttggggggccgaggcgggtggatcacctgaggtcagaagtttgagaccagcttgatcaacatggagaaagcctgtctctactaaaaatacaaaattagctgggcgtggtggcacatgcctgtaatcccagctacttgggaggctgaggcaagagaatcacttgaacccgggaggtggaagttgcggtgagccgagatcatgccattgcactccagcctgggcaacaagagcgaaactctgtctcaaaaaagaagaaaaaaaaagaaaagaaaaaaagaaaaagaaataacttgcgtaagtgcctgtctctcgtagtccacctctacccacctacccaaatggttttgctgagtgagagccttctgtgtgccaaatatagggctgaagtttcacagaaattttctccatctgccaatgagcctctgaggtctgcatctggattcccattggtaaagcctgagctcaaataacagctaaagagcatctcctaagttacgtggccaccatgtggtagagctctgtgtctaccagactctaaaagcccaggcttttctaacatataactactgcagaactttattttatctactcttcttattgttaatttwtttttagagacagggtcttgctctgctgcccatgctggagtgcagtggtgcaatcatagctcactgcagcctcaaactcctgggctcaagcaatcctcttgcctcagcctccccagttgctgggattataggcatgaggtaccatgcccaactccaccagaattttagagagaatttcacagcctcctactatcctcctcccccatwcccccagatagtgagacagaaagctaaggcaggtgcttcaggaaacattgtggaggaagaaaaaggcagggtgatagctggactcaggtaaggggaccacatgtgggtcatcagggggagtatccaggatgccctctgagtgtccttgacaggaagattatgcttttttttttttttttttttttttgaggcggagtcttgctctgtcgcccaggctggagtgcagtggtgcgatctcggctcactgcaacctccgcctccctggctcaagcaattctcttgcctcagcctcctgagtaactgggattacagatgcatgccaccatgccccgataatttttgtayttttagtagagacggggttttgccattttggccaggctggtctcaaactcctgacctcaagtgatctgcccatctcggcctcccaaagtgctgggattacaggcatgagtcactgtgcctggccaaattaagcttttcagccaggtagccttgctggcatccccaaaggtaacacaggtatgccagaatggataaaccatttgagtctctgtgcatagggtcagtgcatacagaagtcttgtcaatacctccactatgtagacatggcccaatagttaagagcccatagttgtagctttgagtctttctctacctttctgaggcttgaagtcatttacctctactgctcctcaggttcttcaagtgccagattaccctgtctttttgtgttttgtttttaatatttgcccatggcaatctcattttcttccccagaggaaaaactgctactgaagctgctgatgacatcatcaataaccacctcccaaagctgaaggaacttggcagaaatggggaaatacacgtggacaatatagacgtattttgtgagaaaggtgtctttgatctcgattccaccagaaggattcttcaacgtggaaaagatatagggttacagattaacttccatggggatgaactccacccgatgaaggctgctgaggtgtggttgacttttagtttttccctcgtcaacattcattcttgcacattcatsctatgggaaacttaattagtttcttcaaagccctctgaaaagatattgaatggggaaatttgtttgaacaatgtacagattggtctggttgagacttgaaaaccctgacctctattaaaaacttacttttttgctgatgatttactttcattatcatccactggtgatattagtattaatagcaaaagaattggctgggcgcggtagctcacrcctgtaatcccagcactttgggaggccgaggtgggttgatcacgaggtcaggagtttgagaccagcctggctaacacggtgaaaccccatatctactaaaaatataaamaattagcgtggtggcacgcgcctgtaatcccagctactcgggaggctgaggcaggagaattgcttgaactgggaggcacaggttgcagtgagccgagatcatgccactgcactccagcctgggggacagagcaagactccatctcaaaaaaaaaaaggaaagaaaagaaaaagaattacctcagtgatctcttttactaaatttctaaagtattttgcttggcacacaaagccacactagcacagtatattaatttcacttgtaccttttcagatctttctgtggcagcatccaaatcattttagtggagcacaccaaaaatagccacaagatgattttcaaatccatatatctttgctcaaattaattcacttattcatcctttcaacaaatatttgaatgaatactgtgtgccaggcactgttttaggcattgagaaatcagcagtaagacaaagtccctacaatcatgagtctaggcttctctcctctaaagcctgagacctaaataaacaagcccttggggcataaatacagacatagataccccacctgcatgcctcttaactggcttatatccagcttgatctcttcgtattkcttccaagtcttgtcccattttctgcttcagtaaatgacgccatcacctgtctgttgcttaagtcaaaatcttggatatcattttgactgctgcctctccctcacctaccgcatttcatgcaaacaccaattcctcccaattctcccaaatagctctagatccccttatctcacctctgatccataagattcataaagttttctgtttcagaaaatgtctgaaggatttgtgtttaagaatagtttttgaagtagcccactagctaattttcaaatgagtgcccattacaaacccttyacccatttgggggattgggcttacaacggttggttggcaagaaatcttaataataaaacgctgtttctctttatgggaaaaacaatttaggccatgctcggtggctcacgcctgtaatcctagcactttkggagtccgaggcaggcggatcacgaggtcaagagatccagactatcctggccaacatggtgaaaccccatctctactaaaaatacaaaagttagctgggcatggtggcacacgcctgtggccctagctgctcgggaggctgaggygggagaattgcttgaacccaggaggcggaggttgcagtgagctgagattgcactactgcacccagcctggctacagagcaagactccgtctcaaaaataacaaacaaacaaarcaatttaatggaacttcatggattcgttgttgctatttgttaaatctttccctctctgcccattctccttagcttggggctgaactgggagcgcaggcaatcagccacctggaagaagtgagtgatgaaggcatcgttgccatggcaacggccaggtgctctgccatccttctgcccaccacagcctacatgctgaggtaaggtcgtttctcaccccagacccaagagctgcaagtacaagctgtgaagacacagacgtccaaagtgcccagacattatttcattgcccttacaaatcccttaaaaatgcagatgaagaaaactcagctaatgaagatgccaaccctggactgatgttcgtaaacgaatttctctgaggaaggaacttagacccagattgcctttgagtggcaggattattgaggaagatggtgctttctttttctttttcttttttttcatggattttggaatttttcaattaaaaagaattactatgcattacttttataattagtaaataatgaaataggtgctatacttttaaatatatgcataagatgttaaagatatttagcagtattcagaatctgcatgagctgttttctaaagggatgttagtgggtaccataattgccataaatctttataaatcctgggggtgggaggaaagaggagacatatattttgtaaaatctccccagatattttgctgtatgctgtctatgaattgaatatacttagttcatctgttattactgttgctctgattctaaccaatatgagatctgaggtcttttgacacttcccattgtacccacttacttatatgatatccaagattgtggtnnnnnnnnnnnnnnnnnnnnnnnnnnnnnnnnnnnnnnnnnnnnnnnnnnnnnnnnnnnnnnnnnnnnnnnnnnnnnnnnnnnnnnnnnnnnnnnnnnnnnnnnnnnnnnnnnnnnnnnnnnnnnnnnnnnnnnnnnnnnnnnnnnnnnnnnnnnnnnnnnnnacatttctagttgtcacaactagggggatgctactggcatctagtgggtagaggccaaggttgctgctaaacagtcctcattgcacagaacagctcccaaaacaaagaattatccagcccaagacatgaattgtactgaggttaggtaagaccaggctccgagtaacttttagaagggcgaagaaaggaatacttcagtgcttttctcaaatctactatgattttatatgcacatgtatgatattatacatttttattattattactattctcttaaagagtaaacacaatgtagactataatcaggaaatatcaataacggttcttggtatgaccaacgtcttatacatttcaagtgtcatcagtctaagtcatcaatcaatatttgtctccaccacccaagaaataagttttttgttttttatttttttggaaagaaaaggctttcttcggctgggcacagtggctcacgcctgtaatcccagtacttttgggaagccgaagtgggcagatcacttgaggccaagagctcaagaccagactggccaacatggttgaaccccgtctctattaaaatacaaatttagctgggcatggtggcgtgcgcctgtagtcccaactactcgggaggctgaggcaggagaatcgcttgaacccaggagggagaggttgcagggagccaagatcatacctctgcacttcagcctgggcaacagagtgagtgagattccatcttaaaaaaaaaaaaaaaaaggcctttctttaactagtcttgaatctcttgacatggagcaaaagcctaagactttgtggtactggagggcaattcagcattaaaagtctgaactttgttcctataccagcggaggctgtcatctgccattgccacagacaggtttagcctcctattaggaccacaggggcagtcgaagtgaaggccacactctgctttctggcttctcgtttctatatttttctgatctctgcatcaggagagaccagcagggccccctgctctcccctgaaccctctcttgactctcatttccagaataaccattgccttatgctacttaagggcttgctttaatcatgtattttatgtatatttgcatgtaatatttaaatgtattcaggaaatattcaccttggtttttatggagtgccctaatacttttacagcctcactttttcctcttttacccctaagtatttatggaagggggggagggccattcaaatgacttgcagggacatttgaagctgtaccctttcctcactctctgtctctgcttcactcacctcctctcatacgttgttgaaaaacattttaagtggtcctacaaatgatcgatcatagactgggagtgactctaggatgagaattatctctgctggactctttctctattgcagcagttattcccaaattaaatctgtcctcattgctttaatgagcttttaggctttgtttatttttgatgtaacacttttgagatatgtcttaaagaataaagaatatttcaccagggaggtcaaggggatgcctaatccaggaagaagtataaacattttacacactaaattcttgggccttcaagattttaaaggacctacagagatgtttgaggcaaaaaaaaaaaaaaaaaaaaaaaaaaaaaaaagagggcaaagggagagatgtgaataggaaattgcaaaatggaaactaataaaaatagcatattgtggctgggcacagtggctcatgcctgtaatcccagcactttgggaggccaaggtgggtggatcacctgaggtcaggagtttgagaccagcctggccaccatggtgaaaccccatctctactaaaaatataaaaattacctgggcgtggtggtgggtgcctgtagtcccaactactcaggaggctgaggcaggagaattgcttgaacccagaaggtagaagttggagtgagccgagatcgtgccactgcactccagcctgggcaagagacagagattccatctcaaaaaaaaaaaaaaaaaaagcatagtgtaacctcatttattatttaatttgggagtcaccaaaaagcttattaaattccaaaaccatttgtaagttatattttcctccctttgcaagaatgccttaatatgtaaaaagatggatgagataaacaatcattaattaaatgttagtcatrtctaagtaactgcaaaagcagaatgataaaaatcaggagtcctgggattatatatgtaactctaccactaatcatttaatcttgagtttctgcttcttcttccagaatatgaaggcgttgactgtctcaagttctcttctgttctgaacagctattctacaaaagctcgcattctagagactgacatatttttttcctccccttagactgaaacaacctcgagccaggaagatgttagatgaaggagtaatagttgctctgggaagtgatttcaaccccaatgcatattgcttttcaatggtaattatttttttcatgtacctttctgagcagagtatctaccaagcatataaataatttaaaaatatttcactagcttttaaaacagtataaaaaatctaaaaatatttttctgtgaaacaagaaaaaaaggggtagacagcagtgtaattggatttttctgtcccacataaatgcctgcaggcatagagagaggagagaagcttctacatgcattattttctgattcagctttgagtattgtagttttacagtaacccatttcctttctccagagaatagcataaactccaagaggtcttagtaagtatggaagtgaacttcattgtgtgcagtaagtggtcttgaaaagttgtcaataaatattaaatacgcaatccctataataaagtaatcttttccaaagtctaagaatctttatgtataaacttagatttttcccattgcaactgagccaattcctcctatacctttaactgcctctatttgttgtgctgtgttgagaaatgttttaaattgcagttgccatatgtcactttcctccaacacttttctcttcctgccttagccaatggtcatgcatctggcctgtgtaaacatgagaatgtccatgcctgaggccttggccgctgccaccatcaatgcagcttatgcactgggaaagtctcacacacacggatcgttggaagttggcaaacagggagatctcattatcatcaattcatcccggtgagtgtgcttcaacttagctcttttatattatgcccactgaagtatgcagatgaggcctaawtcccttttccactaattattagtgtcagactctgtctggactcagacactatccagtcccctctatcttgatccctttccaaagagcaaatctactgacagaccctaaacaacagggtagaccaagttttcaagatctcttcatctgtctggtatytttcgtagatttccagatttctgctctgtttacctggactttggccgggttgtgccctctggcatgtgtttgtgtttttctgctcsgcttctgattttcaacttgctcccaactctggcttctcactttggttctgattcattccctctctgatttctcatgccgactggctcccaaaagcttaaacttagttttcytgttcctggtgacttatcactcacccacccatagtctgttgccacctgggcctccagtgtaatattagtctgttatcacactgctaataaagacataccgagactgggtaatttataaaggaaagaggtttaatcgactcayagttctacatggctggggaggcctcacaatcatggcggaaagcaaaggaggagcaatgtcatgtcttaaatggcagcagkcaagagagcgtgtgcaggggaactcccattcataaaaacatcaaatcttgtgagatttattcactatcatgagaacagcatgggaaagacccactcccatgattcaattacctcccactgggtccctcccacaatgtgggaattatggaagctacaattcaaaatgagatttgggtgggcacatagcagcaaaccatatcagggttttactgttctagacctacaagttgtaaatcctatggctacttgactcttacgagcccattgcagcccttggacctcaagtcctccagagacacctgctttaaaattctctccatgatcagaaaccactccctgtattggatataatgctgatggtgacatttatgtatcatttaatgaagcaaatattttaagatcaagtacttaaatgatattattaaacaatgtttgatttaccatagaccagttagttatatacggttttttagaaagcccaaataccattgactgggtgtaaataaatgtgtagggaatgcattttaaaattagcatttattgataaagtaataatttttacttgcacacattgaagtaatatttgttgttttttttttttttttctagatgggagcatttgatttaccagttcggaggccatcatgaattaattgaatatgttatagctaaaggaaaactcatctataaaacatgatagatttgaaaagagaagactttttgactatatgaaataagtcaatatagttatattaaaagttaaaacaccttaatatttacaagaattatatcacttaaacctaaatgtacttcaatgtctttttaagtcactcaaaaaacccaagggatagatttattttcatttaacacatgcatttgacatataaacaggtaaacctattgtgattaaaatcacaaaacatccaattagttcacaaatattggttacaaatattctgtagattaatatggtggggtatcacaaaaatgcctttgtggggaaaagtaggcttggcttaaaatttccattttgtgtctgtatttcacatctcagtttttaaactatatttagtgaacattgagggatcgaaagaaatctaagtgatacgccccaatgaagctaaaatatagccttctgttaagcaaatagtatttcctttccccaagtagttcattttctagatgcttgtcaaatgaattaatgtcctctgatgaagagtgtccttccgtttctaaggtcttctcaatctcagcaatagagcttcccagcagcgttcaagacacatcatttatacacaggcacaggggccttcctgaaatgggtgcatttttaccaactamaatcatgtaatttttttggaaattttttaaaattttygattctttacattacaattgggtgaaacacattttacagctctcaataaatgtttgctgtcgctcttattgttgttgtttcctttcagcctggaagtagatcagcagcgttgtctattagagtttttaggaaattacaaaattatttgtaaagagtcgataattatttacatataaatgggtgtttttaaaagccatgtaagttgatttgaaatctttttaagtgtttcgatcatctttataatcacaactgcattaccaaacttggtaagaaatgatttgagaagtaaagattaactctccaagtgatcactaatttcagtttaatagagcctgaatgaatgaggctttgctgtagtcaatataaagcaactcaaaatgcccctcactggaaggttaagggtaacattgcacattgttgtcatcatgagaggtgacagcatgctggcagtcctcagagccctcgcttgctctcggcatctcctctgcctgggctcccactttggtggcatttgaggagcccttcagcccccctactgcactgtgggagcccttttctgggctggccaaggctggagcccactccttcagcttgcagtgaggtgtggagggagaggcgtgagcgggaacaggggctgcgtgcggcgcttgcgggccacctggagttccgggtgggcgtgggcttagcaggccccgcactcggagcagccggccagccctgctggccccgsgcaatgggggacttagcacgcgggccagtggctgcggagggtgtactgagtcccccagcagtgctggcccaccagcgctgtgctcgatttctcgccgggccttagctgccttcccacggggcagggctcgggacctgcagcccgccatgcctgagcctcccacccactccatgggctcctgtgcggcccgagcctccctgacgagcatcacccctgctccacggcgcccagtcccatcgaccacccaagggctgaggaatgcgagcccayggcgcaggactggcaggcagctccacctgcagccccggtgcgggatccactaggtgaagccagctgggctcctgagtctggtggggacttggagagtctttatatctagctcagggattgtaaatacaccaatcagcaccctgtgtttagctcaaggtttgtgagtgcaccaatcaacactctgtatctagctgctctggtgaggacgtggagagtcttttttttttttttttttttgagacggagtttcgctctgtcgcccaggctggagtgcagtggcgcaatctcgactcactgcaagctccgcctcccgggttcacgccattctcctgcctcagcctcccgtgtagctgggactacaggcgcgcgccaccatgcccggctaatttttgtatttttagtagagacggggtttcaccgtgttagccagggtggtctcgatctcctgacctcgtgatccgcccgtctcggcctcccaaagggagagtctttatgtctagctcagggattgtaaatacaccaatcggcactctgtatctagctcaaggtttgtaaatacaccaatcagcaccctgtgtttagctcaaggtttgtgaatgcaccaatcgacactctgtatctagctgctctggtggggccttggagaacctgggtgtggaaactgtatctaactaatctgatgggaatgtggagaacctttgtatctagctcagggattgtaaacgcaccaatcagcgccctgacaaaacaggccactcggctctaccaatcagcaggatgtgggtggggccagataagagaataaaagcaggctgcccgagccagcattggcaacccgctggggtccccttccacactgtggaagctttgttctttcgctctttgcaataaatcttgttactgctcactcgttgggtccacgctgcttttatgagctgtaacactcaccacgaagatctgcagcttcactcctgagctcagcaagaccacgagcccaccgggaggaacgaacaactccagacgcaccatcttaagagctgtaacactcagcgcgagtgtccgcggcttcattcttgaagtcagtgagaccaagaacccaccaattccggacacaatcacaatggggtctctggagctctgaacctcatgcgattatttaagaagtcttgagacagtgtagggggcacacagttgctgtgtgtgatggctcccctgtgaccagtcacctaggcactgaacatttggggcgcaggagatacacataaaagccaaaacggaatgttaggtcgagtcttccctggaactcaagcaacacaagattagattcttctattgaagaaacaagaaggagaagcacatctgatttttcatctaggaggcactcactttaaacaaatggcattcatgccttttttgaaagaagacagaaaaagacatctacccaaactgccctagtcctcccaggccagcgtgctgcaagcccgtgcaactgacggagtttgctaggaatgcagaacctctggctggacccagacctgctgagtccgaatctgcatgctaataagccccgggtgattcacatgcacattaaggtctgagcagctctgagttctaagccctaatcacaccaatcttcacactgttccttaggggacagtgagctgctcagggccatgcaatacggttccctctgcccagaatgctttccttctcttccttacatgggaaactggagctggacgcccttccccacattcccacatctctatgatagcctttgtagcattgtaatttaactgtcttttgtatgttagactaatgaagtctaccctctgggctgaaactaatgttctccaactattttttacatttacatttacatttacaatgtttacatttaataaattaatactctcaacaaaagtaagcaaaaaggcaaaatgagttgggagcagtggctcacgcctgttatcccagcactttgggaggccaagatatgtggatccctggaggtcaggagttcaagaccagcctgaccaacatggtgaaaccccatctctactaaaaatacaaaaattagccgggtgtgatggcgcatacccgtaattccagctactcggtaggctgaggcaggagaattgcttgaacgcaagaggcagaggtttgcagtgagctaaggtagcattattgcactacagcctgggtgacagagccgagactccatctcaaaaaaaaaaaaaaaaaaagcaaaatgaaccataaagagaaccataaagtttaataaaaagcaatccagtgaccagacccaaaaatcagacacaggtttaaagcagtatgaaatgtatactgcttttgaattttgccggttgtaatnnnnnnnnnnnnnnnnnnnnagatggagtctcactctgtcacccaggctggagtgcagtggcacgatcttggctcgctgcaacctctgccacccaggatcaagcaattctcctgcttcagcctcccgagtagctgggattacaggcacctgccacggtgcctggctaatttttgtaattttagtagagacagggtttcaccatcttggccagggtggttttgaaatcctgacctcgtgatccactcaccttggcctcccaaagtgctgggattacaggcatgagccactgcacccagcctgtgatgggattttatgcatgtggtagattgtcagatacaggcccatggatcacgtcaaatcacatgcccatgcccttgagtgttaccctcccaaattgactctgggcctggaacgtgactcgctttagccaacaggacattagcgaacgtggcacaacagggacttgaaaagcccttgttctttagggtttgcctcctccagctgccctgagacaacttgtgacaaagaccaggtgagcctgcggggctggggaggaaatcctgatacctccaactcttttgttgctagccaatgggaaaaagagtgtactgagtcaagcatattgttcttaaaacggttgacatctgtcaactgaatccttcagaagcttgattaactgctgttagaggcgcttaactttgctataaatacctaagaataaagcgacaccataaggcaattgagacttagtttattccatgtttcccttgaagttcccttgaaggcgtgtgctgtcagttactaatagagctgtgtagaaaactcagtgacaaagtgtcattttgacctggagggctgcaggggctgaaagaatccagcattccccaaactggagcgaagagcaccatgagaccactgggggttactggctcaatggcagcccacggatgacaatgcacaaacctcatttgtgtgtgttcacattttgacaaagaatagcaccaagaacaacctttaggtaaacagtctcctcagcacattttttgctccctgaattgctgtgggcagcagttttcacttcagtttccacctgacaggttgtaaatctaaagggtgaaaactctattgtgaaatccactgttcggcccattttagatggcaattaggtaggcaaggtggcaagtgtgtctgtcctcctctccaccagctgtggtttttagagccacggtttcagaccacttgaagggccttgcacatatatgcacacactggtgcaaagtcacagagcttagacttgggaagccaagaggtcatgtgacccatccttcatctggacagatacacttaagccatccctgaaggtcctttatcttctcggggaaaaaaatagatgcagtaatacactctagggctccatctgacctttatcaataggacttattttaatgattaccattacagaaaggaggttggttaatccccaaagattccttatctgtgaaatgaggaaggttacaataagaatgtgaatagagtactaacaccaaggaagtgaaaatactaacctcaaactcccatgtaagcatttgggggatacgtgtagtgataagtacaaaatacacagtttaataagagccacccaaatagcaatctttatattcattccttatctcctttgcacatgaaactccttgttggttttaatcacctctacaattaatagctgaagaccctattgactactctttactatgatccaattaatagaagaaaaaagcagcttaaggacaaattatgacttaaaatggttatttatgaaggcatattaaggcatatcatgcaaagtaaaattagccaaagaaagtcaactggtggagagcttgttgaagcaaatttaaaaaaaaaaaaaaaaaggttaacaaaagtctaatgtttttagaaaaaattgctatcaatctgtttccaaatttgaattcatctaatgctaagagtaaaaaacaggcacatacaattgtggttattcttctcacccttaagagtgagtggcctgttgaaactgttaagaaagaaagaaaagttttataatctgaaaatacctggtgggtcttgaaccacgacaacaggaacacagtgctgaatttagcaactataatactgccatcagcctaaccaacgtaggctttagaagaactgaatgatacaatggattgatctacctaggaaagttctcaggtctctccttcagcctagtattgctttgtgctaaactgactgccctctcatctgctacttcatgacaaagcccattaaaggtcctcagactccgggattttggtggatttcttgtgcagaaattgcagtgaaaaggctgttggagaaagaggtcttgattctggaatatgctccattctgtatttttcaatgtatggagcagctacttcccaaacctgaaaagcaaggacaaaacaaagttgaaatattgacgacattgtttccacatgctattaaacatcaacttcatccgaagtcaaaacatactctatacatgaccagacacagctgctgtttgcttgcttttattttaagccatttgacacatgacctgtgtcaattagtctttggttgcattaaagactgtaaatatacaaagtccaaaactttctaaagtcatcataaagattttaagctgcatacttttcctaagcaaaacaagcaagcaaataacaaaacccagagaattcagtgtggatagagtgaaggatagttgctccagggtcttaacagtacctatgtggtttttttcttgtttttttgt

SEQ ID NO: 95600 - DNA, 72555 bp, Homo sapiens
  misc_feature (1)...(72555): n = A,T,C or G
atgtacttcatcgtgtgagtgctgggagccttcccctgcggcatgcagtgatgtggcgctgggggaggggctgagcacgcagcctgaaagagcaacaggaaaagatggttggaagtgcgctcctcatcacaaatatgtgtcttcaatatttagttgttgtggcaggaaaacgccaacaaatacatgaactgtaaaccatctggcttgaaatatgttcaaatatgactgttcatcttgaaaaatgaaatctatggaattctggcatccactttgacttttgagagatgaacagcttggatatgcaaagaagggatttctagactagccttcttaaactttaaattttcctgaactcagaagttaaatgattcactgcctagaaaggaaaactttgctttcacttttacgctttcatgaaaaccactgactccttgaaaatccctgggactgtatctgtgtcttgtgtgtcaaaaagcagagaagtaaatgtggttctatatggattattaaatgtttattaagttctaatatgtgctagacgcaatataaaacacttaaagagcatgataatcctggctttcaccaaatttcaaaattgaacatttaaaactttcagaactgggggctgaattgtgccacttaatttgggttaaaaaatgatgaattagtcaactctgttctcttatgaactgggatcctcaggtaacctagcatcaacgccctaccagaaacagctatcccatcaactttgagaaaggttttaggtgacttgataaatggagagaagacatgcattgcaaacgtacgtaagcgatgatgaagttgagggtaggagaatgggaagggaaccaaacaggcattctgggcttagaccagaccaaaagcgactacaagaagaggaatggaggcagggatgtttttcccctgctgcttgatgttttaggagcatgaacaagactccaagagaacttagagattgaaacttactttcctccttctcttgttcacactattttcttttataaaagccacctcaatccaccttatctgaaggattctccctggaggctcttacctagatctcttcatgtatcaggagcccccagctgtgcaatttctaccacttgaggatagcctcacctttaaatgattcttcagccattgcacatgtacctgtggcctccccagctgcgttgtaagcttccaaatagagaagccagacctctaatacccgctgtgcctaggattgtgtgatgcaggcagtggactcagagagtatttgtttgagactgtgagagttggataaaggaaagaatcatgccacagatatgggggaaagcttcagtggttaatgtaaactaagtttgtgacgcaagccacttttaaatgatattaagagaatacagtgttttctgaaataaaagcctaatatacttaattcagcaaaggtaaaatactaatttaaattaattaaattttatttaaaaatcagatatatgttaatgtatggatttttttcttttgttcttcttttcctttaaaaatgaaatttaaccaacatataatttatctaatataattacataattatcacaataaacactcctcaaaataaccatgtaaggatctgggattatatgtgtttgcattttttcttttgttgccattaatgttcaccttagtacttaaatgtttataaatgctttaggaaaaggcaaaaacatatttcatgcttaggagagaataattttgcaatgctatttttatacgttatgaattctgctacatccacagggaaactagatcacaggaggcagcaacaaaatatactaggtgatcaatcttgctcttgaagatcaaagtatttatttgttaggtcaactgatcaactgaggaactaaaaataactaaaatataatagagcaaaaccagtcaaggaaagtagcatcgttagtgtagagtttgctttcacatacacaagcaattaacctgctttttgtaaatgtatttgttctgtttccctcctactttttccattatagtaggtttgttactggtgagatttacaagggaaaaagcccacatcatcttttgtggtgagctggaagagtcaacgaatatacccatttaattagaaagccagtagccacctcagaaacaaggcaaatttcacttcatttgttctgagaaaattctgagaaatgaagtgagcactacctattagtgatgaaaacaaataggtgaaaatagatcaaatctgaacatttatattgtttctgtagatttttgtacaattccctttctctttaaacacaaccccattaacttgggaatcatttcttagaaagtgattgagagtcttgatttcaactgtgatctgtacagattccttccatgaagtaaaaactgagattgacctctgggcatgatatgcctcccagaattttcaccaggtaaattaacaaataatgagagcaacctaataccttgtttataaaaactgagtgctcgtgtaaaggagcccgcaggtggaactgagttggacttttgtgtgtgacagaagacacggtatcatgagtcttaggaagtctgatcccaatattgcaaaacaatcattggtgtcatcaggttactcttaaaagtattaataaaaatagaaaagttgaaaaaaattatattcataaattatacaaaactgttgagctctgaatgaatttgaatataatttgaagtccacatatgattattcaatatgaatgaacatcattgcaaattttataaaaataaaatctatgaagaaaaatgcccaagttaaatcatgagctatacttccataatacaattgttaaccatctttgtatactgtaaatgaataatagctacactttaacataacataatgttctttacatattcaaaatgaggaataaagaaatcacatttagaaataaggatggagcatgtaaagattaatatttaaaactaaactttgttttatttttactgtaatactagaaatattctaagcaatgaacaaaaaagtgtgaccatagttttttttttttttgagacggagtctcactctgtcgcccaggctggattgcagtagcgtgatctcggctcactgcaacctctacctcccaggttcaagtgattctcctgcctcagcctcccgagtagctgggattacaggcatgtgccaccaagcccggctaatttttcgtgtgtgtatttttagtagagacggggtttcaccatgttagccaggatggtctcaatctcctgacctcgtgatctgcccgcctcgacctcccaaagtgctgggattacaggtgtgagccacagcgcccggccaaccctacattattattcagcaatataagtctctcctttgtaacactgtgtaaagaacacagaaggcaagaacatttcaactcttcctcacactcattgaatctaaaatagaagagatagtataaaattctagatgtattctctctgarttaatttttataacccaactgaataagacctctaagatatgtaaatcctaaacacttcagaaataacaaatcattttatcatggaagattattggcttaaagaaatgaatataaagactttacatcttttatattgctcacggttaaagaagctactaaagatatcttactaactgcactctaatctcaggtcaatgctgccaaaaatgcctatgctttcatatatttctacagtgaaaaaatccctaaaaaacgatgtctttccaagaagtcaatttactatattttttatgggccagtccaagacttctccaaaagaagcatcgtcttgtttacgtgtgagtgtgtttatgagtgtgtgtatgtattaggcagatgaggagtgaagggggaatgggaatgaccctacaaggtaggtgttattagtcccattaaactaatgtggaaaatgagaatcaaaagaggtaacacatcagagctgggtgacaagtagaaaactcacctgtttgtcaaaatacttaaccaggatgaatgaggaggcagaaggatcaaggggagaacacggggcagagccttctttgtggctttcacgggaagaaaggggcaagtttgtataatcaggggaggaggtttaagattggatagtttgaatagattctgcaggccctcggctacaggtgtggttggtctctcgtccagtacctggctctgaggtgatcaaaggcaggagaaaggttgattctatgtatgagagtttaatgaaagagagggttaggggtttggactgtgtttggtttgcatatcaaagacatgctcccaaaccagttgttttctatcactaggaatgagctaaccctaacttgagcagtttctccccaagactgcaagatcctcagatgtcaatgcaccccaaaatgcagaaaataaaaaacattattaatacaatagaataacatccatttttctgtaattcattggcattatgtagaaatagtgtacttaatcacacatagcaacatgtatttgtaattaaattcccataagttaaatgtcctatttacagcactgcaatttatatctgtatattcagtatgctttggtgcacaggtccatatattaatatttcataaaagagacagtataaggtaatggttagaaatgaagatgttacagtcaaagagaactgaattcaaatcccaaccacctatctactgcaagttatttcatttaagcttgtttccacatttctgtaacggggctcataatatcgacctgacagaatccatgtatgatttaactgacaatacttgaaaagtccttaacctaatagtacctgggtaaataaagataaatgaatattcacaattcttactcttaccaggtttttaacaggagagatttgattttccaaaattgattctcctcctattttcatcttgtctaaaaaatttaaaggaaatatttgggccaaaaccagccagaaaattgcttcagttaggacaattttgcctagcagagtagaattatggtcactatattgaacaactatgacttacacaaaatcagagatagacgaggcttcccgtgcagccactcctggggtgactggagtatgaaaggatatttgcacttgcctcatgggtgcaccaagtgtgattaatgacacgtattacatcagtcccacaaaaaagttcattttttatagtcacacttttagatttatatgagagttttctatcttatgttttttagaatctctttccaccatcttctgaaagacggtttaattcatgttcatttagcccacactctttgtcttctatagagagcttttttgaaagaggggaaaaggaattaaagaagtggaaaaaatatggctggttgcggtggctcacgcctgtaatcccagcactttgggaggtcaaggcaggtggatcacctgaggtcaggagttccagaccagcctggccaacatggcaaaaccccatcactactaaaaatgcaaaaattagccgggcgtgatggtgcacacctgtaatcccaactacccaggaggctgaggcagaagaatccgttaaacccagggggcagaggttgcagtgagcccagatcgtaccacttcactccagcctgggtaaaacagcaagattctgtctcaaaaaaaaaaaaaaaaagtggaaaaaataacaaatagagaaagagctttgctatatgcagccttcagcacttaggttatttctcagatttacataaagacttactatcatcttgactgcaatcatgtagaaaatgaacgggtataaagtacatgaggacaatttaataaaaccagctttcttttcttataaaatctctgacgaaaggaatcattagacagagacttgccttgtatttacccaggtcatgaggcatgtcagtgtggtgatgtgcctttggcaagaagtccttaattagaaattcctcgagagctgctccctgcaggtgcttcctatgacacaaagacaaaataatttactagggaagcccttactaacgacccaacatccagacacaggtgagggagaagaaatttcctgacagccgaagagcaacaagtatcatgatggggtgctggattttgaatgagggtctctccaccatattagtagtaagtatcatttttgttattcaactttaaatmtatagattgaatagtctttgatttttaggaaaacttgtataggaacgctaaatagcttgaagtattactctagttaaaagactaaaacttgttagaaaacattcagtagatgtatttaatttccccttatagaatcatgyaaagttgttttccgattgagctcatttttaattatttttaaagtcaagtagtttgtttttgcataatgtatgagtgtttctctaaatcaaatgaagtctttgaattagactatgaaattggaacttttctagagaactctcggagttgtttttaaagatttcttccttcttgacatcattgtcaagcaacgttgattaagaaggttttgtagtttcattaaatcacttaaagttgactcatatgtgtttaaaatctttttaataaaggtaataatgtattaccatcataatcctattaaaaactaatctatgagaaataaatatgtggagtaattctgattaatattgagaagctcttcattccactttaaaagaagaaccccaagtgattttgaatagagaaaaagcttgaaggtagtaatcattggttctctttcctttctactctagctctcatggctgggaataaatttttatctgtttattgacacgttctactggtatgaagaggaggagtctttccattacacacgagttattttgggtgtaagtacagtttatgattaaacattattttttcagaaaacaaaatgcattttattttccctggatccttgttttccctgaatctcttttttatgtctttacatgtggacagtcaacactggcttgggcacgagcatccgcactgtgcctgaattttaactgcatgctaattctaatacctgtcagtmgaaaccttatttcattcataagaggaacaagtattgtaagtactaaaatatctgaaataatctcaactgttacgacttcctcatataagtgccattgaaaaaaaatgtactttattatgaaattctcagtaattctgtttaaacttgggtttctttgttagagataacagaaaggctaagacagaaaaacggtaatcagtacatctatctgatttggctttggctgttgccattgatttcctacatgacactcaactcattgctaaacagtttcctgatatatttgccccatgaagatggaagcattataatagctggaaccatcattgtttctgactgaaagaagacagataagcttttgagacaaacgccamcaggaaacatctctctgggttctcacccacaaaagcataatcacagtacatagattttattatgtagattttaacctctaccaaacataatgggatatttctcaattatattgatttcactgtgttgggaacttacctgtgcttcctgtcaaacaaaatagcatgcagagaatgagaccttcaaaaacttttaccaggtaaaatactgtattatgcaggcatccctcattttattgcacttccccttattgttcttctcagatactatggtttttacaaattgaagacttctggcaaccctgtgtggagcaagtatactagcgccattttttccaataccatgtgctcactttgtgtctctgtgtcttttttagcaataaagtgttttttaattaaagcatgtactttttttagacataatgctattgcacacttaatagactacaggatggtataaatataacttttatatgcactgggaaatcaaaacttttgtgtgacttgctttattgcaatatttgctttattgcagtggtctgaaatcaaacccacaatatctccgaggtatgcctgtataatcatcatcatgattttatgaatatttatatatagatgcatatttgcctttgtatatgtaggaataatttncagactacctaaaacacatgaatgaggatgatggctattaccttaaatttttaaacaaagaagctgagtgaggcatgtattttggcaggcttattcaagagttttgaattataaacagagaactaataagtcaatcatttttgagttgagagttcagcaaagcaactaataaccttttgatttgcctgtttgactaatggccattaacttttgtgtcacatagccccactttaagcagtttagaggcagagcctgattcctactctcttaactttcatgagattgttttcactgcaatttttccataaatcaggcatatttttttgttactctagtgctgcagaggaccrtggaggaggcaattagacaaaaacctcagatttcacaaactggtcgcctatgggatagctgttaatgcaagtaagtacttattaattgctcaatggattttacaatatctgatgcctaacttcatagttttgttttaactctgccttccccaagtctcaccctcaggtaaaagaaaactttgccctttatctgaccctgtaaaccttacacaaatgggtttttacattttcaatttatacttacctatacgttttcccctaccaagacctcaattggtcaaagaaaagttggtgaaacttcatttgcgaatagttaagcttgttaataatacaataataaatacttacttgaaaaagggacactttgttattcaatataattcactttggaaataaaattgacctctgttcaaaatctcattcacagtcgtaggaaaatgactgtcaaatagtattgtgggcaataaaaaagaaaaaagaaaagaaagatcatgtgagccaagttctgaatcatagtgkggtaatggacataaaagggtcttgaaaagacatgaagctttatcggcatataaagtgttattgctattattatatttctaatttaagaggaaggcactagaaattagcacccaaggccaaggttaaactctgatgaggaagaaaggaggaggagcagtcatcaaccagcttgtggttttgctggaaaacaaagacattgaaataaaaggctatctgagcgataaggagttatgattcaggactgtttctctcaaactaatttaactataaaatgttttcctcatttgtttttatcctctcatgcataaaaaaaaaaagcagagtaaaaggaacactcaaaacaaatgtgaatttaattaagcaacaagacatgacagacggtgcccgagtgccaattaacacaactttgggggtgcagtgagacatgaggggaagatgctcccagtgactgtcttcaacgctggattaaaccaacctgagaactgctttgtaaaaggtctttgtggtttgttaggaaataagagtaaaaagacatcgtgtcctagagaaaaccagctcagagataaaggggaggaaataaggctggttcatctttgtattccaaggcccacagtagtgctgagtatgcgtaggcaccaataaccgttcatgaatgagcgaatgcatgaaggaataaagactcagggaaagaaattttggctcaggaatggaaatcttttccgcaccttgaaaattatctaaaattagaatgaagctcccctaagaatactgaattccccatcatgggtgatgtccaaacagagaccagatcgctccttgataggctcatcacagaagcaattcaaggaatctccaggcttcctttaaaatcttaaatagcttgatttctgcataacacagtaaaatggcaagaatattatcayaatacaatagctttaagacagacttgaactctaagagaaagttttaaagatattacagagagaagggggaaaaaaacagccagcatcaaaagacatcagaaaagaggccgggcatggtggtttacgcctataatcccagcactttgggaggctgaggcaggtgaattgcttgagctcagaagttcragaccagcctgggcaacatagtgaaagcccgtctctaccaaaaatccaaaaaatattagctgggcgtggtggtgcatgcctatagtcccagctacttgggaggctttggtgggaggatagcttgagcccaggaggcgaaggttgcagggagctaaaattgtgccactgcactccagcctgggcagcacagtgagaccccatctcaaaaagaaaaaaaaatacaacagaaaagaaagcaaagaataagaaaaatgtgttatgaaatagttttctccttaaacttttgggcatgtacatttctttatatgtaatcrtgtatcaataataccaatgcattagaaacgtataatgaatatcccccgtgttaaagataccctgaaagcagctataactttctgaaactagtgtggtcagggctgttttaggatggagtataatttagtataagcagctgttgactaaaatcaggtaaccaaattattttatacccctgctactgattggtagtgtgatatctgagaagttcctcatgctctttcttctgtggagttaaaagaatactaatacaggccrggcrtggtggctcacgcctgtaatcccagcactttgggaggccggggcgggtggattacctgagatcaggagttggagaccagcctgaccaacatggtgaaaccctgtctctactaaaaatgcaaaaattagccrggtatggtggttcatgcctgtaatcccaactacttgggaggctgaggaaggagaatcatctgaacccgggaggtggaggttgtagtgagccgagaatgccccattgtactccagcctgggcaataagagcaaaactctgtctcaaaaaaaaaaaaatttttcaatgagatgtgcagattattgtcaggatcagagttagttggaagtttgcagaatacagggttattcacttgytgctattgcaaataaaatcaaatccaaagcccttagcctgaccaagggctccaatgaccatgcatgtgccccctgcctgtgccccctgccacagtcttatctcctgccayatccccctggcttttccccttgggcacacccagctcctaggagttcctaagcattctgtgcctttgatccagggatcccctttgcctgaaatgctctgtcctcctcatggtgctaaatgggtgagatatggccatgcccaggactcatatcctggcctacctcccccagcgcagcctctgaggggtctaaggtcatactttctaccacagagtgaaattcattccccagaagctgatcacctccagggctgagcctgtgccttacgcctcttggctgccctggtccctggcgcacaggaggtcctcaagaaatttggtgaaaactgaggatgagtgagagccagcaggcaagagaggttgaaggaatcactgggaatggtacaggacacatatgcatgagttgttcagggagtcatgagcagtctggggtggactgaacagagtgtggggagggaaaagattcaaacaatgtcaattgtccaagataatacattcacattctgctgcaaccagagaaagcagggtgctctttctccctctttccctcacacatccctggagacaatcaagtgttctctccggcccccttcctcctgaaccccactgctttgccaggctcccagatatctcctggggctcccccagcagggtcagaactgcaacccagagcaaagtgcccctcatcccactcctccatggcgaccagcagagctgcggtgtttccactccctgcaaatgcaggaggctggggagaaagctctctgcttctcccaaaccctgacaaagcaattattacatttcacatgaacgaagaaatgcgtctggcaactgcgcttttgggaggaaaaaaaatgctaagccttggtttcatgcaaacacctctgcttttcacattttcttcttctggtagattcacttggragcagctgaaaatgtccctgcgcttattttattagcatcgcccattatgctgcatttcaaatagcctgctggcttaatagaggtgtgtaaccttggaaaaagtgcgaccacatcgaagtttgcatgccaacctctaatttctcatccgttcccctgtaagctgaactgcaggctttaattggtcaaatcattaaaggatgtaattagagactggtggaagaaggcgagggaggaggagggaagaggcaaaacaatggtatctgtaatcaaggacatcacggaaaatgcagtgacaggaactcttcttttggcttcctgccttcctgcttgtctgcctatgataagagctgccggagcattcttcaaccactaataaatcattttcagggacctataaccccatgggtataaaaatcatagtttcacagcctcttcgttcttattaatgcagatctttctggagtccctggtccacagcagaccttgaagacccttccaattgaaaagtagtactttgagctccagcttccatcaaggggtgtctaaatagtgacccaggcagctctccctggcagrgtcggcagcttgcttctgccaggttccaggagtgaacaattagccgagtgcagctcctgatgagttgctaaaattagtctacaaacatcaataaacataacaagggcagggtgagaggagagagcacagaataagggtgcccagaaaataaagatttggagacccaggcttgagaatagccctaaaggcacaaactcttcagtcctgacccctcaaggattgctcctaaccagttcccyctgaggctctgggagcttcagggaagctgcatccccagccctgcctgacaggatttaatgtgatttacaaatgcgtggcamacacagggtgccagagtcaacgatccttctacagaaatcagaccacaggtttaaaagtttgcagccaaattctggctgcagaagcagagccagaatctgtccctgggtccttgtttctgaaggctgcttaattaggaggtgactaactccaaaatgactgttatcactgacaggcaggcagaaagacagcaaggacagaccacacttccaagattccccccaattatgctcactttgatctcctgaaaaataaaatgaaagaaggaaggtaaaagaactttctcagggcaactggctctaatagtagcctttatgatttttttttttttttttttttggttcactcttcaatggaaagctccttatttgaactcagaagtccacataccaattaaatgcgcatgtgtagtgtttccaaaattgctgctctcttaaaagtactttggggagaacacaaaattgtagaaagatccagctatagcaccttttagcctggcacaattgagtgggttatggaaatgtgtgtcttgcggtcctccaagggcagagaagtgcgtactgtagaaagtccacagaggcccaggaagagctcccccgcatagctaatggcgttggatttactgcaagactgaagagccccaattaagccagagttggctttggaaacatgaaaacatgagctttgtgtttgcattacttccatattggtctacaaatccctttyagatgataaatatgctcccagttaacttcagagaaagacacaggagccacacagctggaagggggcttagataaccttgtttagtacaatctacccatttcacagatgggaaaaaaagggcctaaaagaagttaggtgactgagaagtatcctcttcagtattctttctgttacatactaatatcaaatctaataacatgaaatgatattgatgactaagggagggagaaatcaaaccatatcactgttttatcccacctctgtagcccttgtccctgtaacataaacagcatggctacttatatttttaaaagcctaaaatgtagaagggaaggaatagaaaatacaatgtctaaagaagaacaaaaatagtatctcccctggtgtctatcaagtcacaacaattctgaatttagcggttggtatatctttagctccaagccaagattgctgtaaaattaggatcagatctaagaggaaaataaaatgtttagacaaacaaaatcggcataagcagttttctctctgagaatgcctgagataaataaaatattccactttgtatgttctaccttgtgaaagaaaacaaaatggaggtagcgagagcaagggaacatgtaagacatgaactttaaagtgtgtgacaaatactggagagaatagtttttacaaattccctcagaagctgcctcttgaaaaccatctggggctttctcgtactccttcattagtttcttcagctctgttatgggagacctggcaacaagaataagtaaatagtttaatatctttgttcattcaatcaacatacttaaatttagtttaacagtgtcaaattctcatgtggaaatcaatctaacagaaaacaaattgcaatcaacaactcattacagagaagaagaacgttataaaatataaagccaggcgtggtggctcacgcctgtaatcccagcactttgggaggccaaggagggcagattgcctgagctcaggagtttgagaccagcctgggcagcatgatgaaaccccatctctactaaaaattagctkggcatggtggcgygtgcctgtaatcccagctacttagaggctgaggcagaagaattgcttgaacccgagaggcagagtttgcagttagctgagatcgcgccattgcactctggcctgggtgacagagggagactctgtctcaaaaaaaaaaaaaaagttataaaatataaaaacttatcctgcaaaaaagaagttataaaatataaaaaacgtatcctgccttctctttctgactatcatatatggattatgcaatggtaaacacatcagttaacttggtccgaagctcagtttctatttctgtaaattgggaacagcttcactccctgtctggagtgccctagtctatggagagagaattaaagaaagctaggaggagaggagtaagggtcaaggggcagaatataaaaggagcatttacaccaacctacaatgaggactccaaatgttgtgatcagccagaagccttagaaacggttggactctagattaaagacaccaggtaaaccattcagagttttatctaagcccatagaaaaaactagttttcaattaaaaatcaggtatgataattgctcattagtcaaacgaagcaatacagcttgatggtcaaaagatggggcaccgagtcacgcaaatcactaaaccactttcatcacgaatcaacagcaaattccttaactctttgaatactggtctgtcgaatgagaagaaggctgatacctgaggagggttaaatcaggtaatatgcctacagcatttacaacagtgtctgttgtatagtaaatattcaatatgtttgctatgagacgtactacctgctttttaaagacgtcgagataattatcagaaaacagcaattaggaatactggacaatgtttgtgttcaatttagcaaatagtttccattttgcatgtagcatattggaaaagactcctgctagataagcctttccagctttgtggatgctgaggctaaacaaggcagcaccttcatagacatggctgtatattttgacaaagcacctagggaggaaacatagtacttcgtgggtgctaacctctctgaagccataaggaagcagtaaacatcacgatgcggaaacactatcgagtgctttgccttcttgggtgagcctcaacctgaagtatatttgacttgattttcaacttaaaggctaaagaaaaatgtgcaatatatatatattatatatatatatatatatagcatatatatattatatatmtatagcatatatatattatatatctatagcatatatattatatatctatagcatatatataatatatatatatagcwtatatatatatatgtatatgtcagcagagaaaacactactccaacaaggttgtatttatagattgattttcckaccctttcattaccccttctacctttctttaatctcattgtcactaagcaaataattgtcaaatacaaactggtgctgaggtttcaaggatgaataaagtccatccttgagaagtcaaagttcatcaggggtgcagggataaatagatactgcaacagtaatatctgagaaatgctatggtcatactatcatttgtgctggtgaaattgaagaatgtgtgatagaagtcaacttttgaagtgagttgtaaggcatgmgtagaaaattttgcaaatcagaaaagggagtgatagcaggaactcaggtgacaaagaaaagaggttgcatagaagatagcatttctaaataaatctgctcctaggaccacagggaccaaaatgacacgaatattctcagaagttcttgctgtttctttttccccatcacatcttcttccacacctcaacccacaatgtacaaccacggaggatcccgtaactcactcacaacctgtatagactttatgatagtcataggccctgctacttctcactgtgggtgcagaagaaaagaagatatcaactgggaaattatctatacccygggcaatgaattctcatttcacacacgaatctgatcccaatggcagttatcaactggccacccagcgggagtttcatttgcaggaaaagcatcggtatgttgktgtctagctgtgactgctggcttcccaacagatttggaaagagcagcatcagacacagaatcctcaggccagacgatgctgggttcttaagcttgttctcttcatttagaatttagacaccaccaagtcccasaattagaaagctccatttacttcttaagaatatacagaaggtacatttagttccataaataatggcttatttcaatccaccagaaataacacatgcaaatttatgtgtgaatgtgtatgtgcaggggtatatatacatatagagtagtccctccttgtctgcggggtatacattccaagacccacagcagatgcctgaaacaggggatagtactgaccccgactgccatccatcagaacatgttccttttcatgtcttccacccacaaatgtaatgcttttttcatcataaataagcacttatcatgcattgtggctgtaacttttgcagtttgaggtgtgacagcgaaactagcacaaatgtcttttttcttcttcacaatttcagatagaagatttgttcttaccgtagatcttagcaacttccacatacagtttttttcctttccttattaagtagagaactttcaccttttcacttaaaggaagcacctgatggcttccctttggtgtagccgaattgccagcatcactacttttccgctttgaggccatttttaagtaaaataaggatgactcgcacacaaacactgggataccgtgacagttgatctgataaccaagagggctactggatatgctggacaaagggattattcacatcccaggtgggacagagcgggatggcatgagatttcatcatgctactcagaatggcatgcagtgtaaaacacaaattgcttattcctggaattttccattcaatattttctgattgtggttgacctcaggtaactgaaactggagaaagtgaaactttagactggggggactactgtatactaaaatgtggaaaggaataaacagaaaatagagtggctgaaagagaacaaaaacaatatctctcctggtatctatcatttacatyatatacatacatatcagcatgtataatgtacagtattctagaataatgctttccgatttcttaagaagttatatatacttgtttcttttagaattatttcatatataattatgctgagatatcataacatttattccacttccatgataactatacactttaaattatgatgaactgagatttactttatttattaatataacttaaataaatgtggagatttttgtacagtatcatatacatacatatcagcatgtataatgtacagtactctagaataatgctttccaatttcttaagaagttatatatcattatttcttttagaattatttcatatataattatgctgagatatcataacatttattccacttccatgataactatacactttatgatgaactgagatttactttatttattaatataacttaaataaatgtggagatttttgtacagtatctttggaagtattcaatccactccactcaaagcactgggaaagatgtgtaaatacatcacttttccttggagattacaaaaaccagaacagagaaacttgagcacagagacactgtattttttagtaactagggagaaagcaagccacagggtgcatgtttggtgtcatctccttgtcctagccatccacatcgtggcgcatttcttcaacctggaacgctaccactggagccagtccgaggaggcccagggacttctggccgcactttccaagctgggcaacacccctaacgagagctacctcaaccctgtccggaccttccccacagtgagttcctgcatgctaacaagcttctcccctgaaaaatccgtccttttccagtcctctaatcaggaacgctatattgaaaagcttttaataaaagagctggagaatgaatttatatgtgaatttgttttcaatttcacattttctaaaaagttatttttttctcattaatgttgctgggaagttatgagcaaggagaaaaagatatgtcacctaattaatttatatatatatacacacacacactagaaacgcagtaacctgttaaattcctaatattttaaaatttaacattttaaaagcagttcaggattagatattttttcactgatgttagactcataaagaaggtgaagtgccagctaaacacagagattataaattggatgtcttcattttcaatctgcagattgttttccggatctgttctccgaatgcctcatacattggcacatatgtgaatagctgctttgccaaatcagatactgggcaaagcagctaatttcataatgagacctgcatggccagtgacatcattaatgctaattacctgtgtgcacagactgtcagcagctatggggaacaaaaagaaaaccaaaaatgtagccacagcaatctatgttccgagatgaagacggtcgtctcccttaattcacccctacctctttctttgtggttgatctcagtttttttccacataccaccatattggcatatgtgtgcagcacgttgaccagactaaaaatatctttattgcccaagaaaagccgtaaggcaatacacttcagcaatgaaaatccctccattcttatccaggccatctctttaagtgaccatttccccatgcagccttatttaaagaacaaaaactcaaaatctggttttgggacacttgttcmatgtcatgtcccctaattagcctaagataattttcaatatcaggccattgatcaggtttagttgagctaccttttcttttattttttatttttatttatttattttttttgagacagagtctcactctgttgccagagctggagtgcagtggtgcgatcacggctcactgcaagctccgcctcccggattcacgctattctcctgcctcagcctcctgagtagctgggactataggcrcccgccaccacgcccagctaatttttgttatttttagtagagacggggtttcactgtgttagccaggatggtcttgatcgcctgacctcgtgatccrcccacctcggcctcccaaagtgctgggattacaggcgtgagccaccgcgctcggcttgagctaccttttcttagctgacagctattggaagcaaaaatttcacacttccgaatcagaactacagctgcccttatgagtggggatgcctttgtgtccgtccattgaatcacagcatttgtctaggcacctactgaggttgctgtttttccccactaagacgctggaaaatccattgctacacacactcaagaataaatctcaacattttgcatagtctatataataaatagtatttattaaaaatacttttcaagcaatgtgattatatatcttactagaaaaataataaagctactaccaatgcagtaatttcaaaattttagaagcaatatactatgtaagtactaattaagctcaggaaaccctctaatttagggtatttggagagagatgagtatcaataacacagagtgtacattatagagcatttttagagatgcagtgggattgttttggaggatacattgcaactgtaaccagtctataaatgtgttgcaagaaagagacatggcgatttgccttaataggcaaggaagaatgatgtgaaattagcatatcatatgatgtaaatggatttctaaaatgcctgaaggtacttgagaagaaaatattttaaatgtttgagacatacccctttcaattttatttccactctttgctctatgaagaaaaaatmatgaagaagtccctgtccgaattacctccagatctcaaagccgcccaaattaatgagattttactgacaaaagatatagtgagtttattgagctcatggccgtctcaacgatagtaacacaatgtatgaatactaatgacttggcaagaacatgggaaactcacaatgaaaataaactgctgtgtgatgctattctaaaaggctattttactgtcccttgcactcacaggtcagaattctggccgtttascmgtgtccaccagataagaatagctgtacctttattgatcacctaggatttaccaagccttattccaggcccccggagatggcgtgaaagaaatgcaagtcatggtctttccaattaaaaagcaagagcaaggaacaactaccaagggaactgagtgtgcagctgctttattaggaacgccccaagggacctctcaaaaaaatgtgtttattaatgttaaaatgcaattaagcatggtgatccacatagttattttgaagattaaaaacttaaaactcagatttattttgcaatattttatcttaaaatgctcttttcatgctgccctaatttcaattcaacataatcactttggttttttttttttttgttttttcttttttcccattttgttattgttgttgttgttttagacacagggtctcactctgtctcccaggctggaatgcagaggcagcatcacggctcattgcagcctcacactcctgggatcaagtgatcctcccatctcagcctactgagtagctgagactataggctcaaaccaccatgcccagcttttttttttwaatktatttatgtgggttttttttccagtataataactttgatgtgaaatgatatatacaaaaataaaaaaatgtgattgatgaaatggtattttacgaaattttagcaaagcaagtaaccaccgtaagctggtgggaagggggtggaagagtaagctcgcttcttgagttgcacctgcatcctcgctgaggctaacgtgcttctgagtgaaacattgtgaacggctccctgcttgaaatctcaagtactggtcctaaaaatgaaaaaaaaaaatatgccaggatatttaatgtcaaggtgtttttttttgtttgtttctttttttgttgttgttgttttttttagaacacaaccactgaattgctaaggacaatagcaggcgtcaccggtctggtgatctctctggctttagtcttgatcatgacctcgtcaactgagttcatcagacaggcctcctatgagttgttctggtacacacaccatgttttcatcgtcttctttctcagcctggccatccatgggacggggtaagtccatactgcgctcctctgcaaggattttatctctgagagtcccaaaataatcttagaaagtcctttagatgaaggagccggcgtgcggtgactacaggactcgtataatgtgtgaaaagcacattgactgtggcaaacgctttttcagtaacactgaaaataagctacatagatggtgaagtattatatttatttttcctctctgactctgttagtgagtcttggcatgtttataaaattcaggaatcctaatgaatgcaggatgacagtagatctatgtttcattcagtacctgttctgccatccaatttatgtgagattactcaggatatatatttttgacaccaagatttcacttctgcttaaccaaaaccgtcaactaggaaacccactgttcgggcagggacaatgtgtggcatgggcagtctggtgtggggtccagaagcagctctgacaccagttatcagagtgagcccttcaggtcctctgagcctcagtttccccatttgacctctaggaccccattttcctcagacatcccgtaaaacactgttctggtattcaatacctgcctgatatggttcatctcttcttcaggaagctagcatagcccctgatgtgttcaccctcaaatataatgcttttcaatcctttaaatattaataaatggccctggactaatacatcaattgctgtctgtgaactagcttgtccctttaattatttcaaaaactgattgcctttttttccattttacaattttcaaagcacattcatatacatgatcaacttgacccccacaacagtcctgtcatgtagagaaggtgctgctgtccccatttcataaagaggaaaaaggtgttctgagggttaagtgatgccctcaagrtcccatgatgaataaacagcagagtcagatccaggacgccagtctttagactatcaatcagacctttactctggtttgcaagcccctgaagaacaagtcttccattttagraattaaaccttcctcaacaccagcaagaatgtggccagcaatgttgctaatgccctttttggcttgccagcagcaactcctctgttcccgcaccacagaataccctcttccacccctcattctcccaccattgccaccgctgagcatggagggtcctgtcccggaggtggcctccgactctgcgcggacctggaagagcaagcgcatagctgcagagtggcatggcctaggaagtcacacctgccttggtgactctgggtcccatgtagggcccacagacaacgctttgggatttgcccttccacaagtcaacaacgcctccaatctccctcctcacccttaatgctcctgtcttctcagccccctacttctggaagggggtggcagttctgccgctgccactgcctgtgcctaagacttctcccgtggtccctcagctggtggacagaaacacattctccacggaagaagtgcccctgagggtgcattttaccctaaaagactgcctgtgcctctgctgagccttagtaaccgggtcagtccacattcacccgtactctgctgcctggctagaggctttccattctctttcagctagaggtctctgggattggctcttctgaatgtggaaatctcaacattcctttttgtacttgggatgggcaaggtggatggtgtgtagacccagtgtgttccaactcagagactgtcagtcctccctttctactgctgattctgcccccgacgccggggttgttaacccctgaagcacatttatgaggctatctataactcaggggaatctagaagccctattcacagacatgatgtgcttacccccctaaacatacgtcccccacatccacaccctggtgcattgtagaagcacaagagaatttcaatgggcagtgtttcgttggagatatttttgatatccaaataacatctcataagatgaaatttttagtcattttaacctagttgaaaagcttattttaggataagggcctcatttaatcttctcagtgtgaagtattctacagctactgtttacagcgaaagcaatttgcaaattctacacaaagtgccaagtgaaagtaggattattggaatgtgttaaggcccactaatcttcctattatgggatggcatagatgaagacatttcaaacgtttaaaatgtttaaaagatacagcatttgtggaatgatatgaggcttcttttagacactatggggaatgctgcctacagcctgagaatgaaagtgttaaagtatctggaatctttcctctgactctcacttactattcaccctgcctatgtctgggcatcatttgtacattggagatttacagatagtttttctcatctaactcagagggatgttatcaagtttggatggcttccataaaacagactgggacaaaagccaagatgtcagttctagctgacaccaggctgttttccaagggcrtattactgctccttcctcccatgccctgtgatataacaggggccacaccactccacaggctgtccaggacataagtctgtgtgatgctaaggtttctcagtctagagtagcatgtttctcaaaacagatcaatgcatttcattcacaaacacctaggaactgaacaattcccagattccctgaccttgatgtcttgggctttgctgtctgtgcaccaagaaggaaccctaggagcttgtaccaaagctacttgtcaaaggtcagtcaggagtgcactcatggcaaatataatatagcaggattataggactcttcgtccagtgctccggtcattaggactgccttctctttccattcctaaatgtatcaataccrtcttgaagacacactccattgtgacctgttttgactgagtcaaacactggcttgctggtggtcactaggaggaaaaataccattcttccggtattttgactccttcacttgaagacttctgagcattcagaaacaacccaaggagggtagaagttaaataaatctgcaaaagaaccaaatagtacaaagttagccaattagcccaaatcagcaatcagaacaagatgaaacctaattaaattcaacagtctacaaaaggatgtgttcaaacaatttcccttcattatgaattctctaatatagacactttcaatttaacacaggataccacagaggggcccttcttttctgggatcttcaaagttactcgaagcttcttaaatgcttatttttaaagaagctggggraaatgaatgacagcccgagtttcaagaactggaagtgatatttcagwgctcactgtaggatatatacctgtgggagaacaagactgctcaaaatcagtttgacgttttttgctttttgttttgttttgcttttcttaaataacaagtcggattgttcgaggccaaacccaagacagtctctctctgcacaacatcaccttctgtagagaccgctatgcagaatggcagacagtggcccaatgccccgtgcctcaattttctggcaaggaaccctcggtaagaatgaacccaggagcttttaaaaataaatgtcaccacagttaaaatacagagtttttataggcttggaaaaaagaaagcacatttcaccactagacaaagccaactctttattaagtgtgctaatggagaaatcaagttacagataatttttaaagaggtttactgccaaaagcactatgttcagctttgaaatgtattcttctacttacctttaaatactagtgtctgatatggtgggaattcataacagcacaatgatgtccctggaggagtcagccttgggcctcaccacccttctttgtgctccctgcatccttagccacctgtcctctgcataacttccatcccagtctgagaattactggcacccctgctcaaacctaggtcaatgaacagccaaatgaggctcagggcttctttataagcttgccttctttcttttgacaacttcaaggatcaaaaacttagtgtgtcaaacgcatttacttcttgttctaattaagctcctgtaactgaaataatgatgatgttagccaagaagatacttaattaatttgtgtagatgataatgtccacagatctgaaaagtcagatttcccgggtaggtggtaaccattacagttggtagcatagggaaagagaagtaatattcctatctggcctcttctggtatcttagaacagtgcaaatctttgggacaaccaagtgatgcttgaaagaaaataaatgcatctggcagataaacagtaggaggaaataagtgtccaaaaatacatcacttaaaacatggaataacagggtataatagtatacaaatgatgaagatttaggaaattaagtcatcaacatatgaagaatataagtgattgcgttgtttaaaaaaaaaaccctcaaatatattaaattaagcactggattttaagggtgaaagtactaggaggaatgattaaaaccgagagaaccggaatagatatgcccrttagactgtggttcttttaatggccggtatagattgtctctgtcttaaactcaactctcagtagccactatccaacctgcatattaatgaggaacatgaatacctctctaaaattttcagctacagcatctccataaaaaaatcaatactcccccacacctcatgaatacagaccagggcctgctcccagcagcgtttgccrgcattaattatcattaagagggggccttgctcatctctctctaactctcccctgctccacttccttgcacacccaaactcagggtgtcactctctcccattatttgtaatggatcctgattcaaagcgtgtgtgggctatgcaattaccgcttggctgaactgtacgatattctctctgatgtcttatagacactgaatccgaaaggcatcccaaggacaaggaagggttcctgcgcttcactgcaccacacctactcggtctctacaaagctccatttctcttcccttgcctctcttaactcagggcgttttcacggtgctctgatcaatagaatatgtatcatttctccttcagcggttcactgttcccagtgttaggacagataacgytttgtacctcacctcgtgtaaatggaactgattaaagaaaccaactatacccggcagtccctcctcccctacttgtcttacgtggaaaatatcagagaccaggtctgatttgacatcaccaaaatgaagtgtgtgatgccccaaactctctaaaatgggtggggaagattatttgtaaaaatatatgaagactgagtgtctttgccaatatctcttctggcccatttagaaagaactgcattcttgctctcatttctgtaaacatccaaagcaattctcaaaaagctttctggttcattcaagcataagagacctaaggattcctttgctcggtccaaccccatccttcccagggacgcttcctacatttcccttactctgttcatcttcgcagcttgtctcagtctccctttccagcccaaatgcactgacaaatacaggactccagattcctggtttgctgctgatgcaatccagtctcaaaagatgcctggtcgtcctaggccggagaagcactttatgtcatttaaccacagcatcaactcatcgtaaccataaggctgacacttngtaattactagggaaagctgttagtggtaaaggagaaagccctgatggaggtagagtcaattcagcgaacttcaccgagtgcctaagtgcattgcttggcaatgcagtagacaggattcagacacgtgggacctgccccaggagatctgattgtctagaaaaagaggctattcataaacacacacataaaataaaatcaaagccagcatgttcttattttctggtaggaatgaaaaaccaggagtgaaagtgaaggaaacaagtttcwttattgctgcttttgaatcaacatcgttttatttctatcataaaatactcactgtagcgtgactttttgagcattttttgaagaagaagaaaagaaagccaagaagccacggagtattttagcattaaggaaacttagatactaaatagttcttccccattatttaatagctgaggaaattgaggtccaagcagtttcagtgtcttacccatggtcacaaaaagcattcccagtaaagccaccttaaagaaccagagcccctaactctgtggccatgaactttctcctccattcacagcattcactctaagtctctggcttccataaccgccattttgtcagcactctgctgctagctgctacaagtacatagccccaacgttctacttatctctgtgaataaagccaaagtgtttaagagcttggaggraactaaataataattttctccagctagttcccattttacaaaacaggacgttatgaacataataaatctcaagatgtgcctagtggcacagagtgaggggtggtggccccaaggccagaatccaggtcttcagacacccagcctagcatctactttgacacacggccctcttgctctgaatcaaggcctccttgtcttgattctctcttgtctgtcccgggtatcactgcaaggacagtttcctaatattcatccctggccatctctccctcaggccctgacttccaggggctccaggcacaacacaggtaacgacactggctacttcctcccggagcaaaggatatactaagattgagatggagtcggggattaatagcttrtattctcctacctgaaccatggaaagaaaaataatccattacattttatcaacgtggaaaatatcagagatcgtgtctgatttgacatcaccaaaatgaagtttgtgatgccccaaactctctaaaatgggtggggaagattatttgtaaaaatatatgaagactgagtgtctttgccagtatctcttttagcccatttagaaagaactgcattcttgctctcatttctataaacatccaaagcaattctcaaaaagctttctggttcattcaagcataagagacctaaggattcctttgctcggtccaaccccatctttcccagggacgcttcctagatttcccttactctgttcatcttcaccacctcatccacagcatagggggacaaaaggtttattctctttgctgttctgaacacattgctgggccctactgaggcagaaaaaataagtgggtcaaattgtgttgccttgtgttgcccccataggtctagcttttatgaggccaagagcccccccaggaaaaaaagcagagagggttgatgtaggtgagaagagggaccatgcgaagagacccagaaatcaacaaaaagcaatagacaaaacgagaaaggtgactcaaaggaagtaaaaataatgctaaaagacttgtgacccatcaacagaagagacagagccagatgactggtcagggagcactgagtaatgagtcaatcggggaggggtggtgaatgtctgagttctgaagaccgagacatccttcctgcccccaccccccgccccagatactattcaaggagtaaggtggtggatttagaaaacctaggaggaagtgtagggacatatgaaaaggcttgagttctggccctggctatctctggtccacctcagactctccaggcarctcagacccattcccagaatgtcaggattttccttcttttaattctaaaagaattagaggatattgaatgttcccaatacaaagaaataatcagtgtttgagatgatggatagagtaatttaccctgaccttatcatgatacattgtatgtatcaaaacatcactatgtacctcgtgaatatatacaattattatttgtctattgaaaacaataaaaattttaaaaagaaaaaaaagaattagagtagatttccaagagcatgcagtatcctaaaattcaatgagttcatgagtttctaatgttttggaaaacaagcctcagtatcaatttagcgctggacagaaaggaccacgataatatggcaatgcacatgggaggtagcctggggtcctggtaagaactcaggctgggtagtcaggcatacctgagttcacatctctacgaaacaccttcgtccctttatgaccttggacaatttggttgatctgactgagtcttaactccttcctctgtaaaatcaaggtaatacatatgcctcatgggattgttcagtacaaatagaactcttcaaaaattgtaacttcccatttcttccctttcactgaggaagacaccttatgttgtacagagctcctgatacaatagcctgctggtaaattgatcatcagtaatgcacattatactcatcaaaagttaacatagcatctgatttgtttaaaatggacattttcaccatcacaattctctagacaattattgagccttttgctgtgattagataaacttaaatttaaggtgccaggaaattgactttatattttactccaaataactgtgtgtgtgtgtgtgtgtgtgtgtgtgtgtgtgtgtgtgtttctgtgtttattcaggcagaccctgtagttgtgatgcattcttggcccaaaaaattactatttgagattttaaaatgtaatttcttatgtcctgtgttgggtgagtaatgtagctttgactttggcttgagtttgggagcatttacgaccctatcatatgtaatataaacatcaatctgcttttttatttctttgcaaattcaattatttctaattacataaaggcatcattgatcaagtaagcataaaaaccaatatagaagagtttaatctcttaaataagcttgtagacttcaataaataattgaatgttatagtatataatacaaggagacatctttgttgctgataactggcccaaagttaaaggaaaaatatctaatccccatcatgttgtatattgatttggttcaaattgaaaatatttggattctattttcatttcctttttctctctctctctgctactctcttcaggcttggaaatggattttaggccctgtggtcttgtatgcatgtgaaagaataattaggttctggcgatttcaacaagaagttgtcattaccaaggtatgcatgtagctttatgtctgaataaaagcctgagtgtagatgaaaattttttattagcccaaatttttaatttgccatttttattgcagaactgtctgtaatttagaggctcatcttctgttctaataattgcttgtatcctgagcatcttttagtgtgrctaattttgctgaagacagggatcagggctccagacggcacacagaattctgataaaggtttattgtacagcactggaatgatctgctttgtctttattttgctttctctctagggggaaatgcaaggggagtgagtgtactttacatgggtcatagtgacttgaaggataatcacttcttcaccacgtaaaggcacaaattttgcaaacaaataacattttcaaatctatacactctcactggggactaccaagcagaggaaagggaaacagtcaccataaggttcagagcaagagggaccactgtggggaagaaaaatggagatgaaggatgaagatagagttctaccctcatgagcagcatgctcctggtagcatttttcagtcttgctccccatcctcacatctctacgtcctcacaatgtttacctcttgctggaggaagacgggaaggggtagaccaagaccaaaaaaatgcatgcctaggagagtgaaaaggtgccaaatactctcccccagcttttgaaatgtccaagaagaaactctccgttagccaagcctatcccactttgctaatacaattttaacagaatcctgtatctctgtagccgccttcatgaaagcagatgtatagaaattgcttcctatttctgctttaagctgtttctgtgttgctgtttttaagttaagcaccaaaggatgtcaggctgtatcaaaagctagactgtaaaacttctggaaacctactcgagctgttacgagggagaccatttaacagcaatgtcagaacagataccagtagggagagggaaaacttagaaccaatgatgaaaatgctgtgaaattctcttttgaacggaaaaatactgtcacagtatctagatgctagattttgttcccttatacctcttgtcacaaaagaagacaggagggcctggagagatttttcaggaaacaagattgaaatctaagaagggaaattagctctttccctctgataagcagtaagtcataaagcttttataaacactactagaaaccttgtccaatgcttccctacatctaaaactcagagcggagtcaggacacaggatgagactcaaccaaaaagaaaacaaaacaagaaaagagtttgaagtgagtttgaagattgtttttcacttagcctgaagaaataagagggttaattcacaagacattgagaaaagatgcagatcattgaaaaaggtaacaaaatgttcctagatgttaaaaacacagagataatgtggtgacttattttaataaccctaagcataataatatgcaagcttctactgtcttgggtctggttgactgtgctgtggaaagcctggccattggacacatggactcacatgctgggcaccaattgcacctgggtgcagctatttcaaatgccaccctctgaaggagaggagcatcattcttgctggagttgcaaacacagatgtgaaagcgatggcacatatctttgggagctaacagcagatgggatatgtaaattacacctgaaacaagctgatctaaaattttcaacacctttgatggaatgaaaggtgtttctttattatttygaggacaaaggcaaacaactctctcactctcacataggtggtaagccacccctctggagtcctggaacttcacatgaaaaagcgtggctttaaaatggcgccagggcagtacatcttggtgcagtgcccagccatatcttcgctggagtggcaccccttcacccttacctctgccccccargargactttttcagcgtgcacatccgggcagcaggagactggacagcagcgctactggaggcctttggggcagagggacaggccctccaggagccctggagcctgccaaggttcgtgcccatttctctcatgtataaattgcagtattataaaaagtaaggtatcttaatgtatcaacatgctacctgattcagcaatatctttattaaatggtgagtttgagactgtgtctaaatttgagaatgtgtgtaaaaagtataattttgtagacttctaggagacacacatctgttcctgtaaaaaaaaaaaaaaaraaagaaaaaargactaatgttcagccaagagagggtgatccaggaaggaggtttctcttccaggtcctaaagcatcacctggttacttctatgcagcctgcaatgagtgagacaactctgggcatttttttctatcacagtctgagttttttttattgtatttgtaaagtcaggtcttcataacaaggatgctatgtttctgtgtcctcttcttataaagacccaagtcrtattggatataagggcccataccactccagcatgacctcatcttagctttattcattatgtctgcaaccctatttctaaataaggtcacrtcctaagtactgaggttaggactttaacatatcaatgggggacacactcaacccacagcatcactctattcagaaaagtctgggctcacgcctgttatccgagcactttgggaagccaaggcgggcggatcacttgaggtcaggagtttgaggccagcctggccaacatggcaaaaccccatctctactaaaaatacaaaaattagccgggtgtggtggcacatgcctgtaatcccagctatytgggtggctgaggcaggagaattgcttgaacctgggaggcagaggttgcagtgagccgagatcgcgccactgcactccagcctgggtgacagagtgagaccttgtttcaaaaaagaagaaggaggaggaggaggaggaaagaaaaagaaaaagcctgggcacataacagaagtcccaaagtaaatgaccactcctcagctctgttcagtaaacaatggcttcgggtcaattcccactgttcatacagggttacccaaaagcatgcaaagcacacatttggggctctggaagaacagggacaccaaaaaaaatgagaaaaacatttttggaagaatttcatatttgaaaagaagcatcaagagattcctacttctgccatccttggagggtatcaggaactaccaagaagcagccactgtcatgagcactgtggtagggagctcggtagagacacttcaaatggaagttcctgagggcaggacattgtctttcctcctcggaatctccagtgcctacaacagtgtctgacatgcagtgcgtacagaggaaagatttgacaaaagaattaatgaagccctggggccaatatggattctttatctcatttagtttgacaaatatttattggtgacaaacaaggtaccacaataaatttgagacacaaaatgtagtcagcttattgtcctgctttccctgttttcgtaggctactgagctgtaactgcaccctgggcttggttgtatttagtgggtaggaagagtcacaggcctcctttcagacactggtcctgaagaatggtatgccaagccaagtagaagcatcatctgctcaagccagagccccaaatcagatgagaacacatgactattttcttttttataatggaaaggaagcaatgtaataaaattttaaggttcagagtgcagagcaaatgcctaaaatcaaaaakaaaagtagatgcactgcacagcacccccaccctcaccaacccccccagcacacacacacacacacacacacacacacatacacacacacacacacacrcacacgccacagtgtctaactgctttctcggtccctgctctccccttggcatcgccaaggcaaaagttttcatcctttttgctaactggcttctgccctgtgtgtatacacttatctgttctatcaaccacccttccccttcacaaaccagatagcatttcaaccagtcccccaagaagaactcagtactggttactcagtagctgacatgctttctgcctatggagtgcatcgccagctgcaagttccaacaggatccccagggcctccctgggctcatctgttccacctcctgctccctcatgggcttagctcttccagctttcttgttgttcacacacactgagaatgtagtcctcagtgcctttgccattgctgttccctccacctggaatgctgttccccacatctctgctgggcagctccctctcttccttcaggtctctgttcaaatgtccccttctagtgaggcctttgcttcccactgcacatgaaacaacccccagcagtcactcaatcgccatgatgccacatgctgactttatttttctttatagtacataccaccacctggcatgttaaatatttatatttgcttgattgtttactgtctatctctccacactagaatggaagctctatgagaaaagggsctctgtttgcttcactttaccatccacagggcctagaacaggccctgactgtcagtcactcagtaagtcattatgggctcgataaaaatgagtwgtcataaacagagctgcttccctccattcactaatttgtttcgccctctgcctctgtatgtgtgtaggcrtatgtattagtggcaaagccttccaaaaaactagaatttgtttaaatcttcaacatacaaagaatcaggatgttattggacttccttggatgattttacagttccccactgttttaattttgaattaaatcatattggggagagcactatatctttttactgctttggatcccagacaaatttaatccagcccctggaatttgtgagtgagatgcccaggaggggaagcaagcccaaaaaaagaacagggaaacctcttcctctaaacccaagaaaaagggagagaatgtgagctctttcaaaagactagaccttctgaaggaaaacagaggaatttctcagttgatggagtttccagctatcctttgcccagagctggggcccacactgtgagaggagctgggttcaaagcccaactttgtgtgtgatcttggagaatgtatgtaacacactgcctcagtttcctcatctgtacaatgaagatgacaataatagtactcatggctttgtttaggatcacacataacagtccataaaaacacttaacataatacttagcacacggtaagtgctcaaagagttagctactattattattaacaacataagaatggtcacctaccacagaaatagcaatggaagtgtttgttagaggagtaaatgcagtcagttcagagagctgagactggaacttaatggggtagggtggggtgctgctgaactacccagcaaggactcacaggacagggatgcaggcaagacaaatcattttctgagcctcattattagaaacgctgtgtctaaatcaaggcagggatagctgcataaacgtgataaacaagaatttgtgcaaatgaagctgattcagattgttaaaaatctggagaaatggagaaatttgggcccaaaaaagaacaactgggatgtcatgatagctatgttcaactatttaaaggcctgagatgccaaaaaggaaaaagatctggaatgtgcttctcagaaaggcaaaagatgagagttgtcagaagacagatttcagtaagacatgagaacaaattgtctaatatttagaattgcccctaagtggaacaaggtgccccgcagtttaacataggtatatgagcatctctcaggaatgtggcaggaggattactgtattagcagggaacttagaccaaatattttctcctgtagctttgagtttcaattctaaagatgtagaaatttgtttattgtatatttctgtggattaatttacaaaattcttcttgggatttaattgacatctttttaaatcagtgtcaaataaattcccaatatgactgattattttttaaaaatgaacagtaagacatttgaatctatggacaggttttctttctctctttctctcaatttcctttatgtaattatttatggaataatctacagtgggctaagatactaaccatttctggttaatgaccttttatttttattcttccatttccatatatcaatatgtaataaagccttattaattaagattaacttgaggagagttcatttgaattattaggaagtctggcatatagaataatttaaaataaacccaattgaactttcatgaacacatagtaaagctcaaatgggccaacctccggtgtcttcaacagacaccccttagggaatggttatgaataactcagaaaccttttaattagcatatctttgttcatatgtaaatgtgtgcttttggaatagttgaggttatttaatacattctgctgactgaaatattttaaacattccctttacaatttattcaaccaattgttattgaacaacttcatgtcagggagtgctgggattacagcagtgagcaaagacagccctgactcctactttcctagacctcacagctctacacagaaatcaatcagatcacgcatacacaccaataaattgtaaaattacagctgtgatgaggactatagaggagggaaacatggagctataaattatataagaggggatttaacctaatctgaggggttcaagaaggcttccacaggaaaggaatgattgggataagacctaccagagaaataactattaaccaactaaggagagagggaagraactggagaagatgccaggtgcagtggctcacgcctgtaatcccagcactttgggaggccgaggtgagcggatcatgaggtcaagagatcaagaccatcctggccaaaatggtcaaacctcgtctctatgaaaaatacaaaaaaattagctgggcgtggtggcacgtgcctacagtcccagctacttgggaggctgagtcagaagagtcgcttgaacccaggaggcaaaggttgcagagagcggagatcgcatcactgcactccagcctggtgacagagcaagactccatctcaaaaaaaaaaaaaaaagaaaaagaaaaagaaaagaacagaaactggagaagattattccaagggaaaatggtatcgcatgcaaaggccgtgtggcagtagggagtactgtgtatttaatattttaagaatattaatatctcaccagtgtgagaaccagtgatgagtgatggaaaagaactcagggaccagtctgcataggaccatgctaaggaccctcttatttattcaatgaatatactttatccttattaagaaaaatttgctaagcaaagaraaataccagtgctacccaaggcctaattaccacagattttgagtcagtataatctaaaataatgggttttagaagttccacataactgacaaatgacttcaaaattatatttattccaaatgaatagcttccattagactaaaattacataaacctactaagatgtgtgaccaaatgtaaacaggggagaatgacattaggaagaggaaatagaagcctgctaagcttccttgatgcttccagatttttccctctgatggcagctggggtggaaagggaaatagctcttccagcagcctcaatgatacttggagccaaaacaagcttctaagcgctgtaaggagagcatgccacatggacgaggcctgagctatagcgagagatgtcaggctttgtccttccatgaacagtgcctgggccaggacaacctcgttgtctcccaataaggcagagctggaaatcctcatgctaaccccaggctctccaaatagggcattttcaggcacagagtcaacctctgcatgcactggcaaacacgtcctgtaaaaagcaccagctccggatggttctgggttcacgagcaaggtgttctgaaggtcaaatagsctgcattcctctatgattccaggctggcagtggacgggccctttggaactgccctgacagatgtatttcactacccagtgtgtgtgtgcgttgccgcggggatcggagtcactcccttcgctgctcttctgaaatctatatggtacaaatgcagtgaggcacagaccccactgaagctgagcaaggtacggaaaaatcattagttcacccttccatggattaaaaggttcaatgtccttatatctatcatctgccgattcttggggrggattttaattaactatgagggataaactcaaggatccttaactatacttatgttcttaaaaatctccactcagtattacatttatgagtagggttatgtctaatcttgttaaagatgacaagacataaattttattgcttcattgccattacaggacwtgtaattgctcatctcagtaaaatatggacaggctgcaaatggctatgtgactgggtggcagttcgcaatattaagaggcaacctctccttagtctctttagcttcagactgtggttgcaagtgtacaattcgatgtcctcctctcgtggactcagtcctaacaagaagccacaattgggatttattggccggcttgctgtggggtggccatcccgctctgaatctcccttttgtcatttcctgtatgttttacaactagatgcctctagaatttctttccgtcctttgtcgtatctagacactccatccgatacttggaccctcttaggaccagcagcaggcactagagcaatggtaggcaaagagccctgataacccaaagccgtatgaatgcaggaggagtgaggatggcagacgagcttggtgctgggccgtcctgcatatcttctctgcttaaccctttgtccacagtgtcctcatctatcaaagggagacgcttgacttaaccaccaggtctcaatgtgtaaaccatgggacatctgtcacctgacatgatccactagagagaattccgtagtcaaaggaacttaagcaacgctcctgcaacatcccactctagaagacatcatccactagccattaaataagttctgcgggggtggggcgcagtagctcatgcctgtaaccccagcactttgggagattgaagtgggaggatcacttgaggccaggagtttgacrctagaccagcccgggccgcatagagagacatcatctctgcaagaaaattaaatattagggagttcaaagcagtgagccgtgatcgcaccactgcactccagcctgggcaacagagcgagactctgtctctaaaaraagttccgcagaaaagatcctcattcagttttgtttcatctatctttcccaagcttatttagcyacagaacctttcctcacctaacacctatcaagaattcgtattctgtgaagcatcccaggcaatgagggctagaagatctctaaactcgggtctctgccaactaagaaacagcagttaactatttcatgagtttccaagtgacaggtccttgacatacattttctcatttgaattttttaatctccccaacaaccttataaagtaagtaacacaaggcctgttttccaggtaaggaacctgaagcttggagagattaaattgattttcctgaaaagacatgggtaatcaaaggcagaatcaggattcaaacttaggttcatctggctctttccatgacaaaaccaacacatggtagacgtgacccccagctcctcctgcaaccctggagcaatattttaggaagacggtgggattcctgctcatagaatcggcacctgaattttgctgtcatcaaagaacatgcctgattccaccctgactgaaatactgcctgcagttcacctctctgagctgagtttcctgatccacataayggagaaataagaatccatatccaacagggagttttaatgctaaataagacaaataatatggaaatattaccatagaaatgtgtatacagaaatatagatgattatctaaatgctgattgtatctaccaaaggtataaataggttaccagtactgctattactaatggcctagatttatcaagcactgactacctaacaggaaggaaactgggcattttacatgcactatctcatgccatcttttcgtcatacttatcatttttattcccattttacagatgagaaaactaaggcctgatcacaaagctaatagaaatgacagtcattttactaaatgctcataatagctcattcagataggtaatattctcaatactgatgaggaccctgacacacagagagctaaataatactagaactagagtttgaatctagatccttctggcaccaaagctcatcttctttcctctacgccrtaatatatttaacaaagcaagcaaaacagtgactgggatatttggacctcacagcaatgctttgttttggttcgtgatgatttttcagccaccctaagttcttccttccctcttgcygcctaccaagtaaatcccactcagagaggtggctcactgcttcatggtttccacgacactaaaagtcacttcatgcttcacaggaagatggtggtggatagcgtgtctcattttcattcactcactaatccaactaatatttcaagtcctgctcagagacatgcaaagtctcattgtcattacacccgactcacaatcacctcccccttctcttaacctccaccactcctttgctgccctactgttatgtcacatatctttcctgtattaagattcgtgaaataatcttattttctctaacagactgtgagttccttgaacatagcttctctggatatcttcatacatatatatatatacacatacaacatgtgataactatatatatagtaaaaatattgaataaatcaatgagtgaataaatgtctacatgtccaaaaagaataaacaatggcttctgtacacaattttctttaaaatttaagggtattaaggttttgtttatgtaaccaaaaaaattcttcaatgatttttactaaattccaattattttactaggaatatagaggaaaaatcttataagaacccccaaaaattttaaaattcatacaggagcctacaaaatcttaattttgcctcctttctcagcattccattgtcattcctgggctctgcttgtggcgtttctcaaggctttcagcactgcagtcaccacaaaaccataaaatagggacattgatctctattccaagaaacagaaacagtagagtaaaaaatataaaagcaatgttttcatcgcttataaaaatgtgaggkactatttggacacgactcaggtgaaaataagggcagaaataatgtcatatgggagaaaggaagctaaagtgtggaatcataaaataacttaaaggtcctaatctcctagctttgcatwggaccatgaaagtcagtatctgcacctcgagcggagatgatttgtccaaagtcacccmgcttgttcaccactgagtcaggacctgagcatgtgtttctgatttctgcttcaaagttctttcatggaagaagtgaggttttcatgctattgaaagtttgggctgaaaattacagttcagatccaattccttaagcgtctgcaggcatgagaacaggtttaggaagyttctctcttttaaagcaactttgtgttggtttgagtatagctactattaggcttatgtaactaatatttgtcaggkctacctacatgcttttgagatataaagactactccttccactaaactgtcagagtctatataatttttgaagtgccacagagcaaagcagtacatatttatctaacggtgtcttcacaattttaagtctggactatagttttcagattgtcctcttttgtaataaggaaggaaaggacaactcgcataggcgttgagagccagaattttaagcttaaatggttaactgcgattaggtgggatttttttttcctccatgtgyaaaaacactggttggcataaggcatacatttttacacacaaaactcaagttgcaagtctataggaaaaaatgtgcaccaaagttttctcaattgtcaccrttgcaaactagaacttctttacccttctcctctgttgcattattctagaaaacttctaagtaaaatgcaggagcacaaccaataaggcgcctgccacttcctcagtgggaagcgtcataagtagtactttccatttgaagctgatgtcttaaaatmtctttgtttctaagtacttttgttttgaaagatctgggaggrggcggggagtggaaggggagggggaagaatgggcaggaggggatttcccaagaaggccaaataacaagaagtataatgatggcttgctgtgatgaaaatggaaaaaagttgtaatacatgaaagaaatattttcaacgcagaagtaagagccaaacttcactgagttgaaggcagctgagaacgctgtgcccctgtgggatgagggaaggctgagggtggttgagaattctctgtgatgcaatatggaggaagctgaatgctgggggtgaaaaatgccctctagcaataaagtcctccacctcctgcctaacgggtatgattaattctacatcacactcaatttgtgaaaagagctcttgaaaaaaaattaggacggtttgcttgtgcaaactgtcaaaatgatgaatgaaataggtgtgtatgaatggggagggagggggaggattgctgacataaatagattggcttacacattttagttctccctaatatcacagctgtgcagtcaggactgagacaactgccaactgcaagatgcggttcgttttcttaactgcatatgtagtcttcagactacgatacaacagattatacaagaactgagataatctcatttcttcataaattgtcttccttcatcagctccataatatataaccatgataatgggtatttatagtgtgtcccatgcaaaatggcctttgggttcttaacctaatataataaacagatmattcaaataaaaagacagcacgggccagtgggaacaagggaaagaggccaaaaaagacaaaaamtccatactctactaaaatatattaataaaacaaaggagggcctgctctcttttctagtgaatgaaaaatgcatttaatttaatctgtttactttgagaaattatttactttcactttccctcacactggagctctgactactcctggaactgatcatctctactaatcaccaagattcctgccatcagttggcctctttaggaggggccattcatgcttctsctaaagaaatgtatgcttcttgtctttcctcggagggcctcaaaaggcctcagtaccccrtcagccctcaccattgctctgtgcggaagtgaccagtattaatatgtttaatatcttggtttattaaccacagattgcgtgactacagtcttcttgcaaaagagtccaatgaaatacacaaacattttaaaatctcccttcacctccctccccaaactaaacacctccccaactttgctccctaagaaactcaccattaaacagttgaatatgtctcattccattccttttccatgcatttatatgcatatacctatacacattcatgcataaataggggtgtgtgtgtgtagaaggcagaggaagtgtaatttgttttgtttttcattaaagcataacttcgggcaccgtcagtgtcaatacctgatgatctatttcattttgtttggtgtctttagagtattccatagtgtggataggccacaatttatggaatcattctgctattaaataatgtttcaggccaggtgtggtggctcacacctgcaatcccagcattttgggaggtcgaggtgggcggaacacctgaggccaggagttggagaccagcctgaccaacatggcaaaaccccatctctactaaaaatacaaaaattagccgggcgtggtgtcaggtgcctgtaatcccagctactcgggaggctgaggcataagaattgcttgaacctgggaggtggaggttgcagtgaactgagattgcaccactgcactccagcctggaggatagcgcgagactccgtctcaaaaaaaaaaaaaaaaaaaaaaaagaatgtttcagatgtttcagttgtccaacaaggattattaactgtaattagaccaaacggaggcccaaaagagatcagtcctcagccacagggcgaagtagcaatatagtcatgaaatagttaacattgaggataatcacattcagaaaatgtcttaaggatgaaaaattattgacaaagcctggtcttggccttataatggttcaccagaaaaacaattttataactgtatcactttaaactagaacttttacacattaggtaggcttatcattaagaagaaatatttcttcttttatttcttcttatttgctattgtattaatccaggattcccttaacaaaaayaaaataaaaaccaggacaataagagtgatcatttattgaggaggtaatatattttctaaacaccagtctttatcttttcacagagagaaattctccttttggaaaatgatcctgattcccctctatgcagagcttctgtcatcctgctggtttcaagcttctgtctgttctgttctttcttttgcacagtgtggggtacagaggcgtgctgcccagcaggaggcaggtggcactgcaagccactgcccttctccttgaggaggcgatggtcaaggtgggcccctggctccctgtaaaacgcctctaggtgagtttagcacacaccgagcctggtgaggggcttccccttcatggagcacatcttcatgatgaatgctgagattctgcttctgacactggtgctagaggtcaagtttggcttcccttctcagtgaccaggagtgaccagtgggaacacatgccaagcaaggcgcatgtccctctttgctctataatatactgtcttcattcttcattctctaagctcctccaaatgacaaacaaggatagtaacaatagcagctaacatcttctgagcacttactgtgtctgccagacgttgcattaaatgcttcagtaaaacatatcctttcatcctcacaataacctcaggagctattgttctgtgtttattgccattttacatacgcagtaatctaggttggagttaaataacttttgcccagttgcacaagttatttgcaacttctacctgcatggtgaagccagcagcagtctaccacagcagatgggcttcataggctcacaacgctgagctgttgtaccatgctacactatatcctaaacctgtattcttgtgtacactttccttgtttagaggggttctgggccataaataaatacataggtaaataattttttttctgtttcattctctggaaatttattttggatataaagacatacagattgcatttgtgaaagtgccctctgcctgtgttcatggatatctattcaagatacggcacaagttttggagatgtaatcgcctgaaagcatccaactttgattagagagtctgagctctcatagtaacacagattggtagtgcttctcaattcattttctgaaactgtttatcaaaatttagcacagttccatttcctactggccccagacctctttgacctggtccctatgtgctgctgaagaattcttaaagagaagccttggcttgggaaaacatgaaaatgagaagggacacacagagagcccaaacttgtgactgtcgctcagacccaagccccttgcaaatggacatggctgagtttgggctgatcattagcgcttgggaatgatgtgaaactaaggtctatgacgggccacatgcacacagaaaccctcaacgccatgacagtcccagagtggtctcccaaaacatctaggcatccactatatctacaagaatgtggctgggcacgatggctcatgctggtaatcccagcgctttgggaggcygaggtgggtggatcacttgaggtsaggagttcgagaccagcatggccaacatggtgaaatcccatctctactaaaaaataaaaacttcgtcgtgcatggtggcacatgcctgtaatcccagctacttgggaagctgaggcaggagaatcacttgaacccgggaggtggaggttgcagtgagccaagatcccaccattgcactccagcctgggcaacagagagagactccctctcaaaaaaaaaaaaaaaaaaaaragraagaaaagaaaagaaaaaaaagtgttggatgagtcctgtaaaaaaaaataattttattactatgaaagttcagaacttttgttattttactgagaatgactttctatttaakaaaatcttttaaagtaaactcaggtatttttggtctctgagatcagctatgaaattctgaaaaggcatgctttctacaggtagctgatttcagggttgttttatttttggagactaaggtggggtgagcattggaaagcacagatcacagagttgtagcctattgtttgggatacttggtctctcattgaccaggtcctttctcatgggcgaaatgcagacttggaactcttatgtcccttcccagtgagtgtcccccaccattagaaagatgaaagaaagtcaaagtaaataccttttgcttctgttcaaagtccctttctttctttttctgcctgaaacacttctactgagcctatccatttttcctccatagcctcttacaccaaagctgcccagtgtcacttacaagtcaattacggrgrgaaaaacacacaaagccattacgaggaagcaaaaagtataaaaggcttgacaaaccctaaggacgctgacatgcagctaggccacgagaaagtaaggaaggatttctatttgaaaagataaagtttcatgtacggaggaagctaagatggggatagttttcaagaaaggacgactgggactagatttgaaattggaggatttttttataaagcaaatgttctggtttattatccatctatgaatgtgttttaagcatgttccttaaagaatgggaaagagagaaaataaatcaatgatatttgctctatgcccaatgccaactctgagatgaaacaggctaccaaggccagggaggagggggtcrtgcataggtgagcactgcattaattcagccagtagatttttcatttccacccagagcaaagcaaggcaaaatgaaagctaaggttttcaaagagtaatttrgattaggcacaatacaaagcgaaaagaaagcagatagtggtattcatcaccaacctcgaatataaaatccacccctaactggyctcctttcctcctcccycaccctccataccctgggtctattctcaatacagcagccagagagatcctgccacctgctgcgggccatggaactccctgctcgccaactccctgtgctttcctgtctctcggagggaaagtctacracggccccaaagccctacaacgccatggctcccccagccctcccctcgcccatctccttgctctccccaccctctctgggctccagccacacaggcctccaggctcttcctggaaaggtctcactcaggacctccgcacttcccaccatctgcatctgcacttcccacctaagcatttgactccctcaacttttccaggtctttgctccaatgtccccttctcatgaagaggggacatgaatctccacgaattgatggttcatgtccatccattactgattcaacaaatatgtgttgaatgcctcctatgtctccagactgttctactccctggaattataaaagtgaacacaagaggccaaaaacaagagagggctcattgagcccccgtttgaccattcaacttaatattgcaacacttctaacccgcctggggtttctgcatgcacttctcaccatctgacataacctatattctacttatctatcatcttccttctccctctaagatgcaaattttaagaggacagcaattttttttggccctgtcttgttcacttgtatagttccagagcacagaagagtctggacaggtaggaagcactcaatacatatttgttgaatcagtgaacggatggatgaacgtgagccccttgctcatggggattcagagggtgtcacaaagggaaccccggcttagctctgcctggagaggctgtgcagagatcatccctaggaagaaataagtgtcaggaaaggaaaggcaaccctctctcttcctgagaaaagcaggtcattgygcttagagactgagggattatttgtcctgaaattagtatcttaagtccccttgtgaacaggagctgtccaacaaatatgtgggcccagttyttgaaagaagaggycttattctcagcatcttttactcttacaaataattaatattataaagtcctgcctaaacatgaaragaatagacaagatgtttagctttgagataaacttttttatttttgtctcatgaatttgatctattcattaaatctcatttatatctctgattatatgatcgtgagcttacaagctggccggcagagagggagagaagagaacattgatcactggatgaggtatttccaggtggggatttaccaggcagcagctggaatcaagaccagccctcatggatattgttaagccatacagatgtctctttggggagaaggcacgagagagagaggtgtgggcagcaaggggtgggagtgtgagaaaaatgggagaattaatagatttatctcctgtggtttcttctagatgcaattatttgaaactcgcagcacaaaaactaagcttttattttagcaaacccaagctactttttgtcacatgccatttgcttaataccgagagttaaaaaaataattcttcccagtcrtaatttcattatagcagttgacacacaggcacagccgccacccaccagctttcttggacaccgatatgtttcactgagaggaaatttctggcctgtgtgacttgattctgaaattaccataatctccactctccagaggccgtagctagtgaagtggattagtgtccaagcctttggggtctctggagaagaaagttcaaatccagagcttaggtcataagtaaagatgaaggggttggtctaacggtttatccccctttgggagcagtgaaaggcacagctagttatgattattaatcttgttcagaagcagcacagccagaaatgtggtgagttgatcctcatccagagaaactggcacggcccacaggctcctgactctctgaattcactctgggctttttcaaacacattgtgaattttttcaaaagaaatcacagtgtgactgtttgttcactgacacacacaaaaaaaagcatgttattttgcagaagtgcccatttgggctcaaataatttaatggagataaagtagtctgtgattatcagcacatatgaaaagagaataratccgttcacttgccttctctcttgacaggtgtatttctactggatttgccgggatgcaagagcttttgagtggtttgctgatctcttactctccctggaaacacggatgagtgagcaggggaaaactcactttctgagttatcatatatttcttaccggctgggatgaaaatcaggtactgataagactctgagaataagcaatattgctgaactcatctaatagcaatgaggaacaatttcaataatgagctatgtagcactctgatagcatgacagaattatttttatgttcttaaaagggaaaggagaataaaataaaascagattagcaagagtgattcaagttgtaacaatcaaagaaccaaaaaaagaagctacagttaacttgctgaggaatagaaagggtcagacaatggaagacaatccagaggctggaaatcccaaacraatttgcatttgtccctttaaaagtgacatcaaatgaatattactgattggctgtatcatcttgttgagttcctgactggttctgtttctgtgccttgagctgttcagagctaagcaaaaaagattcctaggtgtttacattcaacattttgtattgtgaagtatgtgagcatctatagaaaataattattatgaatacatgatttgtccagagtttgttctcttaaggtgttcttagaaattgtgtgcacgtatgtttatttacctaagatgaagatgatcttttgttttggcaggtgttctgcagtatattgtattaatgaaatattaagattgaatttaccaaaaataatgtataccaaaatattgactatggtagtatttcaatgttgatactattgaatgataactactacattgtaatccattttaactcctcaaacaggggaattaamaacgaagtgattactaggttacacaatatatattctaatcagcagctattattgatatatacttttaaggaaagtgtatttgagcctgggagattgacattaatcactacatttacaaatgaatgctctgtgtatgtacatcacacatacacacacatgcgtgmrcacacacacacacacacacacactggccttatagaacatcactgtaatttgactctgcttctgcaaatgaataagactctgctagaaattcagtagcttaatgaatttttatggtcttatttgcagtccttcttaaatayttaatcctttgggataatttgaaatgtagctttcttgggaactaggcttgaaacatcttaatgaattatatagtgttaattatgttttccaaacaaacactttccttattcaagtgggatttttgactgatgaacagtttggtgaagtagagacagcttctgtcttctgctctcaagtactgtgcctgctcttctactctaaggtgcattgatcccagtgtgcacctaggtattccttgccaactgggagctgtgggactgaggttctcataactgagaactgaagttgatttggcgacaacacaatcctgccccctcccgtctctactacttccaagaatatgctataaaacatatattttttttctaaacacaagtagattaaaatagatgtcttacatttttgccatgacatgttgaaaattatttcgactcctaaatttcaggcagaaaaatcactaatttccacatttaaaggaaaaataattggtgcattctgtcrggaaagaatcaagaggctgttttagaaatacccaattgttaaactgaattcaacaacctcaaagtggcaaaatgacaagaacagaagggacagatggaagaggtattgtgaagggtaaatcaacagagtttggagactaattgaacattgggctgagaaatatgggacaaatatcattccaaatgtttgaacatcagtgattggcggtaccacaagtgtaagtagggaaggccctttttgtgtgtgaaatggtgcccgaacttctcagcaaggaccttaagacccttcccagcctgactcccactcactagctgtgtcccacccccatcggtttcctctggcaccagagccaccaaaggatgcgtgttcacccatcacactgtgcacagtcacacgtccatggctttgctcgttctctccccacayctggcgtgtcacttaacaccctctgccactgttccccaccttctttttgctcggagtcctataccccaactcttttccagcagtagctctgccacctggtgtcagacttgcctgctcacaacttcctacgacctggatttctttttatattttctttattttttagattcagagggtgcgtgtgcccatttgttacatgggtatagcgcatactggtggggttacccattacccaaacagtggatatcatacccagtaggttctttgtcaaccctcactcccttctcaccctcccccmcttttggagcccccagtgcctgttattcccatctttatgtccatgtgtgcccattgttgagctgctgcttgtaagtgagaatatagagtatttcgttttttgtttctgagttagttcacttargataatggcctccagctccacccatgttgctgcaaagaacatgatttcattctttttatggctgcatagtattccacagtatgtatataacacgttttctttgtccagtcaactgttgatggacactcaggttagttccatgattttgctattgtgagtactgctgtgatgaacatatgagtcttttttatataattggyctggatttctgagatctaacctaccattgtctcctracctgttgggacacttccactattttcagctgaacctccctagattcaactacttttttagactggagagaaggtcagccaggaaagtcaggcttacagtgggaacctggggcatgagttgcacccagcaagkttgttagccaaactggtcagggtcaggatgagtcagagggtgagaatgaatagagcaccacataggggtctaagggatgagcactgggaacacagatccccagaagtgagaagcaaggtagctaccagaatgcagaaggggctaaaataaatgacagcaacttaaaacatgatcatggccaggtgcagtggctcatgcctgtaatcccaacaatttgggaggccaaggcgggtggatcatgaggtcaggagatcgagaccatcccggctaacacagtgaaaccctgtctccaataaaaatacacacamaaaaaaaattagccaagcatggtggtacacacctgtagtcccagctactcgagaggctgaggcaggagaatcgcttgaactcaggaggtggagattgcagtgaaccgagatcacgccactgcactccagcctgggtgacacagcaaggctctgtctcaaaaaacacaaaaacatacaaacaaacaaaaacaaacaaacaaaaatgatcacaagggattatgctgtgggctgtcatttattgaccactagctacatgacgcctggatggagttgcttaattccaaggcaaatgattaggcacagatctccagccaagccgcctgccaggctctggccaccattttccgcctgccaggctccacatcctcccagcacttgaaactggacagtatacatcacaccgtttaaacccactaggcaggtctcattgtaagatgcagtttcttcccagacatttcataccactttaatctggcaatgcccttctcaactccccaggagccaatgttaagtgaaaggggatagcaggtagacattaattgttgaaaagtttggcaggaaaagaaggaagtcgtttagtgcttgctttctcttaaccacatttactatattactttcatccttttaaaggaaaatattctttctaggttaatgttattgcacatctactaggtataaagaggcacttggttccaacaaggcctgattcagacataaatgagatatgatgcttgccctaaagtgcagcattggagacatctgcaaatagtgataagcattgccagccctgtacacatttttaattaaatctacaaatgaacatgattactttattctttatttatagaagtcttattttttttttctaaatgtcatctaatgccacaaatttactttaggctcttcacatagctttacactgggacgaaaatactgacgtgattacaggcttaaagcagaagaccttctatgggaggcccaactggaacaatgagttcaagcagattgcctacaatcaccccaggtaaggcaagctcttgctcctctccctgccargctcttctctggagaaatgcaagggctgctggagtgaaaagttaatctgcagtaccgtatatctccattagagacaaaacatctaccttagaaaaggtgatcaatggtatatttcaggggccacaagcctctcctgaactggcttacaacctctgacagttattgattatgttgcaatttttcacacttaacctccatttaaagatggtatttcttcaactacatatgctttcaagacatctttggtgggtacagttgatctctaattacccaactggagaattcactcctgtccaactgtacactatctagcatgtctagcaaaagcagagagaaaatgttagaagacaaagcagggatttcgggtggtggttaagaacccagcatctggctgtaaatcctggttctgcctttaccattggttgaccttggacaggttatctaccctggtactgactctgtctcctcctctgcaaactgcagaaaataatagtgctttcctcctaagagtctgcaaggataaaattaatgaatgcatgtaagaggcttaaaacggtgctttgtatggagtttgcaagaagcactagctgctatcactgctattattatttttattatcgtttccattattactattattattatcattatataataaatttcaatatagaaaagcaagaatacttgttctggggtcacaaaactgaagtgaagcctgcacttcctggttctagaagttactggctgtgtgaccttggaagaggcagcttatttgagctttcgcaccccattgaaaaatatggatgataatatccattcacagtgttgttttcataacgtaaatatacttgtagtatggggcactaatgcaaacagttatcattgttatgatgtctcctaagtcagtctttgctttgaaccttcattgtctacggctcttaaaagtcggcatgtcctaatattgtcttcattaaagaacagttcccatatttgaggaaagatctgaaggcagtgaaggagtgtgccatgtgggcaactggagcatgtgccaaggccctgaggcaggagacatcattcctggcatgatcccagaacagaggaggtgagagggagagcagcaagagccatgctgtaggagaggtaacaaagacagctgcgagtcattgtaaaactttggattttattcacacaggggaaggcacttacaggtttgagcagtagagtgacgtgggatcactctgcaagagaatggaacgtgaggggcctgggacagaggtggagaggccagagaattcagcagtggtggcagtttggattagggagcagcagaggaggtgatgagaaatggttagattccggagtctttgcgggttgagctgaattgactatggatgggatgtgaggtgtgacccaagctattcaatagagtggaatccccacttaccatatggtgatgactttaagaggagcagctggttggcagacatggggtgtcaggagttcagtttgtgacatgtttagcttatgatgcctgtcatacatccacgtggaattttggagtgggcagatgaatataagaagcaaacgttcaggggagaatttcagccagaggtgtgagcacatggactgtttggagccgtgaaactggatgagatgaccagacaggcagatatagatggacaagagttccaagaactgcactgttggatggtcagggaacagacactgtattgacnggtcacagagtttaatacgtgacactcatatctgccttaataatcatgccccttgggtcttctataccctgaccttctttccatccactttctctgtattgcaccagtaagagtacattaaagcccactaaggtacctctgactgcttccatatccccggcgatgttcccattgtcttgcatccttcaaagcctcagtccttgcatttctgcctcgtgggcttcctgcagagacagcatgcttcattaaactctttgtacttccttcatatttgttctgcttcacagagtacttctctggtgaatattatttatcttatggtcattttggctgctcctttttaacatttttttcacactctttctgtaccagaaagatgccattttcttttttatcagttgtcatggaattcattagactccctggaccagctatttgaaggaggttaatgaggagggagatgtggaaggagtgatcaggtagctgtccaagattcataaccatctgattccagtcaccatcttgcctgtgaagttactcagacctcaactgccctgtgctctgtgagacccctgccaaccctctctgcaccctgcacccagcaacctgtagagaaacaggagtgtttacaccctgggaagagatggtttgaaggcatgcttgtggggattactcctgacccacattcagccagggagtaaaggctttccagcaggagaccccaagaaaagcatcactttgagcatagggttggggagggagggcgtggaccagctgcacaacctcacaatcttgctcttgccccacggggctcattctgatgcctcataagctgtggcagtggccttggagacttttccaggtgtcacttcctgacacctccttgctccattttgcttcttgccctgactcctgctgacatatggcctagaatccagttctggttctaccttctctccaaatgaggtgcttccaacccatcctggcttctgcagccacagaatccggttcctctgagctcctgctccacacccagccctggctccagggcccccagtgcttctgagtctaagtcaccacacccacctcacacccacccagaggagagacgagatcatttcatctgccatttccttgaaaagattgtaggtagaaactaacaaaatattaaaagcttatatgagaaaactcaaggggtttttgttgctattttctccttttgggaaaaaaaaaatatatatatatatatattcactgataaatgttttacgttcggttttcagtcatcatggaataaatgttctcacttcncaggcttttgacatggacatctatatcttggttttcagttcttctagatagtctcagtctttattaggattgtccctttttgacatctcatatggtgtttgtttgtttattatttatttatttatttatttatttttacacacaaagcttgcagcccagtgcggaaggcctttaaaaccaaactatttaattatctcccttccctcaaaaaggcatgagccaggaacacggagcatcaagagaccaaggataaaactgggtttgcacaaactctgcctagaaaattatgtaactcagtgctgagaagtgggcctgtccaattttttcgcagggagtaaagagtaatcagttttaaggtggcaaaactgtattaccatcactttccctgttgctcatacctttctagaagccataatcaaagtgaagtgcggaaacgtacttaatgctcaattgtattttgcagcacggtagctatgcaaactctctctccttgatggatgacttcatctcttccagagtagacgaggcccccaaggtttggaatcactgaatcaaacctctacagcatacttcccagtcccaaattttttaatatcatatttgtaatagccttagactctagaacatggtaacttgttatatagcttcaagcatccatgtcattaatattagacacatgaaggcaaagtcaatgattttgtccctggaatgccagatccctgggaaaagacaagccttcggtcaaaagcttagcaccaccctttcaaaaggcttttaaaatgacctccttaaaataattttgttttctgctgtgtaaaaggagatttatgtttaatgaagcttttaatgaagaaatctcggaaagagaatgccaataaaatctaatttttaaacaagaaaatctaatattgagaagtatttcaatatcctggcctttgtccagatgtaaatgaaacacacaatccaattactgttctgcacaaaggacaaagtaacattaattttcctcgggatggttattaaagagataaacagtatgttttccccttattatgtcaaggatatgtttgttcccaagcctgcctggctactcttacaagacggttctgtcctgtcgttagctcatatcttttggcaaagatgggtcagaagaaattggtggatttgttagtggcctcagaaaaggttctttgttcttgagggcctttgaagtaggctctcaaccatttctattcatcagcacgaagccgaggattctccggacttactctttcaaaaatatttacctgttcactcaaagctggagtttgttcttgttctaagaaggagttaaatcaaaagaataaagtgaagaggggcaaaaagattttttatagaacatgaaaaacaggaccaaaaataaagcttgaagggaagcagatcaaagagagtagtacaagctataaaggaaccagaaaattgcaaaaataacagtaatagagaaacaaattgatgggcatcaaaatgaatacaaataagggagagagaagaaaaattaaaaatagatcaaaggctgacagaaaatagaaaagtgtgttctattgtttttgtttgtaattaattttggtaattatattagctatattacaaaaacacaagtatagttttgaaagacagtcaacaaatattaagtggatgcattataagccttttattgatatattcaaattcacatgcatgtgaaaattgtatagtatttcagttagataaagcacagaaaagtactatgaaacaaaaacattaaaaattattctcccaattaaaatatagtaggctaattaaatacattcattgccatctatgtcttactaatcyagagaaaggtatctttttcaaaaatggaaactgtattgcattttttgtaaacattgtcaatacgttcacaagctttaggtaaatgttcagaaaatcaggaaaatatttccaagaaggtagacagaatgaaaataaaaataccgttgtcacatctagttacttttttgataaacacacattgtacggatactcagctttctgaatttgtggatcagttgcttttaattaattgaataaaataattttccataggccttaaatctttgatcttacccttcagataatatttgtagttttctacttttgacctatctgttaataacttcaccacgccttttaggtgtaaatttgatgtaattaattaccataaaaactttaaagtttggtcatttttttttttttttttgtaatttcagtagacgtatttcttttaactttgaagaaaaaaaaatagaagagtactaccatttgttagaacagtttaacccaacctaacgatgaagaaaggtgtcaacttaccatatgattgggggcttctaatccatattgcatgaatgtattttagaccaccyattgttttcagaaacgtgaaaatacctttatactaaattgagtaaatgtgtccatctggacccacatttgcttrtgtatgcacccttcaattctcatttgtatgtgcatatgtgcaaaatgttttaaaatgatatttttaagaaattagcattctgattatagcatacagggccctttatctaacaggatatcctaaacattcattatgtgactaaaatgttcagaatactcaaagaaatagacttaaatggaaatacaacacatgataagttacagcttcatgggaaaaataaagacaccataaacttatgatgaggaaattgtcagcatattcccatagttccttcccatgagagggcatcaatctctctggttagacccaagtgaagattcaataaaaattgctgaaattactccatttgtggtaggggggattggagagatgggtgagtacagggtggatttatcattatactgcaaaatttcttcaatggcattacctatctatcaaattattagtttgrcaaaatatttggttacttatgcatgaaggcatatatatgttactgttttattggggtggggaagggttggcaaaaatggctctaccattccctgggatcggatgctacaagtcakctgctttcatttttcttccccatttgaccataagcttctcaagggcttatagctataagcaactttatctatgcacctcagagcctagcaaaatggccagtatgtgcaagtggcagcaccatgagaccaatgagggagctgggacaagtgtccgaacagcacagttctggctgccaaagaaaacagagcctgtggagtgtgggcaggagcagaatcacaacagtgagcctggttagggacatctgcagcaactcatgagcaactgagtaattaggacacagagaaaagtaatgtcgtaggctgctacaaattaactgggagataggttaaaaaaaaaaaaaaagctggccagcacaattatcatctgcggttctgaaaaaagaaggtgttgtacaaaatataattatgtgatgaatcatttggaggcatttctaatgaaaaacactcactagaaaggattaaccagaagttgtgtccattgtctgatacagagtttgtagctctcatcttctttctaagcctccataaatccacgggaagcttctgtttatcgattttatttgcagaatgcactcagggtataaagtaatttgcttttttttaaatagggtttagggtctgcccctacarggttataacttaccaagcataaaagccaacacataaaaacaaacatacaatttaaggagagaagggctcacggcagcagaacctgggaattcagcgaggtggtgggatcactcccgggcgcacccacacgcccatatatctgctgggctgaaatctcctggtgggtgatattttggatgcctttcatgcatggcatcgctgaactgtttttgaaaaatgcaccaaccccacagagaagagcacaatagttatttagcagacatagagagggaaaggagaattttctttattgtttatcagagctaaaaataatgctgtgaatgttagccatctttgcagcttgtgtaaaatttgtccttttctcatcaaagtcagcagcccagactgatcaatgccattaacattgtccccgatccagctcccccatgcgtgtgcaagctctgtggcttgcaggctgtaaactgaagaatagcaccttgcgtttttatacttcttttkcggagaatctctatttaattccaagcgattgtgggtaattaaattttatagaagaattttttctttaccaaccccattagggttctgttgcacttgtccgttgcctcataaaagaaaaaaaaaaaagggaagctgccacatctgtcccttaaacacttggcttggattctctgccctgtgattcacagtatgcatttgtgacaagaagttctccatacttggagtcacaaatgccgagaagagtaagccaggcaaactgcttgtgctgtctgtggggacagtgatgcacagagagccagtgaagggctgacctttccaccttagcagaaggtagataataaatggcctttgtgagactttttggtgattgcatcaccacggcggatatggcccctgagtaaagtgtggacttagctgtgcagtgtgatagccacaacttcaaaagactcaggggagctgtgaactgctggggacaccaggagaacaccaggcagcagcaatcagaatcctttgaaatggagtcttaaaggcagagcatcaaagggcaccatcaggtctgcagttactgttgctgcaaacgaaagagcagtcttagcccattggagtgggccrgtgggcaatctctttggtgacatctacactaatggaaaaatatcaccacccataacagcatctttgaaaatagatgcaaggacacctctgggcatcagacacaaagcaaagctgtgactcctcactgggaagggtctygcctgatccatctaccattcaaaatgtttcagtccagagctcaaaaatctagtgctgatctcagtaagtctacataatcacctctgtgttaacaccccgcaccacctcttctgttcagcttcacggagcaggcagacaccaatagccatcgcgtgggaaaataatatcaggaagctagccattcctgagagcacaccatgtgccaagcacaggaccagcggccagacctgcaatgtcttgcttgatcctcacagagattctcggagctagattctataattctccccattttatagatgagaaactgggggctttgtgaaggtaattgacatgcccaaagttacccagcaacgaagtggtggagccaagagcactcttaaccattgccttttatttccataaacacctcaaaatctcttcattaagccataaactcatacctttccatgggaaatattttctgaaaaattactttctcaaatttagccatgggaatgatttctttgaaagtagtactgctacattttaaacatattgtcatttgtaaattaagccattgataagttcctttgaagctggagtttgaaatgcaggggaaccatcaatttctactgtggatgtgatggtcctggaacacacagttaaaatgtggctatgacacatggcagagaaccatgttaacatatgagctaagaagaactaggctmtataggcacttcccagcaagatccatgtctgaagaaacagagatggtatagtgagctggtcctgaagcccaaagaatgtcttgatgacagtgtttctcaaagtgaggctcacagggcgatctgcctcaacaccacccgagatcctcactaaacatgcattccttggattcgagcctaggaatctacatttcaacaatctgcctagatgattttatgcacagtaaagcttgagaacttttgatccacactagagtaactaattcagcttatactagagattggaaaaaatgctacaaagaatagtaatattcaagacaagagaaaaaagacatggtctctaaaaatctctatagagactgatgcaccccaacttccagaaacaactttgaaaccctgtgcagatgtggtgtttatatgtaggctaagttgcaaggcatttgagcagctctgggatagycactatatgcaaaaagtatctctctgacatagttttctgaaatgtcaagattagagatgacaacgtttgggtgactatattttcagcaatgtctttttcttttccagctctcccttctggccttctttgaaaattaaagtaattccaacaggagaaattaattaaattgctattactttagcattaattttattatctataaaaaggcagggctgaacaggatattagtgataactaacctttttaaaacccttttgaatgtattatctcatcttgcttttgataaaacatacaacgtagtccttatcatcttttccacatgcagaaactgaggtctagtgacttgcccaagaccacncagatactactcaggaaagccatttagtcattcattcagcaaatgtgtgttgattgtccactgtatgccaggcactgttccaggtgctggaataaaacagaccaggtttatgttctcaggaagttaacatctggtcacgtatccaagaagacrtgaatcaaggtcacctggccaaaaaggaggtcaagtccaggcattgtgtaagtggctgcaatcatataggtcagggattgggaaactcttcccataaggggccaaatagtaatcattttaggctctatggactgtatggtcccactctcaactactgaactctgccattgtaaagtgccaacattgcagggtgttgtatcaaaacccctcaacagtttcatggcccctttccagcctcagtcttcttggctccacctccctgattaatttaggggaggatgctgggaacctaggagagagcatggtgctgaaagtaggtagaaaaaaagaatytaagaaaaaacgacatggagggagaaaaataaataagtaaagccacaaccacttcattaatcttatcattgtcttggcttctggctggccttgcctcctggtgacattttatttccttttcttacccctactgcagcagcagtattggcgtgttcttctgtggacctaaagctctctcgaggacacttcaaaagatgtgccacttgtattcatcagctgaccccagaggtgttcatttctattacaacaaggagagcttctagactttggaggtcaagtccaggcattgtgtaagtggctgcaatcatacaggtcagggattgggaaactcttcccataaggggccaaacagtaatcattttaggctctatgcactgtatggtccgactctcaactactgaactctgccattgtaaagtgccaacattgccacaaacaataacgtcaatgaatgggcatagttgtgttccaataatattttactgatggacgctgaagtcacatttcatataattttcttataacatgaaatttttaaacattgtaaaagtcacttttcgcacatcgaccatccacacactcagggggcgagctggatttggcctgtgggctggagcttgctgacccctggcataggctgtctttcccaaacttgtttccattccctacattacatccaacacggagactcacgctgcttcttggcttgaagtctcctttagaaatcatttcaaattttcatttccctgatggcagagacacccaccttatatccaaacctgatcttttctgctttaaacttaagctccttttgtgcttttgttcatcctctgtagaccggagaaatcaccaatggaggttatctttcacaaaaatcctttagatacttgaaaatgataatcaaatcatccctttcctatcccttttctggtccaaacaatactaaatttttaaccttttggcctaggatatatattcaagcccttccatcatcttgttactctttttcaaattcaattccatctcttcacatccttttaaaatgcattgagaagcgtgactagtattgagcaaaagagggactttcttagagcttatatgccatatatttacaaataaattttatgttttcttttcttccttctttctgccttccttcctttctgtcttcctttcatatttctttctcaatctcttttaacaaatgcttgttattctaccacattttggtctgtggtcttcttaacacttatactcctactcaacttctgccccacaaaataactgagattttttttaattcccattgcgccagtctttctatactatgcagctattttactcccaagatgtttacaaagtaktcctcacatcttataattcttgctactaatattgattaattttttagaatttttctaatatttcaagattgttttgaagtttagccccagacactactactggtatgtagcttgtaatatctacatatttcactgataatatctcaaatcttttgtttaggttttcaatcaagttattgattccaaagaactccaccaggaattcctgtgacggcctgttgatatgagctcccagttgggaactggtgaataataattaactattgtgaacagtacactataccatacttccttagcttataaataacatgtcatatacaacagaacaaaaacatttactgaaattaaaatatattatgtttctcaaaggcttcttaactttgtggactgtcattctgccataaaagagaattaaattgatctgacatgatatgttttgacaaaggcagcctcttaagctctctaagtatttctaaattataaattgatcacttctttttctttatcctcagatttttatgttgacctgatgatttctatgatgatattgattttataagttaggaatattccattcatgtctaaaaaaattatttctactatctctgcattagaatttctcagtaacttgaggtattgcttgatgcatataactcaaactctactaatttgaatagaaccagtctttctgtgtaatcatttccccatttaagtttaattcaggctttgcaaccagaaatttctatagttaaatctaatctttactttagcaggatattaaatatattaaaattttttctcttggtcatgtttaattattacttttctttctctgtctacttgaaaataaaagtactttttgatcatctaattttgtctagtaaattagaatatacttgcccttaaacacagattttgccactttttttaagctccggggatgctgtttgcacccccttttgtgttttgacctttatgctacttccctgcatactatgtagaatcaaacctatccagacacaaaaaaatacagaagtcaataggtttctttaatgcagcaatgaccaaatagaaaatgtggaatttaaaaaatgaaatagttcttcaaaacagaaacaaaaatctggcaaacctgtaagttcatttaacaagaattatgcaacacgatttgataaataaacatgcaattcataggcagacattattaaatggatagaaatagcacgtttctaaatagaaatattaaacatactaaagttacaaatttgtccctaattaattaacagtcaagtgaaattccagtcaaattttaaattctctgtagattttttggaagggtaaatatcctaaagtttatctagaataatatctgagaaagagagatgccaaaaaaaatgtggaaaagaaaagaagaagagaagagaggagagaaagaagagaaaacaaaaagaacagaaaggaaaagaaaggaagcaaggcggtggggagtggggagggggaggaaggaaaatttcaaatccagaagcatcattgttaaataaaagaacttaaagcaaccagagaggaaaaggtcaattacctgcaaataaacagaagtatatctggcagctgccttctcaaaagcatccacagaaaccagatgataatgaaataatatcttcgaagtgctggggaaccataagtatccattgagaattttgtccgtagtgaaattattattcaaaggtgaaggcaaaatacagatatctccaaacaaaagaaaacagaaatgtaactacttcaccaaaataattacaaaaggatatatttaaggaaggaggaaagacaattagtggaatgcaatatgcaatgatgagcaaagacattgaaaaacattttggcaaaatctctaatcactgactgtaaaagaaaattaatgagtatttcagagggaatgttcttttaaaaacaaaactactttgtagggacatggacgaagctggaaaccatcattctcagcaagctatcgcaaggataaaaaaccaaacaccgcatgttctcactcataggtgggaattgaacagtgagaacacttggacacaggaaggggaacaacacacaccggggcctgttgtggggtggagggaagggggagggatagcattagaagatatacctaatgtaaatgactagttaatgggtgcagcacaccaacatggcacatgtatacatatgtaccaaacctgcacgttgtgcacatgtaccctaaaacttaaagtataataaaaataaataaataaatgaataaataaataaatacaaaaaaataaaaataaaacaaaactaaggatacggacaacaatatgaaagatggggagatgacactggaattaagtcattccaagatccatgcattgttcaggagggtgaaagcaatgttgattaaatgtaggctttattaagctttatacgtaaactaggaggggtaacctcacatggattcaatgcccaccgctattcctttcaacataacttctctattcttgagtttctattgagcctaagctactagtttgtttgactgtcaagcaatatgttttaagaagcgctaacaactgttatatttcctgatttaattcatactgatatttggctgaatttagtgttcttagaccatattttcttccttttattagtttgaagataggactctagcattttctgtcattgaatattgctgtggtgaagtaagaggccaaattcatcctctcccctttgtaagtaagttactttttttgcctggatgcctaaataattttatctttgaactttgtagcaatttgatattgatatttcacatgaatttttcctgtattgcagtggtttttttgtttttgtttttgtttttttgagatgctctgtcaaccaggctggggtgcagtggcgtgatctcggctcactgtaacctccgccctccaggtgcaagcaattctcctgcctcagcctcccgaatagctgggactacaggtgcacgccaccatgtccagctaattttttgtatttttagtagagacggggtttcaccacgttagccaggatggtctcaatctcctgacctcgtgatccacccaccttggcctcacaaagtgctgggattatgtgcccggcccagtgtgttttttgaacacttttttcttcacttcagaaatttttttattaggtctttaaatatacttctattgcttttgtttgcctcatttcaaaagcatcaattatccttctactggatcttttttttcttttttccattcttttagtatttctaattaatttaatctctttgtttcttttatttacatatcatttcccctattttatcactggcctaccatctctttctgaaacctttgaagccagatatgttttggaattcgaaataatttcatattttagaaaataacaaatgcatatcccatatattgtatgatactctcagtagagtctgggaagcacccagtattcaaaagcattaatgttttattttttcaaacaaaactataaatatagatattcaacttgcataaagaaagattataaatagcctcacatctgttcaggacacattatgacattatgctgccaagtggggttacaaacaaaaaagtactctcacttttcataattttttatatttttttgaatttcagattagggagagattatagtcctgaaaccagctttcagtgatatttattctgttccttactgtttaaaaaaatatttaatttgttccacaaagatgttgctttgagccttgatttgttaccttagaatgcaatatcccttgtgatctcattcttttttatagttttgtcttttatctctcttattaaattaatattctcattatgttctccatacataaacaaacagtgaagaattacctgagttatgatttctaccagattgagttgctttttcttctactacatggtattttccctttttgcctgtagtatctccacacttgctatatacatcacgtattttttttcaccttctcatgttagttgactctgcctagatatgttattggttcttctatattgtgataaatttgtggttgtttccctccaccccaccatctccaagaccatgtttctcccctcccccatagctttattgagatataatacacataccataaaattaacccacttcaaatgcatcatttcatcatttttagtatatttatagagttgtgtaaccattcccacagtaaattttagaacatttttatttatgcataatagatgtacatagttccagggtacatgtggtaatttaatacatacatataatttgcaaagatcaaataagtgtgtttgggatatccatcatcttaaatacttgtcttttccttttgatagaaccattcagattccactcctctatttcaaagtgtacaatacattattgtaaactatagttaccctactgatctgtctaacattaggtcttgtttagtctatcaaaccatatatttgtacccattaatcaacttctcttcattccccctccccgctacccttccccagcctctggtagccaccaatctactctctactttcattagacccacttttgtacctcccccatatgagtgagaacatgtggcttatttcacttaccataatgacctccggttccactgatgttgctgcaaatgacaggatttcattcatttttatggtaagattccattgtgtatatgtaccacattttctttatccaatcatctgttgatgaacacttgggttgatttcataatttcactgttgtgaagaacattttttttttgagatggagtctcactctgttgctctgtcgcccaggctggagtgcagtggtgcgatctcggctcactgcaacctctgcctcccaggttcaggcgattctcctgcctcagccacccgagtagctgggactataggcaaatgccaccatgcctggctaattttttgtattttagtggagacggggtttccccatgttgcccaagctggtctcaaattcctgagctcaggcagtccacctgcctcagcctcccaaagtgctgggattataggcatgagccgtgaagaacatttttatcattccaaaaagaaagtccatatccattagcagtcagtcttcatttctcctcaactgctgcccgccctaggcaaccactagccttctttctgtctctatggatttaactattctggacatttttatgtaaatgaaaacatacaataagtggtcttttgtgtttggcttcttccacctagcataatgttttcaataatcatccatgttatagcaagtattagtacttcattatttttgccaaactaatatatttcattgtatggttatgctgcactgtattaattcattcatcaattgatgaacattgagttgtttccactttggggccattatgaataatgcttttataaacactcatgtacaggtttttgtgaaccatgttttctcttctaaagccaggaatttcagtttttatccgcttttttgtagtctgagagaacagcagctggcatggagtgttgtgcagaagagcacagaagctcagcctgagtggtgtggagatacgttcaatttttcggttcctttctatcttctgagatgacatggactgtcctgtatctgagttcattccaactaatggagtagaggagagaggatataatgtatttccacaatgagatattcccaagctttgaaccctttccccaactgagtgtgaattttggattcttctctttcaacagagaaagttggctctcttgatttttttttctttattcatccatttaattcatactttcccaacattatatcttctctttacattccacaagcaagagttttaatgaaatttcttgggactttttgaccacctgtggggcttcagagaagtaaatgaggtagaagccaaaccatgtagctgctctccattctcttccagaatcctctgttccttctcttgagcacaagtttttgaatgtattagattacatttttcctttatcttgtctattggtggatgtgtgtgtgtgtgtgtgtgcacgtgtgtagagcaataactgtccagagttgaatgtccacaacattctctcttactacactcaactggattatctctacaactataactattttcaaggctcaccataacctccgtggtgtgaaattcaacttcgttttatttttggcagcaactgaaatggatgaccaatttttctgtcttgaaacacttccttcttttgacttctgtcaaaacaatctctttgtttttgtctcagactcctctatccaattt

SEQ ID NO: 95601 - DNA, 110354 bp, Homo sapiens
  misc_feature (1)...(110354): n = A,T,C or G
aggctgaggtgggtggatcacctgaggtcagaagttcgagaccaacctagccaacatggtgaaaccccgtctctactaaaaatacaaaaattagtagggtgcggttttgcacacctgtaatcctagctactcaggaagctgaggcaggagaatcacttgaatccaggaggcggagtttgcagtgagccgagatcacgtcattgcactccagcctgggcgaccagagtgaaactctgtctcaaagaaagaaagaaagaaaaaacaagtaatccagatcactctcctccgaaggcttttatttattgcaactaaatgaaattctgaactcttcactgtggtcaacagggtcctctgagatgacacctgcctgcctctcccacctccacttacagccgctttttcattaggctgtaatggagctgcccatccatgctgatctcctttctggcctttttattatttttttaaattttaaatttattttttattatttaaaaaaatgagacggctgggacttgcgggccgtgggggagagggtggggtgggtctcacgatgctgcccagactggcctcaaactcctgggctcaagaaatcctcctgcctcagcttcccaaagtgttggaataacaggcttgagccaccgcatcccaccccaccctttctagtctttctttgtagcagctgataattctcaattgagagtctttcctaccactgggctttagcagtaatcatttgctctgcctggaatgctcgtccccagaatcatcaaatggcatatcctgtttgtaatctcattctaattaaaatcttttcaaaggccttccctattttatctagaacagaccctattcctcagttgttcacacaccctattcatttccatcttatcacttatcataatccaatgctgattttttttttttttttggaaacagggtcttgctcttttgtccaggctggagtgcagtggtgtgatcatggctcactgcagtctcaacttcctgggctcaagggatcttcccacctcaaccctcctgaatagctgggactacaggcatgttctgccatgtctggttaattttttaattttttttttttagacgaagtctcgctcttgtcccccaggctagagtgcaatggtgcaatatcggctcactgcaacctctgccttctggtttcaagcgattctcctgcctcagcctcccgagtagctgggattacacgtgcctgccaccatgcctggctaatttttgtatttttagtagagacgggatttcaccatgttggccaggctggtctcgaactcctgacctcaggttatccacccgccccggcctcccaaagtactgggattataggcatgagccaccgcacccggacagtttttaaattttctgtagagatgcggcctcaccttgttgcttaggttggtctcgaaatcttgggctcaagagatctgactgcctcgacctccctaagtgttggtactacagtcgtgagctaccaggcctgaacaaatgttgaccttaatagttgtttacttctttttttttttgagatggagtctcactctgatctcagctcactgcaagctctgcctcccgggttcaagtgattcttgtgcctcagcctcccgagtagctggaattaaaggcatgtgccaccatgctcggctgatttttatatttttagtagagacagggtttctccatgttggccaggttggtctccaactcctgacctcaggtgatccactcacctcggccttccaaattgctgggattataggcgtgagccaccacgcctggctgttgtttactttttgactattctgtcccattagatgttactgtcatgaggtaggaacctggtcagtgtagtttacacctagaccttgagtcctaggattgtgtctagctcatagcagttgctcagtaaatgtttgttaaataaagcaatagttagacagttgggtgtgcaagcgttcattcaggcttgaggatcagccaggcactaaaatggtgagagaaggagacaaacagccaagtttgttgagggcgtatgaagagaagggttgtagtaatggactactctctaagctcagaagagaaggaagaggagaacaggaaggaaatgacagatagtaaaaaagtggtaaacagggctggacgcggtggctcatacctctaatcccagcactttgggaggccgaggtgggcagatcacgaggtcaggagattgagaccatccttgctaacatggtgaaaccccatctctaccaataatacaaaaaaaaagagccaggcatggtggcacgcgcctatagtcccagctactcgggaggctgaggcaggagaatcacttgaacccgggaggcggaggctgcagtgagccgagatcgcaccactgcactccagcctggttgacagagcgagactctgttttaaaaagaaaagaaaaaaaaaagtggtacacagaatggggtcttgttggtgtggaagagctgtgtggcgtgaacgctaaagccagtaagctggaaggataaggaatggtggtcagggtgcgtggcttgaaaccaagtactggggtgtggtggaattttgggtggcgagactgtcccacgggaacacggagaggccagctggtgggaagggaaggagaggaagtcaagtggtgagaggcaggggtaccggacgggtcattcatgtgggtaattaggtccccaaggtggagggctggagtagaatgaagagaagggctctgaggcaggaggaaaagtccatgatgaatgggtctgcaggtcacagcaccaaaggggagtggcaagtgctgcagctggatggcattaacctcaaaagcaagagggcccaggtgcagtggctcacgcgtgtaatcccagcactctgggaggccaaggcgggaggatcgcttgagaccagtttgagaccagcctaaccaacaaagcgagacccactccttggacttggtctgtcataccaatggcacccagtcacccgggtcaggagagtcacctgtggtgctccctgctctttcctatatcccatagatcaccaaggcctacatattctttgttttttcgttttttgttttttttgagacggagtttcactcttgttgcccaggctggagtgcaatggcacaatctcagctcacagcaacctccccttcccggattcaagcaattctcctgcttcggcctcccaagtagctgggattacaggcatgcaccatcacgcccggctaatttcgccttttttttttttttttttttgagacagagtcttgctctgtcgcccaggctggagtgcagtggtgcgatctcggctcactgcaacctctgccttctgggttcaagcgattctcttgcctcagcctcccaagcagctgggactactattagctggccaccacgcccagctaatttttgtatttttagtagagacggggtttcactatgttggtgaggctggtcttgacctcctgacctcgtgatccacctgccttggcctcccaaagtgctgggattataggagtgaaccactgccctaggccctaattttgtatttttaatagagacggggtttctccatgttggtcaggctggcctcgaactcctgacctcaggtgatctgcccgcctcggcctcccaaagtgcggggattacagacgtgagccacctcgcctggccaccaaggcctaaatattttatggacactccttaatccaagtcttagttactgccacaatctccataagggtctccaggctttaaaaatttttattaaaattttaaaatgtttattaaaaaaatattttgggctgggcatagtggctcatgcctgcaattccatcactttaggaggctgaggcgggtggatcacttgagcccaggagttcaagaccagcctggccaacatggtgaaactctgtctctaccgaaaatacaaaaattctccaggcatggtggcacaggcctgtaatccctgccactcaggaggctgaggcacgagaatcacttgaaccagggaggcagaggtgcagtgacctgagattgtgccactgtactccagcctgggcgacagagggagactgtttcaaaacaaaacaaaacacacttttttgtagcgatagggtcttgctctgtcacccaggctagtctccagctcctggcctcaagtgatcctcctgcgtggagtttccaaagagctgggattacagatgagagccaccacagcctgcagggcactggtcttgaccctccctccctcatcaattctctgcagccacagcaaaacattcaaaatgcaagtctgctatttttctactcctagttaaaacttttcaggggcctcccactgtttaaggattaggttcaatttctaaacctttatccagccctgatctttcaccagatttggaaattattacaaaaaataaatcttttttttttttttttttacaaaaaataaatcttaagaaactaggaataggccgggcacagtggcccttgcctataatcctagcattttgggaggctgaggcaggcggattgcctgagttcaggagttcgagaccagcctgggcaacatggtaaaaccccatctctactaaaatacgaaagaaaattagcctggcctggaggcatgcgcctgtagtcccagctactcaggagtctgaggcaggagaattgctttaactcgggaacctgagaggcggaggttgcagtgggccaagatcacgccactgcactccagcctgggcgacagaacaaggctgtctcaaaaaataaataaataaataaataaaataaaaaagaaagaaactaggaatagaagtaaatttccttgatttggtaaagtgaaatatcaaaatggtccctttggtctatttgatagggggcagtggttcacacttgtaatgctaacactttgggaggccgagttggaaggactgcttgaacccaggagtttgagaccagcctgggcaacacagagagacctctggcccccccctccttttttttttttttgtgagacggagtctctctctgtcggccatgctggagtgcagtggcaccatctcggctcactgcaatctctgcctcctaggttcaagcaattctcctttctcagcctccctggtagctgggagtacaggcgcctgccaccaggctgggctaatttttgtatttttagtagagaccaggtttcaccatgttggccaggatggtctcgaactcgtgacctcaggtgatctgcccacctcggcctctcaaagtgctgggattacaagcatgagccaccgcgccccgtcaaaccccccgatctctataaagcaaataaaaaaatagcagggcatggtggtgtgtacctgtaatcccagatactaaggagactcagatgggaggatcccttaagcccaggagttccaagctgcagtgagctatgatcactgcactccagcctgggcgacagagagaattgccgtccataaatgataataataacagggccggtctcggtggctcaataataatagggccggacgcggtggctttttttgtgcactcttcatgtaaagtgagttatcatcatatattgcctctattttgatgtttggttaaaatggggcacaccagtactaacttcggctttctaacaattcctacttcgcacaccatgtggcagtgttagatggcttttgggcgctcgccaaggactagacatctaccacttcttctggcctcttcgctcctatatccactgcttcaatccagaggctgtatttgaccctctgcgacctctttgtcatggcgtccgcggggcgtctaccagcggaggcttgggctggcagccgggcgtcgaccttcccaaaatggcggcggacgggacaactgcgctcaaggggcggggttccgccgccgggggcggggcgggaggccgaggggtcgggctagcgggcgggacgcttcccaagtcggcagtctcagcgcgcctgcgccgagcggccctgcgcgcagtgaggcagtggcgggggaaggcaccggtggggccgacgggcgggttgaaggagggaagcgggcgagcgaagtcccagtgcgcgccgcggcagcccgggcaccctccccttccgggcgtgagtcgctgtgaaaagagctgaagcgagcggactcgcaccggcagcgaggcgccgctcccgccgcctcagcccggccttcctcggctccggcgctccggtcgcggggcccgggttcctcggcacaccccgctccagccgcccccagagcctgtccccagcccttcggaagccccggcgccagcccgggccctcggcagggaggatgacggagctgcagtcggcactgctactgcgaagacagctggcaggtgagcaggcgggcggcggggcgccgggcccggccgcgatcgcggacagccgcagcccagtccctcttctcctcccgggccagcggccgtactgccgaaggggcccgggcctgcgagggtggggacctcgaggctccggtcccggccgggcccagccgttctcgcccggctcttggagggcactgggggcggggacgcgacccagctccggcccagggacggggcctggcgcccggggggtcggagaggagaagggcccctcccccaccgttctgtaggacgttgcgggggaggggctgtgtgcgggtccccaggccggggccgccagcttggaggggcgggtcccgggttcaggtgctgccggggccgccggaccttcggggccggctggagcgtccggacccagtgcggctgcgagtccccggctcggtgtctgagggcgggcggaagggaccggccctggcgggataggtgaggcgcacaaaacttctccccgggcggcgctgggtccgcggagttggggccgacaacaaaagcgctggcctcggcggcctccacgcgggcgcgagggtgccggagaccctggcggagtgcggatcgccgcctcgcctgcctccgcctggcacgggctccggctgcgccgcccggctgggggagggtaggagcgggccgcggggagagccgctcgctggccggctccgggctttgtgctcgccgcgattccggctgctgcgcaggcctgcaaaccccggagctgcgcccgcaggctctggcccggggcggcggccgggtcggcctccccgaggagcctgcggcccccctcccccattgtcccggcctccggccgtttgcggcttccaggttgactttttagggggttggctcctactctgctaggactgtgtgcgcggagcatgcgcagtggagacgtccgtgtgcggagtggaaggggggaggcgggttggtggcttcacaatgcagccccacgtgctgccagatttaaagagaaatgaaccagcacttacccctgctgtacaacacccggcgtgtgtcattctcagttcaagcgatcttccccctacccactctaaaaccagtagcctctagccctcagcagaagccaaagactggagtgatgaaatctgtttttgaaatacatttactaagagtttgaggtgttcgttaaatcacctttatggcttcttaaggaaaaggttgtcaggggttcttacagattgtataattgggtttattattagaccatgagcaagcaggtttggacaagtattaaagttctagatgctcagggggagttagcttgcagtaaatggagaagttctaatgatactacaggatactcataaaaattatgtgctggaaaagcactgaggccgggcgcgcggctcacgcctgtaatnnnnnnnnnnnnnnnnnnnnnnnnnnnnnnnnnnnnnnnnnnnnnnnnnnnnnnnnnnnnnnnnnnnnnnnnnnnnnnnnnnnnnnnnnnnnnnnnnnnnnnnnnnnnnnnnnnnnnnnnnnnnnnnnnnnnnnnnnnnnnnnnnnnnnnnnnnnnnnnnnnnnnnnnnnnnnnnnnnnnnnnnnnnnnnnnnnnnnnnnnnnnnnnnnnnnnnnnnnnnnnnnnnnnnnnnnnnnnnnnnnnnnnnnnnnnnnnnnnnnnnnnnnnnnnnnnnnnnnnnnnnnnnnnnnnnnnnnnnnnnnnnnnnnnnnnnnnnnnnnnnnnnnnnnnnnnnnnnnnnnnnnnnnnnnnnnnnnnnnnnnnnnnnnnnnnnnnnnnnnnnnnnnnnnnnnnnnnnnnnnnnnnnnnnnnnnnnnnnnnnnnnnnnnnnnnnnnnnnnnnnnnnnnnnnnnnnnnnnnnnnnnnnnnnnnnnnnnnnnnnnnnnnnnnnnnnnnnnnnnnnnnnnnnnnnnnnnnnnnttgactctagaggtccctttgaggcagagtctcactctattgcccaggctggagtggagttgcgcgatctcggctcactgcaacctctgcctcctgggttcaagtgattctcctgcctcagcctcccgagtagctgggattacaggcgcgcggcaccaagcttggctaattttttgtatttttagtagagatgggattttaccgtgctggctaggctggtcttgaactcctgacctggtgatccgcctgcctgggcctcccaaagtattgggattacaggcgtgagccaccgtgcccgtctgcatctttttttttttttttttttttgagacggagtcttactctgtygcccagctggagtgcagtggcgcaatctcggctcactgcaagctccgcctcccgggttcacgccattcccctgcctgagcttcccgagtagctgggactacaggcgcccgccaccacgcccggctaattttttgtattttcagtagagacggggtttcactgtgttagccaggatggtcttgatctcctgacctcgtgatccgcccgtctcagcctcccaaagtgctgggattacagacgtgagccaccgggcccggcctctctgaattcttacataatggaaaagataaacatttaaaaggtgtgaaagaagttatgcattactaagaaagtaaaataagataacaatgtcagcagcagcaatgtgtgaaaggatttcctatccgtttgtgaaccagctctagattttgatggtcatctggttccgttttgcacttttttttgacaatgtatatagcaaatattaataaaacgtcccaaagctctttcttaatgattgactttctgatggggcatactaaaatacactttaagatagaggagagaacaatttaatttgtattttttcaggcctcattgtaaagttacttagctgcagatttaagttttcctgccttcttgatcagaaacaatgggattgtttttaatttttttttaaaatttgaagcatgttaattaacatgctcaaaatgtacaaagtagtagggcaaggcaaatgaattttaattgaaatgtaaacatatcaaatttattggaaagattcgataactacacacagtgaaataaaagccttgttttattttatttttgagacagagttttactttgttgcccaaactggggtgcagtggcgagatcttggctgaygacaacttctgcctctgggttcaagtgattctcctgcctcggcctcagagttgctgggattacagaagccctccactgtgtctggccaatttttgtatttttagtagagacagggtttcaccatgttggccaggctggtctcgaactcctgacttcaggtgatccacccacctcggcctcccaaagtgctggaattacaagtgtgagccaccaccacctttcacccagactggagcgcagtgacataatctcagttcactgcaacctccgcctcccaggttcaagcgattctgctgccccctgcggcccccagtagctgagattacaggcatgtactaccacgccaggctaatttttgtataaaatttccaaaaacttaaaacaacaatggctacatttattgaacctctagtctgtcaatccttaaggatttaaattaattacttggtagaatatatcgggtatgttttgttgataacataatgaagaatctggttactttcagaattgaacaaaatggttccttgggttgtggagtgtctcagtcttggcgctactgacgttttgggttgagtattgttgtagggcctattctgtgcattatagatagaatgttcagcagcattcgtggccttcacccactagatgccagtagcatactcccttagttgtgacaaccataaatgtctccattgccaaatgtctcctgagggacaaaatcatcccagattgaagattactgagttaaaatgtttcagagaagaccattatggctaattgttaagcaaataaagacacctaacagattcatgaaatcagataggttgtgtatttctctgtggatattattagactatgacttactcctttgcaaattgagcggtggcaattcaagttttgcagtgccttatgttaaacactaaaaaatccctcagcacaggagatacttttaaaacattttatcttttgaaaaggtattataagcattggttaaaaatgcaaagagtacaaaaaaacatagtcttttcaccctggccataagttctttttgtggaagcaacccatcattgacaaatatgtcttttttttttttttttttttttgagacagtcttgctctgtcrcccaggctggattgcagtggcccaggctggaatgcagtggcacgatctccgctaagtgcaacctccgcctcgcgggttcaagcgtttcttgtgcctcagcctcccaagtagctgggattacaggtgtgtgccacgatgcccaggcttattttttgtatttttagtagagacagggtttttgccatgttggccaggctggtcttgaactcctgatctcaggtgattcacccgcctcagcttacgaaagtgctggaattacaggcatgagccatcatgcctggctgacaaatgtgtcttttcagagaggttcttgtatgtatgtttatataggctaacgtttactgaggactaacatgtaccaggcactgtgctgagtactttatatatttattttattttatttttatttttttgagacggagtctcactctgtcacccaggctggagtgcagtggtataatctcagctcactgcaatctctccctcctggattcaagggattatcttgcctcagtctctgtagtagctgggcttacaggtgctggccaccatgcccagctaatttttgtatttttagtagagatggggtttcaccatgttggccaggctggtcttgaactcctgacctcaagtgatctgcccaccttggcctcccaaagtgctgggattactggcgtgagccaccacccctggcctctattgcattttttttttcccaacacagagtcttgttctgtcacccagtctggagtgcagtggtgcgatcttggttcactgcaacctccgcctcctgagttcaagtgattctcctgctttagcctcccaagtagctgagattacaggtgtccaccaccacgcccagctaatttttgtagttttagttgagacagggtttcgccgtggtggccaggccgatcttgaactcctgacctcaggtgatctgcccaccttggccttccaaagtggtgggatttacaggcaggagccactgcgcccagcccgtctattgcatagatgtatattttttgagacggagcttcactcttgttgcccaggctgtagtgcaatggcatgatctaggctcaccacaacctccgcctccccaggttcaagtgattctcctacctcagcctccccagtagctgggattacaggcatgtgccactacacctggctaattttgtatttttagtagagatggggtttctccatgttggtcaggctggtcttgaactcccggtcttaggcgatctgcccgcctcagcctcccaaagtgctgggattacaggcgtgagccactgcgccgggccagttttattatatagtttgttaatacacattatatgttgtgatatttccatatatagttgtgaaattaggtgcatttatcattatttaatagagtggatctagggtggaaaatctgataatccagtgactatcattatattgttgccttttgacttccttttctcaggtgaagaatgtttgattgcactgtcaagatgagtttcaatccttcgcctcttttggtcttgggtacttcagtacaatttttttgttggcaggagggtacagtgtgggcattcctttgctttaagcaagtaaagtattaattaagcactcttttaatgagatcagtttgatttaggataaataatttggcatttcttaattattgaaaccttttttttagatttaaatttttgttagaatttagatgacctctaagggtgtgtctaatgttacctttcattggtttgtaggaaataacttttcagagaaggaagtgtgggcttatggaaacaaatctggcaaggtaaacatagtgtagttttatatggttaatagcatttcaggtacagaaaagtacaaatcagaaaaagcaaacattttccaaattttggtaatgaatatgaattattggtataaacagataaatgataaagaataaaatgtagtttcaggaaataagatatttaaatgttacaataaaacattctaaactttttccccctagtgcaagatagtattgggctaatttgagttaatcagcagtttttttttktttgtttttttttwttttttgagatggagccttgttctgtcgcccaggctggagtatagtggcgagatcttggctcactgcagcctctgcctcccgggttcaagtgattctcctgcctcagccttctgagtagctgggactacaggcacacgccaccacccctggatcatttttgtatttttagtagagatggagtttcaccatgttggccaggatggtctccttggcctgccttggcctcccaaagtgttgggattacaggcgtgagccatcgcgcccggtctaatcagaagtttttatcagtgctgttccattgatagattctggccctcatagaaacttctggaagaaatactgtactgtattgctgttgctgtagagatgtatacctctttttataaagttatgttctagatttgcaacaagttaatttttgtaagcggaaatattttattttaccttttatttaacctttatacccatgtccagtgacttagaaaaactgctattgctgtatctttgctttttttcctttagctattcttatttactcttctattggctagggatatgttaaaaatacaaaaaacaaagaccttaaatttttacctggcagctgtttgttgtttgtttgctttaatcttgtaaaacaagactgcttttaagtaagtttatcaaataggaatttttaaaaaagttctttatgtcaggagacacttttccttttatcaaataggaatttttaaaaaagttctttatgtcaggagacacttttcctttgcttttgaatgtacatgcattttaattacattatcatattcttatgtaaggtatatattttctagggtttctatgttaagacagagtaatgctaggcaaagagttctttttccttttttttttttaattttatttttttgagatggagtttcgctcttgttgcccaggcttaagtgcagtggcacgatctcggctcaccgcaacttcttgccacctgggttcaagcgattctcccactgcagcctcccgagtagctgagattacaggcatgggccaccacacccagctaattttgtatttttaatagagacagggtttctctatattagtcaggctggtcttgaactcctgacctcaggtgatccacctgcttcagcctcccaaagtgctgggattacaggcgtgagccacgcgcccagccaagttctttttcaacttgatgccaaaagcatgagccataaaaggaaatattagtaaactggacatcatgaaaattaagaatttttacctgattaaagactgttaagaggatgcaaagacaagctacaaactggaagaacatttgcaaatcacatatctggcaactgattgtatctagaatatttaaagaaccctcaacagtttaaaaaaaaaaagtcaattcaaaaaaatgggcaaaattagacaggtgtggtggctctcatctgtagtttcagctactagggaggcttgaataggagcatcgcttgagatggggattttgaggcggcagtgagctgtgacttcaccaccgctacactccagcctgggccacagagcaaggccctgcctaaaaaataagggcaaaagacaccaagaaacatttcactgaagaggacatacaaatagcaaacaagtgacaacatgttcaacattattagacatcagggaaatgcaaattgaaatcaccgtaagatatcactacttacctgttagaatagttaaaattaaaaaaactgtaacactaaatgctgccagggacttggagaaacttgaacttttatacattgctggtgggaatgtataattgtatatccactatagatagaaaacagcttgcttttttttttcttttttaagagacagggtctctctctctttgtgtctacatatatcttttaaaaattttttataaaaatagagatggggtcttgctgtgttgcccaggctggttttgaactcctgggctcaagcagtcctcctgtcttggcctcccagaatgttgggattacaggtgtgagccaccacatccagtctattttttttgttttttttgagacagagttccgctcttgttgcccaggctggagtgcagtggcgggatcttggctagattgtccttctttatgggtggtcttggcacctttgtataaaattcttgaaatgacagaattacagtgatggagaatagtggtgttcagggatttagggacatgagggatatgtggtatacagtaacatgagggatctttgtggtgatgaacagtcttgtatcttgatagtgattacacacatctgcaaatgtgataaaattgcatagagttatacacccacccaccccccccccccacacacacacacaaccgagtgatgacatctgaatacagtagtcctcccttatctgcatgggataaatactttccaagacctccaggggatgcctgaaaccactgatagtcctgaaccttgtgctttctcctatatatgcatacctatgataggatttaatttatgttagtctaacaacaataataacacagagcaatgataacaatatgccggcattactactcttgcactctggggccattattaagtaaaataagggttacttgaaaccaggcactgctaagtgataggcaggagggacagtgtgagatttcatcatgctacttagaacaacacaaaatttacaacttaggaattgtttattttttctgttattttccatttaatattttcagactgggcttgaccacaagtaattgaaaatgccgatggggcaggggtggggggactataaagtatatggattgcaccactgtcgatttcttgggtttgatattgtgctagagttatacagggtgttagcatttgggagaaactgggtaaaggttacaggaaacctttctgtacagttcccccttgtcctatgggactgtatttcagaataagaagtttttaaaaaaagtcacctgtaaccatgcattattatcaatcctttttcaaataaagaacttaatatttgtagttataaatacaactacatggttgctctattaacatgttcaaggaacaggaagttgaaatagagaaacctgtagtttaagacagaaattccgtcttaattttatttttttgttattatttttgagacaaagtcttgctgtgttgctcaggctggtcttgaactcctggactcaagcaatcctcttggcttggcctcccagagtgctgggattacaggcatgagccaccacgcacagctaccatcctaattttaaatagcagtcttcatttaaacttgtgtggttgcttggaaaatggaataaaggatcagcataaaagtttatttattgagcccttatatgccgttgtattgagatgctgcgggaacgcaaaggtaattgatgtgatatccctaccttgaggtgctacatttagtagcactatgtaaacaacgttttttatttatttatttatttaattttttttttgagacagtttcgctcttgtcgcccaggctgaagtgcagtagcaccatctcggctcactgcaacctctgnnnnnnnnnnnnnnnnnnnnnnnnnnnnnnnnnnnnnnnnnnnnnnnnnnnnnnnnnnnnnnnnnnnnnnnnnnnnnnnnnnnnnnnnnnnnnnnnnnnnnnnnnnnnnnnnnnnnnnnnnnnnnnnnnnnnnnnnnnnnnnnnnnnnnnnnnnnnnnnnnnnnnnnnnnnnnnnnnnnnnnnnnnnnnnnnnnnnnnnnnnnnnnnnnnnnnnnnnnnnnnnnnnnnnnnnnnnnnnnnnnnnnnnnnnnnnnnnnnnnnnnnnnnnnnnnnnnnnnnnnnnnnnnnnnnnnnnnnnnnnnnnnnnnnnnnnnnnnnnnnnnnnnnnnnnnnnnnnnnnnnnnnnnnnnnnnnnnnnnnnnnnnnnnnnnnnnnnnnnnnnnnnnnnnnnnnnnnnnnnnnnnnnnnnnnnnnnnnnnnnnnnnnnnnnnnnnnnnnnnnnnnnnnnnnnnnnnnnnnnnnnnnnnnnnnnnnnnnnnnnnnnnnnnnnnnnnnnnnnnnnnnnnnnnnnnnnnnnnnnnnnnnnnnnnnnnnnnnnnnnnnnnnnnnnnnnnnnnnnnnnnnnnnnnnnnnnnnnnnnnnnnnnnnnnnnnnnnnnnnnnnnnnnnnnnnnnnnnnnnnnnnnnnnnnnnnnnnnnnnnnnnnnnnnnnnnnnnnnnnnnnnnnnnnnnnnnnnnnnnnnnnnnnnnnnnnnnnnnnnnnnnnnnnnnnnnnnnnnnnnnnnnnnnnnnnnnnnnnnnnnnnnnnnnnnnnnnnnnnnnnnnnnnnnnnnnnnnnnnnnnnnnnnnnnnnnnnnnnnnnnnnnnnnnnnnnnnnnnnnnnnnnnnnnnnnnnnnnnnnnnnnnnnnnnnnnnnnnnnnnnnnnnnnnnnnnnnnnnnnnnnnnnaaatgaatttctaaggaaatagtctggcaggccgggcttagtgactcatgcctgtaatcccagagtgactcacgcctgtaatcccagaactttgggaggccgaggcaggtggatcacctgaggtcaggagtttgagataagccatggccaacatggtgaaaccccatttctactaagaatacaaaaattagctggtcgtggttgcacatgcctgtagtcccagttgcttgtgaggcaaatcacatcaaatctttgttttgttttgagacagggtcttgctctgttgtccggactagagtgcagtggcaacatcaaggcccgctgcaccctccacttcctcggctcaagcaatcctcctccctccctccctatagctgggactataggcatgcaccaccacacctggctaatttttccttttgataaagtcttgctctgtcacccaggctggagtgcagggatgtgatgatggcctactgcagcctcaatctcccagacccaagtgaacctcccaccttatctgcctccgtagctgggactacaggcacgcgccaccatgctcagcaaattaaaaaaaatttttttttggtagagacagggttttgccacgttgcccaggctggtcttgaactactgggttcaagcaatcctcccaccttgaaccatgtgtcaaatctttgccccagccaaatatttgaagtaaataaagaaattgggtaatttctccaatctaaccctcctaaatgctgatggagctggctagtagaaacagttttattttctgataaaactcgagccctttccttctcagccttctcagagtttattttttttcttttgggagttcttagtttcctttgagaatctagcaagagttaaaagacctcctgagaaaagcacacatgcataatttggtatgtaatttcggagggttctttgatctgtggagtgaagctcatttatgcagatctaatgctgtctcttaaatcagcaagtttgatgcccattttgtgtactattgggatgctgttttggtgtttcaggaacttgtagtctgtagaaaaataaaagttccataatacagctgctttagggttgttattacagaaaaagtcaagagaagctggcttctaccagtctggttcatggagggctttgaggaggagttcatggcacttgtgcttgacctttaaaagatctgtcaaatttgacacacagaaaaaggaaaatatttaaggctgagggaaaagaacaagcaagacaaagtttatgctgaaagaagttgtgtagttggagtatatgataaactgaactagtgggaaaactatctggaaaggttgacgtttgtggaagaccttaaaaatgctggggtaggccaggtgcagtgactcacacctgtaatcccagcactttgggaggccaaggcaggagaatctcttgaacccagaaggcagaggttgcagtgagctgagatcacgccactgcattccagcctgggtgactgagtgagactctgtctcaaaaaaaaaaaaaaaaaaaaaaatttgaccgggcacggtggctcacgcctgtattcccagcactttgggaggccgaggcaggtggatcacgaggtcaggagatcgagaccatcctggccaacacagtgaaacccgtctctactaaaaatacaaaaattagccgggtgtggtggcacgtgcctgtagtgccagctactcgggaggctgaggcaagagaatcgcttgaacccaggtgttcaagaacctcttgaacygaggttgcagtgagccaagatcgccactacactccagcctggtgacagaacaagactctgtctaaaaaaaaaaaaatgctggggtgtgacattatatgtgtgtgtgtgtgtgtgtgtatatatatatatatatcaacgaaactctatatatatatggggtttcgttgatcgacactagtttatattagttggtaatacaatatagctacttcaccacaatattatacacattcttcccccttcttacatatttttcttttccatttacttgtttaagcaagtgacacttgttgagacaccttcagtgtctcatcaaggtccttatttttctttcaaagtttttgttgttgttgttgttgttttcgagatggagtctcactctgtcgcccaggctggagtgcagtggcgtgatctcggctcaccgcagcctccgcctcctgggttcaagcaattctcctgcctcaacctcctgggtacgtgggactacaggcgcccgccaccacacctggctaattttttgtatttttagtagagacggggtttcactgtgttggccaggatggtctcgatctcctgacctcgtgatccgtccgtctcascctcctaaagtgctgggattacaggcgtgagccartgtacccggccacacccggctgatttttgtattttagtagagacggggtttctccgtgttgcccaggctgatcttgaactcctgagctcaggcagtctgcccgcctcggcctcccaaagtgctgggattacaggggtgagccaccatgcccggcctcatacaaaatatttttgaatgagctggattcaaacattttctctgtaggaatggtgaaaatgtcattatcaggaaaatgatctagctgtattatctataatacagccaccacgcccacccctgaagtattttctttaatgaacaactctgtcatgactatagcttttctgtataatttaaaaaattactacaaaaattaacattgttttcttcttggcttttcctcccacatctctgaagttcctgtctggtcctctgccctagcagccttaaatttcctacccagctttctgaccgtagtttccaaaagagaatactaagtttcacttatttgcaatagcagaaccaagacagctagacttcattaatcttcaaacttgtcatttaacaaagtttaggcctggtgcagtggctcacgcctgtaatcccagcactttgggagactaagacaggaggatcgcttgagcccgggagttggaggctgcagtgagccatgagtgcatcactgccctccagcctggttgacacagcaagaccccctcttagaaaaacaatgtttaaattagatctacatagagaatgaatataaaattaatgttgatacgatgatcccttttctacttaggtcctggggagcctgtggggtcatatgatcctttgattttgtcactttttttgaggatgtgtcaaatatatttaaaagacggagtttcaccatgttggccaggctggtctctaactcctcacctcacccgcctcagcctttcgaagtgctgggattgcaggcgtgagccactgcacctggccaagaccaccgcattttataccactgcacactgtctgttaaactctgaagtctttgtaacttttggaaggggaactaataactattggtgatggccgcatctggtattttgagtctgtttgccatcttttgggctttaggattctaaaactaaattacttatttaaggtttatatagagagaggagtgttattccgaggtcttccttgatactctttcaccctaggtaaacagaggattgtatttccctatttttttgtatttagcagtgcgtaaggtttatattatcctcattagtactttaggctgtgctaatttcttttttctgttcattcttttttcttcttttacttggcactgacaaagctcagaataatttctgattttcagactgctgtgaacatttatggtatgatagttcccctaggaaaatactgtatttttgctatcttctctggttatttctacatctctcccttaggatgacacctttgctcttcttctgccctgagcatttgccaaatggatacaacaaaattctcgttatccagtttggtttatatttaactcttgcaggtgcagcagtggcacagaygagggtattgtgttgcctgctaccctcttcagcctctaagccatatggcatggctattggggaagcaatatgactgtgataggatttttgtttttaaataaacctttttagaagagtttcagatacacagaagaactgtgagaatagtacagtgagttcttacataccctgcattcagtttctcttatttttaacctttyccccaccccccagcccccgtgagacagtctccctctgtcagccaggctcactgcaacctctgcctcctgggcagaggtgattctcctgtctcagagtcccgagtagctgggattacaggcacgcaccactacacctggctaaattttttttttttttttttgacgaagtcttgctctgtcgcccaggctggagtgcagtggtgagatctcgggtcactgcaagctctgcctcccgagttcacgccattctcctgcctcagcctcccgagtagctgggactacaggcgcctgccaccatgcccggctagtttttttgtatttttagtagaggcggggtttcaccatgttagccaggatggtctygacctcctgacctcgtgatctgccctcctcggcctcccaaagtgctgggattacagacgtgagccaacacgtccagcctcatactatttttaaatgagctggattcaaacattttctctgttggaatggcgaagacatcattatcaggaaaatgatatagctgcatcatctaagagtgatttaaatagataaattataacctaaataattacgtctaagttgctgggtgcacatttttacaattagtttaatttggagactgacactgttcagagccagatgttctctgaattctttattatttattttgaaatgttcaaggtgatacttagttttaactgccttgacagtgttcttttttgttttttttgagacagggtcttgctctgttgcccaggctggagtgcagtggcacaatctcagcttactgcagcctctgcctcccaggttcaagcaattctcccacctcagccacctgagtagctgggattacaggcgcaccaccatgctcagctaatttttgtatttttggtagagacgaggtttcaccatgttggccaggctggtcctaaactcctgacctcaggtgatccacccttctcagcctcccaaagtgctgggaatacaggtgtgagttaccacgcctggccaacaatgttctaagttagttacattagccataatatgtaagatagaaatttgctcatttgtatataagaagattctgaaaaagttttaagcgctgggtgcagtgacttaacttctgtaatcccaacattttgggaggccgaggcaggaggattgcttgagtccaggagttttgagaccagcctgagcaagatggtgaggtcccctctctcccactttgaataggtatgctataagtaacaggcctttgaaactcattttgggtattgtgaagatgttatattacagtgtccttttatttatttaatttgaggttaaatgtaatttttttttttttttgagayggaatctcgctctgtcgccgagactggagtgtagtggcgcaatctcggctcactgcaagctccgcctcccgggttcatgccattcttctgcctcagcctcccgagtagctgggactactggtgcatgccaccacgcccggctaattttttgtatttttagtagagacggggtttcaccgtgttagccaggatggtctcaatctcctgacctcgtgatccgcccacctcggcctcccaagctgctgggattacaggcgtgagccacagcgcctggccaattaaatgtattttatttttagacaactatgtgacgtgtttttttttaaaaacaatgcctccattccaaatcaaaataaatgaagagttcaagatgacatcagttccatttgttttaagttctggtgttgtgtgaatgacaagcagcagccagttatgacggcaggtgatycaaagtaattgccaaatttgttaacatttttccatctctaaaccatccttaaagaaaaacatatatggtgtcacaccattctcatggtagtcctaggctggagtgcagtggtgcaaatttggctcactgcaacctctgcctcccgggttcaagcaattctcctgcctcagcatcctgagtagctgggactacacgcatgcgccacgacatctggctaatttttgtattttagtagagacagggtttcaccatgttggtcaggctgttttcaaactcctgacctcgtgatctgcccacctcggcctcccaaagtgctgagattacaggcgtgagccacctcgcccagcctaatttttgtattcttagtagagactgggtttcaccatgttggccaggctggtcttgaactcttgacctcgtgatctgcctgccttggcctcccaaagtgctgggattacaggtgtgagcgaccgtgcccggccctattattattaattaattaatttttatttttatttttatttttttgagacggagtcttgttgtgtctcccaggctggagtgcagtggcataatctcagctgactgcaacctctgcctcccaggttcaagtgattcttgtgcctcagcctcctgagtacctggaattataggcacatgccaccatgcctagttaatttttgtattttagtagtggtggggtgtcaccatgttggccaggctggtcttgaactgctgatctcatgatctacccacttcagcctcccaaagtgctgggattacaggcatgagccattgcccccggcccgttctttaatttttttttttttttttttgagacggagtctcgctctgtcgcccaggctggagtgcagtggcgggatctcggctcactgcaagctctgcctcccggattcacgccattctcctgcctcagcctcccaagtagctgggactacaggcgcccgccactacgcccggctaattttttgtatttttagtagagacggggtttcaccgttttagccgggatggtctcgatctcctgacctcgtgatccgcccgcctcggcctcccaaagtgctgggattacaggcgtgagccaccgcgcccggcctatttttttctttacagacagggtcttgctctgtcacctagactggagtgcagtggtgtggttatagctcactgcagcctcagcctcctgggcttaggtgatcctcctgcctcagcctcccaagtagttgggactacaggtgcacgccattgcgcctggctaacttttaaaatttcttggccaggtgtccactaatcttaatcgtttctagcgtttgatttaragtgagaccacttgaacatttagaggccattctagggttattatttgacttaatttcagtattgttgtgtctcaggataattgggagtcctgagaatcagggagacagacaggaactggcagttggtggagcagtcagaacacacacaacgtttattaagcttgctttctcatatgggcacaattcgtggtgccccaaaacaattataatagaaaaaccaaagatcactgatcacagatcaccataacaaatatagtaataatgaaaaaaactggccaggcgcggtggctcacgcctttatcctgtcactttgggaggctgagatgggtggatcacttgaggtcaggagtttgagaccagcctggtccacgtggtgaaaacctgtatctactaaaagaatacaaaaattagccagacatggtggcatttgcytgtagttgcagctatttgggaggctgaggcatgagaatctctcaaacctaggaggtggaggttgcagtgagctgagattgtgccactgcactccagtctgggtgacagagcgagactctatgtccaaaaaaaaaaaaaaaaaaaaaaaaagaagaaatactgtgagaattaccgaaatatgacacagagacatcaagtgagcacatgatgttggaaaaatggcactgatagacttgcttgatgaaccttcaatttgttaaaaacacagtaactgaagtgcattaaaacaagatgtgcctgtgaatgaaacataaataaattttgtgtttaatagacttgggttacatttccaggatgtctcattatgtgtatgcaaatattccaaaatctgaaatccagaatgtttttggtcccaagcattttagataagggatactcaacctgtggtacatttattattatttttttgagctggagtaactctgttgcccagggctggagtgcagtggcatgatcttggctcactgcaacctccgcctcctgggctcaagcgatcctcctgcctccgcctcctgagtggctgagattacaagcatacaccaccatgcccggctaatttttgtatttttagtagagacggggtttcactgtgttggccaggttggtctccaactcctgacctcaagtgatccgcccgccttggtctcccaaagtgctgggattacaggcatgagccaccgcgtctgatcctgtgctacattatatcactagcacataacacaatactgggcatatatagatactcagcaaatatattttgaatgaatcacagagtttaagtttcctctgtcttcctttcttgacttctattgaaaatgtaagctggagctggacgcggtggctcacacctgtaatcacagcactttgggaggccgaggcgggtggatcacgaggtcaggagttcaagaccagcctggccaacatatcctcctgcgtggagtttccaaagagctgggattacagatgagagccaccacagcctgcagggcactggtcttgaccctccctccctcatcaattctctgcagccacagcaaaacattcaaaatgcaagtctgctatttttctactcctagttaaaacttttcaggggcctcccactgtttaaggattaggttcaatttctaaacctttatccagccctgatctttcaccagatttggaaattattacaaaaaataaatcttttttttttttttttttacaaaaaataaatcttaagaaactaggaataggccgggcacagtggcccttgcctataatcctagcattttgggaggctgaggcaggcggattgcctgnnnnnnnnnnnnnnnnnnnnactgctgatctcatgatctacccacttcagcctcccaaagtgctgggattacaggcatgagccattgcccccggcccgttctttaatttttttttttttttttttgagacggagtctcgctctgtcgcccaggctggagtgcagtggcgggatctcggctcactgcaagctctgcctcccggattcacgccattctcctgcctcagcctcccaagtagctgggactacaggcgcccgccactacgcccggctaattttttgtatttatagtagagacggggtttcaccgttttagccgggatggtctcgatctcctgacctcgtgatccgcccgcctcggcctcccaaagtgctgggattacaggcatgagccaccgcgtctgatcctgtgctacattatatcactagcacataacacaatactgggcatatatagatactcagcaaatatattttgaatgaatcacagagtttaagtttcctctgtcttcctttcttgacttctattgaaaatgtaagctggagctggacgcggtggctcacacctgtaatcacagcactttgggaggccgaggcgggtggatcacgaggtcaggagttcaagaccagcctggccaacatagtgaaaccccgtctctactaaaaatacaaaaattagccgggcatggtggtgcacacctatagtcccagccacttgggaggctgaggcaagaagaatcgcttgaacccaggaggcagaggttgcagtgagccgagatcgcgccactgcactccagcctgggcaacagcgcgagactctgtctcaaaaaaaaaaaaaaaaaraagaagaagaaaatgtaagctgtatagatgagactgcagtaactcatctactgtgaaggaccatacaaaacaagtgtattagctatctaatacatatttaggattatttcggtataagtctggataaggagcaacaaagggtgtggaggggagtctgtgtggtttttacaggtaaggatttaggcttttagtctgagtgaggcattcatggttattgttggttagtactaacatttgatgtttatttaattagtgtaaaagcctttcagaaggtagaaagtatgagttaaaattggtcttcagattactggttgtaaatcagactgtattttaaggttagtcatttttataaagaggaagttgtttagcaattctgaatcctatattgttgcaatatcaatagcagatgctagaatcctattagtaatcccaaggtaaaatgaattctaaaagtgcaatcttgaattattcaacacttggtatccaaattatatgaaatataatcatccattttatgattttgaatagaactgtaggttgttttcttaaataagagttgttcttcctccgccttctcattttgagtccctggaatctgttctatttttacttggggatctacatactaaagctgtctctgatttcatgctctgaagatcaacaagagaccttcccttgtaagatgagaattgtgtagtaggtgactattagaagagtaaacaagtcttaagtctgtaaacattttttcagtaaatgcaatggagtaccagatatctctcgttactatgactaaagaaagttcaatggtaaattcagtagctgtttatttgccttgataagtaattgctagaagtaatagtaattgtttttatagtgttaccgaaggtttatttactgtatgtgtgatttttaaagttttaaagggatcaatgaaagttatgtatagggaatatttgtaagttactggaaataagccaggaattgaatttttaaaagtgcctttcagagtaaattatattttcattttctttatagaatgaaagtggaacaatattgtttaaaattcaaattgagcatcatttgtacttttcaggccattagaatctgctcgaggcttgtgtgggaaagattatttgattatttattagattacctttggctaaacattgcagagaaaagttgttgacaccttttcccctcaaacaaagtaataaccccctgaatctaaaataaaagttggaaaaaagtcatgaaaactaagttgctcatgaggggcttggacttccttgtatttctggctgcccatttggtgctgtcactctgcttgtcccttctgggcttcttgctttaatgtgacatcatatcagacttttagttctgaattaatgtatttgcaaagctcatttaaaattttcagtaattctgtttgtaatttgaagtttgattcttcatttcttagccacataaacatttttgaattttgaattgtgggaaatttctgaaggcaggtaaaatacttattttttaataccttaactctcatcccttttattttttatttattttttatatatttagggacagagtctctgtagcccaggctgcaatgaggtggcacagtgatagctcactgcagcctcaaacccctgggctcaagtgatcctcctgtctcagcctcccatgtagctaggactataccaccacatggtacaccaccacacccagctaagttttatgtttattttttgtagagatgggggtttctcattgtgttgcccaggccggtctcaaacctctggcctcagcctcccaaagtgctaggattacaggtgtgagtcaccgcacctggctgagagctttttcctttccttttttttttttgagagctttcttcatatggcgtttcactcttgtcgtccaggctggagtgcagtggcgcaatctcggctcattgcagcctccgcctcccgggttcaagagattctcctgcctcagcctcccgagtagctggcactacaggcccccatcaccacacccagctaattttttgtagttttagtagagacggggtttcactgtgttagtcaggatggtttcaatgtcctgacctcgtgatccgcctgcctcggcctcccaaagtgctgggattacaggcgcgagccaccgcgcccggccgggcttcttgattgtagattctttgaggtacagacttactttgtataacactcagtgttaacagctctaagtacttaactcttgattgctttttttcttggtatgcaatttattcctcctatgaacttgctttacgattgattgagaataaccttggctcctccttcaataaatgaaggacttagtgctgttttagaagcctgttggagtaccattgtatttgtttgcctgtttttgtcttttggctaatagtcattgctatttttttccagaaacatccccagagctttagtctccagagtttgtatctgttgcaactgaggagaaatctaccagtataaatgtttctgctcctcttgaaaaaaggtttgaggctgggcgcggtggctcacgcctgtaatcccagcactttgggagaatgaggcgggcggatcatgaggtcaggagatcgagaccatcctggcaaacaagtgaaaccctgtgtctaattaaagtacaaaaaattagccgggcgtggtggtgggcgccagtagtcccagctactcagaaggctgaggcaggagaatggcgtgaacccaggaggcggagcttgcagtgagccgagattgcgccaccacactccagcctgggcgacagagcgagactccgtctcaaaaaaaaaaagaaaaaaggtttgaagaagagtatagtgaaatgccacccaaaccaaccttcatatatatgaaaagagggcttggacataaaatttttttttgagatggagtctcactcttttcatccaggctggagtccagtgtcatgattttggctcactgcaacctccgcctcctgggttaaagcaattcttctgcctcagcctcccttgtagctgggactacacctcaggtgacccacccacctgggcctcccaaagtgctgggattacaggcgtgagctaccgcgcctggcctggacttgttattaatataaacttttagagcctttaagccataggatcatgtaaaaattaccttatgttggtactttgaatttaaagtgctggcagatcacacataatcttcaaattgaattctacatttaacaaatatttgagtgcctacttttgtaaacatagcagtacattaaagaacaggacatgaaagttttgctggtacaaagttttgcagttattgygggaagacagatggtaaactagataattaaattaaaaatgtggtgtattaggtagtgataagtgccctggagagaaaataaagcggggaaagggaatgaaaagttgagggtggagtactgatgtcttgaagagctttccaggccaagagaagaacagtacaggggcgctgcagtgggagagaggcctggcaatgtcagaggagcagcaaagggtgtggaggggaggctgtgtgattttttacaggtaaggatttaggcttttactcagagtgaggtacccgtgaggtttttcagcactggagtgatatgacctgatttacattttaatgagatcattcttggcttgctatgctgagaatatagactgcacggagagtcagatgagacatgatgytagcttggacctgtattggagccgagaacaaagtggtttaattcttgggtgtatttcctaaatagagctgttggaatttgctggtggaatagaattcttttctttttctttgaggcaggatctcgatttgttgcccagcaggagttcagtggcacaaacatggctcaccacagcctcgaacccctgggctcaagcctcagcttccccagtagctgggaccataggcatgcaccactgcgcctgactaatgtttaacattttttgtagaaatggggtctcactttgttgtccagcctggcctcctaaaatgctgggattacaggtatgagctactgcgcctggcctagaaggaacacaatatttgaagggtagagtgtgtgagagaatgtgtcaaggatgatttcagggtttttggcctgaacatctgaaaggatggagttgacattaactgaaatggaaaagaaagacgcaggacaaggagagataatcaggggcttggttttgaatatgctacttttgatttgtctattagacactgaagtagagaagtcacataggcagcttactatatttgatctggaattcagtgaggaggtttagcttagagatataaagtgggaaattgttagcatatggattgcatataaactatgaagttggatgggctcaataagggagtaaatgtagataggtgaagaagattgaggactaagtcttgggacacactggcattaagaagccagataagtaaccagaagctagtgaaggagtgtgagcggcgtcagtgaggtgtcagaggaggcaaaccagaatgctgtggcctttaagccaagtgaagaaagcttcaagggaagagagatcagctgtgtcaaaaaagagtttgggtaagataaggactgatgagtgaccactagaggtgaatggtactttgagaaaggcagttgcactggacggattggtatgagcctgagagaatggaaggagagcagcaagtggagataaggaatgaagacaactcttaaagttgtaccgtgaaggggtgttgagaaatggtgcagtaactggagggcttgtgggcttcatttgtgtatgtgtctgcatgcgtgtgtgtgtaaagttggagaattgctagtggcatgcttgatgctgatgggattgaatttagtagagagaagaaccgatgacacaggagagggtaggaatttctggagcagtgtctttgaggacatctgagtgggaagaatgagatcagatctaattactggccagtttggaagccttattaggagcaagggcagttgatccagagtaacatgagagaaggtagagaagtaaatacatcggcagagattcaggttagacgatatgtctgggtaaaatggggaacattttcatacttatctcatgatttttgtgagtattaagtttaatactttataaagggatgattacagaacatagtacccagtaagcgttgactgaaattgttaagtttgtaatatttataaagttacaatgtgatttgcatgaccagcttctttcagtgtgtgactaatactctgaaaatactggcttttcatttgagccagatggctcagtcagtaatttctagttatgccatctttttttttttttttttttgtaaagacactgggcaccaaaggtgctactcacacagaatatcaacttaaaactcaccctggaaagacaagattttcatagttctaatcagaaacattgtaattttgttatattcatgttatggttttgaaggttttgttttttttttttttttttaaatacgtgaattaaggggccgggtgtggaaggccgaaatgggagggtcacttgagaccaggagttcaagaccagcctggtcaacattgtgagaccccatctctatttaagaaaaaataaaaaaaaatagtatgttgggtattagtttgttctcatgctactataaagaactgcccgagactggataatttataaaggaaagaggtttaattcacagttctgcatggctggggaggcctctggaaacttacaatcatggcagaaagggaagcaaacatccttcttcaacatggcggcaggagagagaagtgcagtgcgaagcggggaaaagcaccttataaaaccatcagatctcgtgagaactcactatcacgagaacagcatgggtgaatgcccccatgatctaatcacagcccatgaggtccctccctcaacatgtaattgtagttttaggaccagttgtaaagttagtgcagataaagtgggaacattagaaggagagttggaaccgggagatgcttggaaaatctactcaaactctcactggatttaagtatattcctattttgaaaattcagtagctatgttctctaagaacatcagaacctcagtatcagtttagggcaagacggaggatgcaaggatgaaagaggggatataaataagttttattaggttgggcatggtagctcatgcctgttaccccaacattttgggaggccaaggtaggaggatcacttgagcccaggaatttgagaccagcctgggcaacataggggagaccctgtctctacaaacagttaaaaaaagccatatgcacctgtgttcccagctaatcaggaagctgaggtgagaggatagcttgagcccacagccagggctgcagtgagctatgactgcaccactgcactccagcccgtgcagccccaggctgagagaagtgagactccatcaaaagaaggaaaagaaaagaaaaaggaaaagagagaaggaatacgttttattgttattttaggaaaatttggctttgactttttttttttttgagatgcagttttgctcttgttgcccaggctggagcgcaatggcatgatctcggctcaccgcaacctccacctcccgggttcaagtgattctgtggcctcagcctcccgagtagctggcattacaggcatgtgccaccacctgcctaattttgtatttttaatagaggcatggtttttccatgttggtcaggctggtctcgaactcccaacctcaggtgatccgcccaaaagagttaagagcttgagccaggcgcggtggctcacgcctgtaatcccagcactttgggaggccaaggcaggtggatcatctgagggtaaggagtttaagaccagcctggtcaacatgctgaaaccccgtctctactaaatacaaaaaattagccgatcgtggtcgtgggtgcctgtaatcccagctacttgggaggctgaggcaggagaattgcttgaagccgggagtcgaaggttgcagggagccaagatcgcaccactgcactccagcctgggcaacaagagtgaaattccgtctcaaaaaaaaaaaatagagaagcgcttgggtctgaacccacacattgaggctccagcaattaggcacttaacctctatgctatgtggcctttctaaaataaaataatagtaaatataacccaagaagaaacttaaaaggtgtcaatcttccacaaactcaggtttaatctcttgatctaacatgatgttaatgtcgaaaagaaaaagcgttcgttgttactgttgttgaaaaattttcataaaatgtaatatacattcctgatattaaaaggaaagaatacctgtaaaatagaggtggataataccattactatggtattgtgactgactgagaactactcccgagcggtaccagtcccagacatttcccctgagcagggagtagtgctcggtcagtaggcactagcaccgtcattgtacaggtcgttaagatacttgccccttccttggttatctagccgctgaagggataattatgtttggcacaaagaggatggtgctgcagcagagcctagctctggcattttttctgattgatcggcatctattctatacctgctgttaaatattttgactctcactccagatcatcaaattgttttgagagtaaatgagttgaagcatgcatactgcctagctagaccagtgtctgagataaatataatacagagtttgctattataatttagaatttttattgagtatactctgctgtctatacacagttggcttaggaaatgaattgggaagcttttctgtttcataggatagtttaataaaagaattacctttgaaattacctttacttactatgaaaatgtctgggactggtatttggagttgaggggggagctaactgtgtaacttatgcgaatcttcggaagttattggagtgttttctaattctgttagatgcttttgacaatttatattttcccagaaaatcatccattgtatctgtgtttaaaatttagcagcttaggatttactggaaacatattttatacttatttttatttcttctctattatcttacttccttttcagtccctaatttcatataattgtttttttagtccagctaatagtttgtctgttttttttcccctcccatcaaaatatagcgcctaagttgttttcgtttttttttttttgagatggagtctcgctctgtcgcctaggctgcagtgcagtagcgcgatctgagctcactgcaacctctgcctcccaggttcaagcagttctcctgcctcagcctccccagtagctgggactacaggcacgtgccagcatgcctggctaattttttgtatttttagtagagatgggttttcaccatgttagccaggatggtcttgatctcctgacctcgtgatccaaccgcctcagcctcccaaagtgctggaattacaggcatgagccaccgttcctggctgctcctaggttttagaattaattctgcaggcttctgttatcttacttgagtaactttgaattcccttgttcttatttttaaatgtttattttctaaccttgagttgaatgctcatttaattcttgctcagttgaaggtgtttaggctgtggctctcttcctctgagtatagctttattagtgtaccaaagatttttttctcttctttttattttttcttttctttttttttttttgagaccgagtttcgctcttgttgcccaggctggagtgcagtggcgtgatttcagctcattgcaacctccacctcccgggttcaagtgatcctcctgcctcagccttccgagtagctgggattacaggcatgcgccaccgcacctggctaacatttgtatttttagtagagtcagggtttcaccgtgttggccaggctggtttcgaacccctgacctcaggtgatccacctgcctcgacctcccaaagtgctgggattacaggcgtgagccactgcccccagccttctttttccttttctttctttctttcttttctttttttttttttttttttacacagattagagtgtagtggcatgaacacgactcattgcatccttgacctcctgggctcaagggatcctcccacctcaacctctcaaatagctaggacttcaggcacgcgccaggatgcccggctaactttttttattgtgtgagccgctaggcccagtcgtaccagagatttttatatgggcagtttttatcattgttattttctaggtaatctctattgattttgatttacattactccattcaattacttgaagtaatttaaggagagagagtacataaatgtcaagtctactgcattaaggggagtagcttaattgtttcattgtcagattgtatagactatttctactttcctgaaatttttgaggtgttaatggcctaaattgatgatcagtttttataactgttgcatagagacttgatctcattctttcayatgttcagccattttgtcgtttatgtatttgatctttcaggaaatgatactcttatattcttacttctgcctaaaagtttttcttagatttctttgaaatttttgttctggctgggtgcggtggctcacatgtaatcccagcctggccaaaatgatgaaacctcccctctactaaaaatacaaaaattagctgggtgtggtggtgcatgcctgtaatcccagctactttggaggctgaggcaggagaatcacttgaacctgggaggtggaggttgcagtgagccttgcaccattgtacttgagcctgggcaacagagcaagaccctgtctcaaaaaaaaaagtttttgttgtaactatatattatgaaaattttggtatatatagttttataacatatctttatagattgtaatcttgatcattataaaaaatgacccttttctgcctcctttaatattctttcagtttgaattcagctggttttgaaagggtgttgatgcttgctatgtatgcttttatctaaccttttactttaacttctcaaagtctctattttagatttgtctcttgtagacccttgtagttggataaaggttagtcttgactcaatttgagatgcttttaatcatttacattaatgttatatattttgctttgcttatataatattagtgtatttgttttgttgtcatctatatgtttgcttttggttttctttcttttcttttctttttgagacagtctagctctgtcgcccaggctggagtgcagtggcatgatctcgggctcactgcaacctccacctcccgggttcaagcgattctcctgcctcagcctcccgagtagctggaattacaggcgcctgccaccatgcccggctaatttttgtatttttagtagagatgggatttcaccatgttggccaggctggtctcgaactcctgacctcaagtgatcctcccgccttggcctcccaaagtgctgggattataggtgagagctacagtgtctggcttggttttcttcctttaaactacatggtttgttttctttatttgctatcccttctgtctcattttgtaagttatatactgtatttcgttatgtctaagataccgttggtggttgtgtgcttcgttattttgtataccattaatacagttaaatgctgtcaaagaaactatgacgtaccattgattgaaatatgcatgctgatttcagatagacaaaaatgtgaaaaaggtacatcttagaatagattaaacatggtagtttgtagttctatgggtattataaagctatagctttaatatatttaaatctattatgtttatcaaatagttttttcaggagtggttgtttgagtgctcttatgttcaaaaatgtctgttagtggctttcacaagcaacgtgatgttttggctggttacagaatttttgggttacgtttccctttctcttaatacccagcagacactattccattatcttctggcatctagggttactctagagaagtctggggccagcctgactgtttttttccctttgtaggtgacctacttctgcctgagtattgctagaattctttctttatccttgaagttcagtaacttcatcaggatataactcggtcttggtgtgattctcttacattttcctgttaaatggtaagccattcaaactgcagattcaggaatattttcttatayaccttttaatatgcattcatttttatttttctttactcaagaaacatcagttttatgattgtttatcttcatttcctgtcttccatttcattacttttctaaatgcttcctttgttcttttctgctgtgctcgatgtgattttcttgagattttgtttgatatcatgtttgttttcatcagtatcaggttgactacttcctatatatgatggggttttcattttgccagtggcttcagtacttcattcaattttatatatttatgtctgtgagttgctctttcaacttgtctcatttatttcctcttttaaaaaaaacttttacttaacagtaaaaacaggtaaaaccacctgtaatcccagcactttgggatgctgaggcgggtggatcagttgaggtcaggagtttgagaccagcctggccaacatggtgaaagctgtctctactaaaaatacaaaaattagcccggcgtgttggtgggcgcctgtaatcctagctactcgggaggctgaggcaggagaatccgtttgaactggggaggcagaagttgcagtgagctgagattgtgccactgcactccagcttgggcgacagagactccctctcaaaaacaaacaaacaaacaggtaaaaccacattgtttttgagaagatgggttaaaaccagttacaagtgactaatattaaaatttactctctaagaagtgatgagtaaaatggttttatcaagtcttgtgttttattaatggcatgaaatatagaaaagcaggcttagagatactattttttacagttggataaacttttgtacacagtagaaatctgattttgccatgtgtttttttgtttatgagggagaagtgttcaatgactttttcccaaagatttttttttttcattcagtgaattacaaaatgtgctagaaaaatataatggaaatgtaccttgcatggtggcttatgcctgtaatcccagcactttagaaggccaaagcaggtggatggcttgagcctaggagcctaggctgcagtgagccatgatcatgccattgcactccagcctgggcaacagagtgagaccctgtcaaaaaaaaaaaaccatggaaattataactgacatgttctgccattcacgtgccacaattcaagacctgctatgtgattttctcctgaatgccagtctttgttttcttctgaggaaatgaaggtgatcagtgataagccccctggtcttcattcagggttgaagggaatagtgaaaactgtgaacgtgtacaacttgtggttactaagagtgagactttgactgcgaattaggcaaaaggtgtaagtcttttactttttttttttgagacggagtctcactgtgtcacccaggctggagtgcagtggtgcaatctcggctcactgcaacctctgcctcctgggttcgagattcccctgcctcagcctccccagtagctgggactacaggtgcgtgccaccacacccatctaattttttgtatttttagtagagacggggtttcactgtgttagacaggatggtctcgatctcctgaccctgtgatccacccgcctcagcctcccaaagtgctgggattacaggtgtgagccaccacacctggccagcgcccagctaatttttgtatttttagtagagatggggtttctccatgttggccaggctggtgtcgaatttctgacctcaggtgatctgcctgcctcgacctcccaagtgctgggatcacagacagagccaccgtgcccggcccgtcttttacattttacatattttagctgtttagggaacagcttcgcccgtaagtttttttcttctcttcttttaaaatgatggctgagatacacacattctttacattacttttgatgtgaacgaaggtcatttcagtagacttgcacatttagagtatgccagcaacttactcaatattgcgataggtggaatttacggtctggcgtctgaattgtagcttatcctcaaccatcaaaattcctacccaaatttcttgtgttccaaacttaagaattgttgtgtttcattgccaataacatggctttttcctaaagtgatacatatttttaagtaattcatttcttgggcaaatatttactgccagagactgtcacaggtcctggggctatatcagtaaataaacaaaaacccttgttcttatagagcttgctttgtagttagggtaggggagagaagaattaatagaaagtgtagagtgctgtgtggaaactagaacagggaaagaggataaaataaggagtgtgtaagggggtggggtttcattaaaaatagggtgacagtggaccgaggaactcaggtgaatgagtgaatcatgcagaggttaggtgaggcaagcacaagggccctgaaatggggctgacctgaacgctggagggaggtggcagagcggttagctgaaggttggagagagatgctggttaaagcccctgaacgctggagggaggtggcacagcacttagctgaaggttggagagagatgctggttaaagcccctgcggtggcagagcggttagctgaaggttggagagagatgctggttaattctgaaggaccctataggccatcacacaggccattgctctgagtgagaatgggaagctgttggtatagtgacatgatgtgactcacatttttccaggattacttctgcctgctgggttgagagtagatacaatagggaaggtattttccatagtaccccagcacatgcatttttattaaacatttgtggctgaaatgaaagcttcaccaacaataaccctattttattttttgtttctgttaggaaaaatgagtgctggttatgttccactagatctatttcatgactgtgtgacttacggttgaaaaacactgccaaatagaatatagcctctgacttagtggacaagaagtaaaattgaggtttgtgtatgaaagcaaagtgaacacaatgtaaaataaaaaaagaataaaaacttaaaaatcaacattatgtatatgtatatatacttagctttaaaaaacccaaataatcaaataccagtgattcaagaggcctaatagtgaacaatgcattcagtgaaggataatgaagaattccccagaggcaactgctttttaaaaccttttaggttcagatctcctgggggcttaactccatgcttctaaataatatatttatagtgtttatgttttggtttatcaactttagacattctctgttgacttcttgctatgacagatgttttcagtcccacttctcactactgatctccctcgtacgacggtcactgaactggcgcctctctggggttctgcccagaagattagccttcctccttcgctgcagctcctctgtgagtattctgctctctgctccctccactctgcttactcagttcacgttcttccatccgttttcatctttcagagccatgggcaatccacctggtctttttaatatactttaaattaaaaagttattttttaatttctttagaaaaatttatttaacttcttaggagggaagaggagataagcacatgtgcccgcactgacaccttgaactagaagacacgattaggccaaagctttttgttgtcaaaagtgtgtagtgtatgtgttttaagagttagatatattcagaatatcttatcttttaaaaattgtaaatatttccccatgtcctgaaatattcttgtaaagtattttaaatagatgcatagcattccttcatatgctgctactatcatattccccacatcttgacttctgggttttcaaattatagttgtaaaccacttaaattataattagtgcttctgtggattttccttatgaaaacatttatacataatccttgattatttctcttcggataaatttctggtcatttcttagttaaggaaaataaatatttttgaggttcttcataaatattactgattgccttctagaaaggctttgctaatttgtatttccactattaactgtatcaaagtgccactttttattgtgttcttcataccaccaggaactttaaaaaatgtttgattctgctaggtaaaaagaaaattattttaaaaattcccaagaaaggtgaacaccttgacagtttggaatgtgtgtgtgtgtgtgtgtgtgtgtgtgtgtggttttaaaggtttataagagtaattatttgccttttaattttttatggctattttggcatttagaaattttatttttctggccagggcacagtggnnnnnnnnnnnnnnnnnnnnnnnnnnnnnnnnnnnnnnnnnnnnnnnnnnnnnnnnnnnnnnnnnnnnnnnnnnnnnnnnnnnnnnnnnnnnnnnnnnnnnnnnnnnnnnnnnnnnnnnnnnnnnnnataaaatatattttatttatttgagatggagtttcactcttgttgtccaggctggagcgcaatggtgcgatcttggctcaccgcaacctccgcctcctgggttcaagcaattctcctgcctcagcctcccagcagctgggattacaggcatgtgccaccatgcctggctaattttgtatttttactagagacagggtttctccatgttggtcaggttagcctcgaactcctgacctcaggtgatccgcccaccttggcctcccaaagtgctgggattacaggcatgagccaccgcgactggctgaaattttatttttttaaaatcatccagctaagtaggctttcccatttatttattttttgacacttagagtaatgtttcccattcctaaaatcaaataagagtatgcaaaatgtgaagatagctttgaatttggagtggcgtatggaaaagtgcctgggagaaacttggcggcagttgatttagaaacaattaggctttggcttgtgttaaaaatctgtggatcatttagattttcgattgttgctgtccccatgtctcctgttgccccatactatagatggtgttaaattgttagacacttccatgaatgtacttcatacatgtaaaacttcgtagatgcatgactcatggctctgggtggtctagctaaactagtcttttacgtcatacrtgtaaaactttgtagatgcaataactcatggctctgggtagtctagctaagctagtctttccactcaaagagcacgatacttaagctttctcctggtgagtcatgaattgtcatcagggaatttctcactgtttggcttaattcgattaggaactgctactggtgatagtttagtccttatttagttttagtctaagagaaccttactgacgttactataaatctaaaaaaaaaaaagcatacctttaaaaaagcctaatggcaatggactagtcaggatagtaagaaaaagttatactggaaagagagagatggtttatgaattggttacaaaaaatacatcagtattattttgaagacaaccctgatttcagtcatggttgaaatccttaaccaaccacaaaaatgtcttacattttaaatatattaaagtccttaaattatggaaatagtgtcttctaagaagttgtttaatagtggaaagaagagtctcagtctcttttttttttttgagacagagtctcattcacccaggctggagtgcagtggtgccatctcagctcactgcaacctctacctcctgggatcaagcgatcctcctgcctcagcctccccagtagttgagaccacagacacatgccaccatgcccggctaattttttttttgagacagaatctcgctctgtcacccaggctggagtgcaatggtgcgatctctgctcactgcaacctccgcctcccaggttcaagcagttctcctgcctcagcctctggagtagctgagactacaggcacactccaccacgcctgactcattttttgtatttttgtagagacggggtttcaccatgttgcccaggctggtcttgaactcctgagctcaggcaatccgcctgcctcggccttccaaagtgctaggattacagaagtgtctttttttttttttttttttctttttgagacggagtctctctctgtcacccaggctggagtgcatggcgcgatctctgctcactgaagctccacctcccgggttcacgccattctcctgcctcagcctcctgagtagctgggactacaggcgtccgccaccacgcctggctaattttttgtatccttggctaattctttgtatttttagtagagacggrgtttcaccatgttagccaggatggtcttgatctcctgacctcgtgatctgcccgccccggcctcccaaagtgcggggattacaggcgtgagccaccgcgccccgcccaccattgtcatgttgttagtgcagcacagaagcccatcaagtggcagtcaataatttcctaatttgtttttgaaaaaaacttagctacattccaattttctacgtgcttaggtttcttttataagtttgaataaatgtataaataacttcagggttgttttatgggttcttggtacctcacacagataaacttgtaaatggaataagatgtagaggaatgcaaaagaagctaaggagcaagcatgacagcatcctcttattttatcgccttctcctctgcagtagtcagggtacagggcactgaattcagatcaaaatcatagactttactgtatctcttgctggcgaaaatatttaagttatctgacatttactaggtctattaaatcacccaagggaagaactttttttgtatgcatacggtagtaaagggcttttgcaaaaccagtatgttgatattttggacaacataaaacaatatacaccttgtacatttactttaaaaattaacttgtgaaaagcatttctcattttgtttacttagtttttaaataaagccagactagtttagcttaatatatgggttctcagctgggagaaccagattaaccatcattctagtcaaggctttgagtttccattctctgaaatgatgacttgcaacttggtggaatttgatattctttccaaaactaagaaattttggtgatccattcggagttatttctgctctctttctttaacagtgagactgagagtatcggtctacttgcactgcacatgggccaaaatgggcctttcacaggagaagctctacacaaaggaaaggagaaagggttcctgcagaaggaagagaagggcagatttgttctcagaggtcacttatgttaaggcaaggatggcagatgtctcatcatggatttatttggcgggtgtggctgctgagtactgtattgggaggaatcctaagtacgtgataggttattaatggtgctgtctttgggtgtgggccacgtcgaaggcttgagggtgattcagagtaatgacacagtccgtctgtattttaggacctgccacacaaggaggtaggaatatgcttggcttccatttgatgtgtcccacacttctgatatgtatattggactttttaactactccattctactcttcccccttctcactactgtacttaactaagtcttaataaacaaacacacaaaccggtaactcctcatccctctttatcctgagcccctggcaacccccattctattttctctctctgagtttgacttctcaaggtattttcttttctttttctgtttcttttatttgtgacagtctcgctctgttgcccaggctggggtgcagtggtgtgatcttggctcagtacaacctctgcttcccggttccaagcgaatctcctgcctcrgcctcccaagtagctggattaggggtgcccgccactacgccactacggctatttttgtatttttgtattttttttgagacagagtcttgctctgtcacccaggctggagtgcagtggcgcgatctcggctcactgcaacctctgcctcccaggttgaagcgattcttcctgcctcagcctcccgagtagctgggattaacaggcatgagccaccatgcctggctaattttgtatttttggtagagacggggttttgccatgttggtcaggctggcctcgaacttctgaactcaggtgatccacctgcctcggcctcccaaagtactgggattacaggcgtgagccaccgtgcctggccaatttttgtattttagtagagacgtggttttgccatgttggcctggctggtttcaaactcctgacctcaggtgatctgcccaccttggcctcccaagtgctgggattacaggtgtgagccactgcacctggctgcaaggtattttcatgtaagtggactcatacaatatttatccttttgtatctggcttattgcacttggcataatattttcaagttcattcatgttgtagaatgtatcataatttcattcctttttaaagctgagtaacatcctgttgtatgtatatactgcacattttgtttatccattcatctgttggttgacaattgggttgtttccacgttttgactgttgtgaataatgctgctttgaacattggtgtacaaacatctgtttgaccccctgctttaattcttttgcatatataaccagaagtgaaattgctggatcatatggtaattctaagtttaatattttgaggacatgccatgccgcctttcacaatggttgcatcctcttacattcccattagcaatgcatggggttctaatttctctacattcttgtcaacacttgtcattttctgtgtgtgtgtttaatagcaattctaattggtgtgaagtggtatctcattgtggttttgaatttcttctattattagtgatattgagcatctttgcattgtgcttgttgaccagacatctttttatctttggagaaatgcctattcaagtcatttgcccatttttgcattggttttcttgttgttattgagttgtatgagttctttttgtattctggatattaatcctttatcagataggtgatttacaatatttttcccatttttttgggggttgcttttgatgaactaaagttttaaattttgatccagatcatttattttttcttttgtctctattgctcttggtgtcatgtccaagagtttgttgctaaatccaatgtcttgaagattttctcttattttttcgcctgagagttttaaagttttagctcttacgtttaagttttcagttcatttagagtwattttttgcatatcatgtaaggaaagaatccaccttcattcttttgcttatggatayccagtttccctagtgttgtttattgaaagattttctttcctcattgagcggtctagtcaaccttgttgaaaatcagttggccatatatgcaagggttttatttctaggctcttattttgtttcattggtgtatattatgtctgtctttttgccaataccacagtgttttgattattgtcgttttgtagtaagccttggaatcaggacatgtgagttctccaactttgttcttgttttcaagaatgtttcggcaatttggggtgtgaattttaggatgggttttccaaaagttgttgggattttgatacagggattacattgtatttgtaaattgctttgggtggatttttttgtgtttgaggaaaagattcagttgtttagaagtctcttaagctctctttattttacttttgtctttccagcatatgtctctttcatatattcacttatacagaatagtgtacatatgtgtgatacatgcaatgtaaatatgtacaattttaagagttatttaaaaacaaaaaccatgtaactgctagcaggtgaagaaatagttggttgaagttttaaaactactgaaatagagttatgactgatggactacattgacacgtcatcacccacaatcccatcatttatatcagggttcacttttggtattgtacattctatgggtttagagaaatatttgacgtgtatcttaccattatagtatcatacagaatactttgatggccctaagaatcctcttcagattgaatttttgaagattttaaactactttttttttttgttttttgttttttttgtttgtttggttggtttttttgagacggagtctcgctctgtcccccaggctggagtgcagtggcgcgatcttggctcactgcaagctttgcctcctgggttcacgccgttctcctgcctcagcctcccgagtagctgggactacagaagcctgccaccacgcccggctaattttttgtattttcagtagagacgtggtttcactgtgttagccaggatggtctcgatctcctgacctcgtgatccgcccatcttggcctcccaaaatgctgggattacgggcgtgagccaccgcgcccggccttaaactagttgttaaatagagtatcctattcaacattgtggatttttctaattattttckcaagaaatcatttaactggctggacatggtggctcatgcctgtgatcccagcattttgggaggctgagttgggaggatcacttgaatccagcagtttgagaccagcctggacaatatagtgagacccctatctcactttataaataaagcaattgtttcacttatttccacatcccctagatttcctgcaaactgtagcagtactatctaatagaaacatgggaaccacacatgaaagcctaatgtgtgattttaaaattgtaaccacatttagaaatgtaaaaagataggtaaaattcattttaataattcatttaactcaatatacccaaaatataatttcaagatggaatcagcataacttttttctcacaaagtcttcaaaaatccagtttatattttacatttgcagcacatgttaagtaagactagccacttcttaggtgctcagtagccacatgcgactagtggctattatattagaaagtgcaggtctaacctaagaagcttgatttgattcagtgtaaacattttgggggaggggcaagagtatgtcatagatgaagcttgtgtataccattttgcatcaaataagaagatacacattcttgggttaatggttctaaattcgaacaattatttggtgattgccagatttctccgttgcgaagatgcattatctctttttactggtgagtaatctgtggggtgatgcttgggcatcatattctgttctccagtgaccttttcacttaatggttttagcatccattgatcatccttgcctggattattacattaagggttgcaaatgaaatgctctaaatatatctatgtaacaaatttccacccctttcttccattatataaagcattaaaaatactagttactggccaggtgcagtggctcacacctgtaatcccaggactttgggaggccgaggtgggcagattgcttgagcccacttcgagaccatgatgcccatggtgaaaccctgcctctacaaaaaatataaaaatgaattgggcatggtgccatgtacctatagacccagctactcaggaggctcgggaggattgcctgagtccaggaggtcaaggctttagtgaactgtgattgtgccactgcactccagcctgggcgacaaagctgttctctcagcccagtctccttagtaagatctaataatttttcctttgggagatgactttctctaaactttggaggtcagcartaaattgaaagggactagtttcttatctgattaattcattttcattttgatgaattcgtatgccttcttaggttcttccttaaaatccttaattaaaggagttttgtcttcatcatcatcctgcatcagaaacggcatcagtaattgatatttaatctcataggttgtgatgagtccttacttttgttttacaggttgctcttaagtattgttgggttttcagagtatatcagcaaaggctttagcttaacatcgctcaattttttaaatataaaagcaatgttagcctgacacgttttctttttaaatttcttaccaaagcacaagatggcattctttaagaaaggtctatttttgtcagttataaatttgctttccaatatttctcctttattaatagttttctgcaattcattgggggaaagtttgttgcagtctcgctatcagcrgaagctaatttatttatcagtgatatttaatgttatgcatttatgtactgttcttaaacctctcaaacaattcagggcttgctttgcaactgagctgctcaccaaattctcctgtttctctcctttcacctccatcacttcggagatatgaaatgcacattgctgttgccacagtgctcggtggttccatgctgctggtggttatacatttttgtatgaagtattaccgtaactgttagacatcaacattgccttccatttgtatttctgttgcatagaaacagtcttmtgtgtgatacaggggatatacttaaagtcaggggctcagcttttggttcccttgcctttaaataaatgcattacttccaattttttctttcagtgtttgtactttcctaggcctcttacataggttcacctgtattttcccaggacaccccattttcttagaagccatttttacttaatgtggagaagatcatgtacaagatgcctttcagtagaagttatatttcatgcacaacatttctgatcatgcagcagggctctcttcttttgctaatgtgattataaggagaagaagcacatacaaataaatagttatttgaattagagaaatataatctcctaatgccatcttagggaagagtttgaggaggagttcaaggcatgataggaagatacaacagagggtgagttagtgtcagcagatcacagctactttgacataatcacacctgttgttcccctttggaagaaatcttggattggacctggcatggtctgctgcttacattattctttctttcttatgtcaagaagtgggtggagactacttagaggaatgaggaatcaacaccatcttaatatgtgtttgtgagtagaacatcttgtatttgtattacctgttccagtttttaactttgtgcattttatgtgaatccacttcttatacttccattaaaagtagtttaatacttggtcatatgttagaaacctgtcattcagattgttgcatttcaaaatgtagacaaagctgtcaytctgacttgtttggcttttgagtttcataccacacttagtccaatcaaaatataaaaaagaaaaattatgttgctaattttcaaatttcaaacttttgctttaattataataaactttatagacacacatttgaatcgcacactaatagcctaggaaaattaggggtttaaatgtaaatattgccttcatcccttagactctaagtaatagcaacaaacattgggcaaattggctgggttcacctgtaatcccggcacttgggtgggcagggttggggggcgagctcaggagttcaagaccagtctgggcaacgtaggaagaccttgtctctaccaaaaatacaaaaaaaagacagacatggtggtttgtgcctgtggtcccagctactcaggaggctgaggtgggaggattgcttgagcccaggaggcggaggttgcagtgagccatgaacacactactgcrctccagcctgggccacagagtgaaactctgtctccaaaaaaagaaagaaggccacaatgcttaaaaagcccatccaaataatcagaaaaaagagaatcactcartgtaaaaaaaacggggtgggggaataaaaatatgtaaatgcaccaaagataaattgccagtggcagaaggatgcccagtgttagcaaggctgtagggaaatagttgcctacagtgtttctgggataatacattgaagtaaacattttgtggcttgatatatatgttcctttgacttacagttcagtttatagtttatattctagatatacttccacagatgtacaaggagagtgcaaagtattctttttaaattaatttttttttaagatggggtcttcctctattgttcaggctggagtgccatggtgcgatcatagctcactgcagcctcagactctcctgggctcaagagattttccctcttcatcccccagaacagttggggctacaggttcacaccgcctggcaatggcagcattgttttttctttttatttatttttaaaaagacttttaaatattcataatttcttttttttactttttgtttttttcactcctctcagctcatacctaggcagcattatttatatttgagggggaaaacgaaaagaggtatggtggtgggaacgagttatctagtgttcagactatgctaagtggccatcagttatacaaggatgattccatttctgtatagtatatggtggtgtagcctaagtctgaaagaatacacagcaaattgttagcagtggttgtctttggagagcaagaaggtagtgtctaatgccttctattttattttcctatgttactttaggatacatggccttttttcataatttaaaaaatcaaagtacataaaagaaagttgaaaatattctactacttagtaataacaaccaccacctacagatgtctcccaacgttgggcatccttgcatccacctttcagtgcatgcatgcgggctgaaatctgaggttgtaatagatgtgccatttatatactttaagttgcaagttgcatatgaatgacaacccagctaaggtaatattgaagaaattattgacctatagatagacatttatcgcaagaagagattaatttctaaaagagtcctaaagttgagagaagaaaatctataaaaacctctaaatagttttgagactcttgatagaacccactgacttcctgatgtccaggatgagggaataaacacatatgtattccttagtacctctctccctttccctccattcccttcccattttctaatcataaatatagatatatttagtaattggttattcttttttaacatagaaatcctgataatgtaaaattacgacaatacagaaaataacaatgtaaaatcctgacaatgtaaatttatatataaatcctgataatgtaaaaataggaccaatggcaacaagaaaataatacacacacacacacacgtgtgccacttggcaatgacagcatatattattaaatatatatatataaaagcttatagcattcatggtggtttggttttatttatgcatttacatggggttggtaactacactggtccctttcacctgcgtttttctgttactgaattctttattttgattgatttcgcagcatttaattcaaaaagtaccatttcttaagtccttaaagtttacaatacatgtaaatgtgtattaccatcttatttggacttcctgtttgggcttctctctctctcttttttttttttcgacacaggtgcctaggctggagtgcagcagcatgcttacagctcactgcagcctcgacctcctgggctcaagtgatctgcccaccttagcctcctgagtggctggcaccacaggcgcttgccgccatgtccagctaatttttgtattttttgtagaggtggtgtctccctgtgttgtccaggctggtcttgaactcctgggttcaagcatctacttgcctgggcctcccaaagtgctgagattacaggcatgagccaccatgcctggctgcatttctcattctttttatcacattcttcttcaggattccgtatttcttcacgtcactgttacttacctacaatgagtattgtggagaaatctgaggctaacctggttggttccacccacccacctatactggacttgttttttcccttcctgaatatccttgatattatttaactttaaagttcagtgcctcatttgacagatgttttattgtttattctgtaccagttttttctgagttgtgggatatgttttcaatctgtatatttattattatagaaagctttatagatttatgacattttaatattctgatctcttcaggaatgccagtttaacttatgtaaatctcctttgtttattatctttactctttaaaaataactatttatcttttcattagaagtatgatttctgaaagttatgaccatgatttgtttttagtctgtttttcactttcctttaaggtctcctgttgctttataatgttttctttctggtcttctttaaaaatatgtttctgtaatttctttgagactgtttttctgaagtctttctggttttttatatgtattatttggtggttgaaatgaacttaaagtgaattggaaattcaagaatctcatgactgtgcttgcttccttcagcagcagcatgcttacgactcactgcagcctgagaatcacttttttgccccgtataatgtggggaaggtaaaaggacagttgagaaccactggtgtattcgaggggaaactgattagggaccaactgggatgtgaacttaaaaatagggctttacacatgaagaaggtggcattcttagttggaagtgacaggaattcaactaaaataaatttagacaaaaaggaaaactgacttctaactaagtttatagaagggcaggagtagtaccaggtgtaagaaatcaaagatctgtttggatttcttgttgcttattcttcgttttggcttcattctccttgagacttgaattgcggctattggcagctctcaggcctttatggcacagcttcccaactctgaaaaaccactccctcctgtggccttggggtaccgggggccttgtttggcagtcctactaraaacatagttgggcgtgaggtttgaagctgggtagtattttccaaaagaaataattcaggtatgggcttgttctcaggattctgaagaatacagacgtattccttttatgtcctgtagcctaattaatgagcaattttaaaggaagaaaatggacaactaacatttattgtaccttaagctgggtcagactttcgcatatacaatatcytctccgtgttgcaacgttaccaagggctttaccatcctttactgataaggaaaatgagactcaaaaaatagaaatgatctgtttaagttgcccaggctagtaatacataatatcatatgctgtgcccaaattttccattgtgaagtgacattcagaaatcctcaggaatcatctttatcaaatttatttctataaaayaggcgagatcaaagtaagctgtttgtgtgacactataaactagtgttagggcataatttcggtattgtgaggagttcctgctgcgacaaatcttggcagagatgcatgcttatgctattgtgtataatttatgcacaagcaacaacgtacttaggacttaatattgaagaaccctgacgcctgtgattgaagaagctgtgataagcagggtgaaatattacaggtagcagaatgtcagtaagtgttattttaggaatgtggtccagaattctgccaagcaaatccctttgggaagcatattgacaaattctttttaagggatcatctctgatctgtttggcttgtctgtttcattttccttatgtttttgaagcacagtaaaataaattgggtggaatattttttgttttgttgttttttgagacagggtctcactctgtatttcccaggctggagtgcattggtgtggttttggctcactgcactttctacttcccaggctcaagcagtcctcccacctcagccttccgagtaactgggactatataggcacatgccaccatgtccggctaatttttttttttctttttgagacgaagtctcgctcttgtcgcctaggctgtagtgcagtgacacgatctcagctcattgcaacctccttctcccaggttcaagcgattctcctgcctcagcctcctgaatagctgggattagaggcacccgctaccacgcctggctaatttttgtatttttagtggagatggggtttcaccattctggccaggcttgtcttaaactcctgacctcaggttatctccctgcctcagccttccaaagtactgggattacaggcgtgagccaccacacctggacagggtatcactatagtgccaagcctggtctcaaatttctaggttcaagcgatcctcctgcctcggcctcccaaagtgttcggattagaggccaccgagcctggccttgattttttttttttttttttwttcaagagacatggtcttgctccaagctggagtgcattggcaccttcttaggttactgcagcctcaaacttccgggcccaaacagtcctcctgactcagcgtccccagtagctaggactgggtctctctatgttgctgttgcctaggctggtcttgaactcctgcccttaagcgatcctcccaccttgacctcccaaagcactgagattacaggtatgagccactgtgcctggccaaaaatgtttttgattaggaaatcagctagccggtagccygtgtcgtggtacaaataaaaaattctaattttaagcaaatttttaaagtttaccagaaatttgtaaaatttattaacttgatgcatcttgaaatctaaagaggaaatacacctttgtgattgctatgcttgacttttttcagtattaattaatggaaggttgaaggacgggaacgtttttgcagttacttttggtgacttggtttgtggcatttttatgttttaaggtaacagcagtttattcctctgataataaggtcaaaattattttgacaaattatctcaatagttaggagtaattatgtactgtttgggtaaaggggtctgtctatctatgatctcagaagttcaaagtgaagctgcagtaaaaatagttactttacagacatacaccttgcagccaactgtgttgtataaataaacttgacaggaactcacattcccggagcaggagaccacagtcacccagacacaaaggaaaatcgttactaggctgtaaacctcagtttgtatttggctttgtagaagttagacttagccaacaattggtcttggcaaagtacacttaggcggtggctcacgcttgtaatcccagcactttgagaggccgaggtgggcggatcacgagatcaggagatcgagaccacggtgaaaccccgtctctactaaaaacatatatatataaaaaattagccgggcgtggtggygggcgcctgtagtcccagctactcggagaggctgaggcaggagaatggcgtgaacccaggaggtggagcttgtagtgagctgagatcgcgccactgcactccagcctgggctacagagcgagactccgtctcagggaggaaaaaaaaaaaaaaaaaggagcctcttttcttctgtttttttgtttgtttgtttttgttttttgttttttgtttttttgagatggagtctcgctctttcgcccaggctggagtgcagtggcgcgatctcggctcactgcaagctccgcctcccgggttcacgccattctcctgcctcagcctcccgagtagctgggactacaggcgcccgccaccacgcccggctatttttttgtatttttggtagagacggggtttcacggtgttagccaagatggtctccatctcctgacctcatgatccgcccgtctcagcctccgaaagtgctgggattacaggcgcgagccacagcgcccggccaaaagtagcttattttcttagtagtcaagtacaaaatgacgtctagttgggtcttggaatgttattctgagaatttgtattttgctgaggtgcagtgaagttttacttttacataatgatcgacaatactgaaaacattattttaggctatattaaacttatttttagattaaaaaaatcttttgaggaaaattttaaatgcccaataataccaaagtagacagataggtataatgggcctccatgtactcccccagcccctgaagtgattaggtcatggatcagcctcgtttcacctatcttagccctctccctaatgactgtgaagtacattctaaacatgatcatttgtctgtaaatatttcagtatgtatctctaaaaatggtaagaaaacccccagcacaacacyactgccaaactcaaaaaggaaacaacaatttctggatattgtctaatgtctcattactcttcacattttcatttgtgtcataatcgtcataaatttaaaaaaagtttgaattcatttctctcttttgtgctccttgcagtatatttgctgaagattctaggtcttgttctttagaatatcctgcagagtagatcttgctaattgtgtcccagggatgtccttgaacatgtttctctgtttctgttctttgtgaattagttattgtacttaggggctcaaacaggttaggtttgtgaggtgagattacttcatatgtggtggtttgttcatttttcaggagactgtaatatctggttgtcttttaaaatgcctggattaaatgataaaatggccaatgtttcagttatttttcattttttagctggagtatttttatagagagaaacctcatttgatcaaatagtaattactattttgattacttggcaatataatttgtgtaataaaaaaggatcacactaaatgttgattcttttgctttttaaaattggttttcagaataacaaaatggtttcccagcatcctgtagtggtgataaatttgtttcttgtttttgatttcacagttataaactcatggatttaaacttgcatatttcaagcattcgttgttactaactttattgacactcaaattgtcccatatttgaccagtggaggcctcttcaagctggctcttgagtcctttccacaataccatagtattactcgatagcttcctttttgtctgctatgtgtgagatgaacctaacatttcttgctctagacctggagtcagccatttgtctgaagagccctggtccgttttagtgataaattcatatttagaaaccatattctgggcactactgggctgttcattttttctagaccttttcagtggatagatctgagaactatatatttgaaagcaatgtcattttatattcatctaattccgattcagaaatgcagcgtttttacttttcatatgctctttctgttcttttttagtcttattcttggtaatgactctatcttagcaagtctgctcatgcattattttccatgacttaacacatagaagtcattactctcaaggacactaccttgtccctgggtttcctttttattcatggcttgtagaccactctggcccacagtgatttccagattcatagcatgcaagcataactcccatttaacagtcactggatactccaggatttactgagttttaaaaattgaagtataacattgacaggaaagtacgcacatattacggacggcatgcctctaccagtacaccagaagtccgttccatgcctcttcccagatactactctcacttcctgctccaaaagacagagagagagagagagagaaatactatcgtcctgatttgtaatactgttggttagttttgcctccwttagaactataaacttttgtgttttagcagtcatgacttttgtgagaaagagaggtctttctagccctttccaactcttaattttrtctctagatagcattcagaaaagatgttatcttcatctttggcattctcaaaactcctaataccttaggaatataagtagaaggtcaagcatggtcacttttgggttttagtttcccttttgatttacagaagctctgtttgtattaggaattttaaacttctccctattttgcaaatattctttcccagtcatttgtatttagactttattgctgtactaaccttaaagtattttgtgtagcattatttgactgttgagttttgtgtcctgcataggaggaccacctccactcaaattgatgtgaaaaaacactattctatgttttcttttagttaggttttatacctctttgtttatatctgtaatctgtctggatttggatgtagtgtgaggtatccgtatcaacatttaaacacagataggatgttttaacatctttcagccttttccattaaaataaaacttgcttgaatttcatttacccgtgactactacacttttccatctaccgtcaaacttttagaaaaaatttccacttgggtttttccacttcatcttctctttgtccactcagcgttgcctgcatggattccaccttaccttcacactgacactgcttatgccgagggcaactgtggccttttttttttaattgaatccagtggactgaatatagaccccttcttccctgagctgtatgtgtttatcatcattggatagtttctcctttaaatgcatctcctttagctttaataaaatgttttcttggcttttgtttttttttttttttttttgagatggagtcttgctctatcgcccaggctggagtgcagtggcgcgatctcggctcattgcaagctccgcctcccaggttcacgccattttcctgcctcagcctcccgagtagctgggactacaggtgcccgccaccacgcccggctaattttttgcatttttagtagagacggggtttcaccgtgttagccaggatggtctcgatctcttgacctcgtgatccgcctgcctcggcctccctatttcactggcttacctttctcagtttaccttgtgccgcctcctgttttttgtttctcagttgttaatattttctagaattcattcggttacatcccctgcagtttatattaatgcttatccttgggtgatgcatcaacttacaacctcagtgatcagccatattctgataaccctgaagtctctatcgtcagctcagatttttttttctttcttttttttgagtcggagtttcactctrttgcccaggctggagtgcagtggcatgatctcggtgacctccgcctcctgggttcaagcgattctcctgcctcccaagtagctgggactacaggcgcccaccaccacccggctaatttttgtatttttagtggagatgaggtttcactgtgttagccaggctggtctcgaactccctcacctcagatgatccacccgccttggcatcccaaagtgtcgggattacaggcgggagccaccgtgcccagtagatttctttttaaagcaatgtattttttgtccctaacaaaaggcatttaataccaagcccatcaccatttcctcccctctcttgacaaacctcctcctatgtttctcatttcagtgaatgaacagatttctacccttgcacagaaatctggtgtcagaaaaacagggagggaggaattgacattataggtaatggtgttaaagtgtaccactcagtggtgtttcgtgtattcacgatgttgtgcagccagccaccagctcgatctagctttcagacgttctcatcacaccattaaatcgccatccctataccccttaagtaattacgccccctttctcccttccctcattgtctaatctactttctgtctctggatttgcctcttctggatatatcatatagaataagtcatataacatgtgactttatatgtctgcttctttaacttagcctgatgttactgagcttcatatattagtacttcatttctttctgtggctgaatagtatttcattgtatgtatatactgcagtttattcatttgtcgatggacacttgagtttctgccttttgattattacagcaaatgctactacagacattcatgtacaacttgctgtgtggacagatgttagggtatatacctagaagtggaattgctgggtcatatggtaactctgctcaactttttaatcatatgtcattttactttttttwaaaaaaattattttttaaactgagacaaggtctggctctgttgcccaggctggagtgccctggtgtcatctgaggtcactgcaacctccgcctcctgggctcaagtcatcttcccacctcagcctccccgagtagctgggactgtaggtgcacatcactgtgcctggctaatttttgtactcttttgtttcttttttttggtagagacaggggtttgccatgttgcccaggctggcatcaaactcctgggctcaaacgatctgcccacctcagcytcccaaagttttgggattacagcggtgagccaccatgcccagctcatgtcatttttgacttactactttaagccccacttctttaacatcaccaggttaggttgattgattctcttctaaatagccttgttttcttcattgtttcgactactatatactcgaggtacacttttcaagattacttgaattgcttgctttttgtttctttgttctcatcatgcctttttaaacaatcttctacatactacaagattggtttttgcaaatgtaaatctcatgaggtcactccattgtttaaaagaaaaagaaaaaaagaaccacccttcaaaggcttatcattgccctctggataaagtccaagcatgcagggcttacaaaggccctttgctgtccagcttttgacattctgtttagtttcagctgctcccctgccccccgccgttccagtcacatactgattgccctatttcaagtttttgtacatgctcctctacctaaagtagggttcagattctaaaccttgaattccctcacccaaatcctttatttcttttctttttagaagccttttcttattcttcatgattatgttatgtgcccttcttttttgtgtgccctcaaattcttgtactgttgttggagcacattgtaattgcctgtttacttctctggggatcaggagccgatgttggtcaagtgccagaagatgtagatagactgaaagtacaattaataggaatttagcagaagccaaaagattatttgataaattatttagggaagacttcatggagggggctagtattgatagagaccttgaaggaagcattcatgaaggcatggtaaggttctatcactttaaatggattaagcctgttaaatattcatgcatctagacctaggaagattcatgctgggggctgaagccatgacaaaagtgagacattggacatttttcaacattgcttttgtattacttacatggaacaagcaaaggacacaattatgcctgtagaagaaatrcatggaaagaatgggcaaaagatttcaagaacttgggggttttgacaagagtaagaagcaatgatatgctttatggaaagtgtaaggaaattttcaagggtaattttgaccatgtatactaatttcagagcttactcacctatgtttataaaccctggacttctggtggaaaatgcaacaactaggtgatttctggatatattatagaatctttcacaagactcttgtgtacagtgttgtagaaaatggtccgagtaatgtaatggtgtttctctagaaaaaggttggaaatgagatcagtcatgtagaaaataactcctcacagtgcatttgtgtgtgctgcactctgtycctcagttgacaggaaagtgggactttctgttttttaatagaatgtctgcaacatagttggcgctcagtacacatatgcgtgcataaacaaaataacagtgaaaatgctgttcccttcttaatgtgtttgcactttcaatatctttaaaaagtattttagattagccactttaaagtaaaagtacatttcttgtgttttgaaatacagagctgattttaactatttgtaaaagtctagtttgcctgttatgcaaaaatgttagacttataaaaatctcccctcacatttcaagaaaagawgcacttcatgtttaaacataaattttttatttttatttttgagacggagtctcgcattgtcacccaggctggaatacagtggcatggtcttggctcactgcagcctctgccttccagttcaagtgatcctcctgtctcagccttctgagtagctgggattacagatgtccgcctccatgcccggccaatttttgtatttttactaaagacagggtttcaccatgttggccaggctggtcttgaactcctgacctcaagtgatccacccatcttggcttcctgaaagcgttgagattacaggtgtgagccaccacgccctgcctaaatataaattttcactattggctttctcctattttgctggcatgttgttaaatcgtagttgttgaaataataccatctcttgatttccccaaaaattaatatctcctcagttacctaaacattggttcagtcctttgtagcactctgagttatattatactgcctttcatcattagacaaagctgcctgagaatgatggcaggtagtatacgagaattacacacctgttgagactcccagcaagtccttttcaaaccactctactcctgtgtgttctttgtccacactttccaatttgagccaatgagtactcagttccactggccggtaaaatgtgataattgtgtgggtgattgatacatgcattcactattgtgattgttgttgtgttggttcctctggtgtatatcagtacttattaaattgtgtgtgtgtgttttttttctttttgagatggagtcttgctctgttacccaggctggagtgcaatggcgtgatcttggcttgatgcaacatttgcctcccgggttcaagcagttctcctgccttagccttctgagtaactgggattacaggcacacaccaccatgcccagctaatttatttatttatatattttttgagacagagttttgcccttgttgcccgggctggagtgcaatggcgygatcttggctcaccacaacctctgcctcctgggttcaatcagtttttctgcctcagcctcccragtaactgggattacaggcatgtgccactacgcccagctaattttgtatttttaatagagacggcgtttctccatgttggtcagkctggtctcaaactctcgacctcaggtggtccacctgcctcggcctcccaaagtgctgggattacaggtgtgagccaccacgcccggccaaattgtataatttaagtatgtgcagttcactgaatgtcagttatacctcattaaagttgtttaaaaatttctcacatgatctgctcaccatcaggaggccagtactttattaagtctggtgtctctggaaacattctgggctctgtaccgctgctcacctgctccttaaggtccctgtcttggcctgtgtgcccccaccttgccagttcctcgcctctcttgtttcccaccctgtcatcctttctccatgccacagcactctctttagaggaggagaacctcacgatgctgcagccattctgtatgctccaggtgttactcttaagctgctcctctgtcccagaagctgtggctctcagagggtcgacatatacagacaagacatatggggcccctgctctccttgtgctcagagatggatgggcacacaggagcacccactgtagaagcaggtccccaagactacagggacaagtcaaataggtgtacaaatgttagtataaatgaaagttattaagcgcagtacattccaatgaaaaggtatgattagacactctgaaagtataccctgaagacagcagcataagaattgccaacatgatttgatttccagggctccctctcaatgagaatctctgggggacgggcctggatatctgcattttaacaagcttccttaaaagaccactgtagggccacttagaatgacaagagcctggctggataccagtagaagttgatcttctggatagtttgctttacccagggctttcttacagtataggcatgaaaatgttttggccatcaagtagcattttgcctggcaaggtatatctatttaatggtttaaaacttacataaaacatgtacgctcaagttctgtaatttatctactggatgcaaattatgtgcttaaatgtattgattaaacttttctttttccacagaactcaacaaaaatccagtggaaggcttttctgcaggtttaatagatgacaatgatctctaccgatgggaagtccttattattggccctccagatacactttagtaagtataatggaactgacatcttcaaaatggagctcttttaatacactgaattaaaaactattttggcaggctgggcacggtggctcacacctgtaatcccagcactttgggaggccaaggcgggccgatcatgaggtcaggagttcgagaccagcctggccaatgtagtgaaaccccatctctactaaaaatacaaaaattagctgggtgtggtggcatgcacctgtagtcccagctactcaggaggctgaggcaggagaatcacttgaactcaggaggcagagattgcagtgagctgagaccacgccattgcactccagcctgggtgacagagtgagactccatctcaaaacaaaacaaagcaaaaccacaaatattttggcaaactgacatgaaattattttttaaggagcaggagaaatggctgtattcaatatcctttgtactgaatttgatcatggaagagtttttgtgttttgcttgaagctctaatgtctaagacctattgctattaaaaataatagtttcaggccgggcgcggtggctcatgcctgcaatcccagcactttaggaggctgaggtgggtggatcacctgagaggtcaggagtttgataccagcttggccaacatggtgaaaccccatctctactaagaatacgaaaattagctgggcatggtggcatgcctgtaatcccagctacccgggaggctgaggcaggagaatcacttgaactcaggaggcagaagagttatataatttttggacattttaattgagaatgtattacacacatcagtgttttaagaaggctaaggagaactttcaagatcgtctcttttcatggttctctacttgagtccccaccgaatactggttagaatctaggtgttcttatcccaaactaaactaatggtcactttctcctagtttattgaaagttattgttatgctctatgataatctattaactgactattaattgttaaaccaatggcttaaggatagacaacaatgtagtggtgtgaaagagcagtagaagaagagaaatagagtttaaaaatatttcatgtcgtacatttctagatgcaaagaccacagtcttcttttctgctctgagtgtttgcagactaacttaaatttactagtatgtattgttttgtaagatgcatctgctggcttggtgcgttggctcacgcctgtaatcccagcactttgggaggctgaggcgtgtggatcacctgtggtcaggagttcaagaccagcctggccaacatggtgaaaccctgtctctactaaaaatacaaaaattagctgggcatggtggcgggcgcctgtagtcccagctgctcaggaggctgaggcaggagaatcgcttgaatccgggaggtggaggttgcagtgagccaaaattacgctactgcactccagcctggtgacagagcgagactccgtctcaaaaaagaaaacaaaaccgtctctggtctttggtgtacatttttaaaagtgttggctgttgaattgagatgtgaatcacagcaatatttctggcagctctgctggagtgtgtatatgctgctgagaatactggtggtcacttctggactgtgccttcctgagatcactagcctttgctcaggaaagagagagcatattcctagggcaggacctgagaaaggcaaaggaaggtacaggggaatgaagaaaggtttgttagaagtaagccttttagaatgctaccaagaaccatgtacttcatagaatgcttaaaaaatatttgttgtcggccgggcgtagtggctcacgaggccgaggtgggcaggatcacctgaggtcgagagttggagaccagcctgaccaacatggagaaaccctgtctctactaaaaatacaaaaaatttagccaggtgaggtggcatatgcctgtaatcccagctactcgggaggctgaggcaggagaatcgcttgaatccaggaggcagaggttgcagtgagccgggatcgtgtcacccactccagcctgggcaacaagagcagaactctatctaaaaaaaaaaaaaaaaaagttcttaaaaaacttcttagcagaaagtagtgaggttcttgtaattatttcagtggaatggagagagtagaggccatcttggaattgtttgaagagcactattggaagtgaatatatacaccttacgtttaaataactgcctgtgaagggaagtagaggcttgtgctggggggaggggtgttataggattgaaaataaattagtataggctcagatggtacccagacctaagtgattaattcaccactttataattagataatagaaatactgtaccaaaattctgtaaaagctgctgtgattatctctctgtgccatcattagccctcatgtagtcactagagggcgctccactctcttttcagtctatgtgattgataactggtvccgttcaaggattactttgagactcctatagttgccasaagtcttaattcagtcatactcatatttatatagcattacatttttatttttattaatgagtctttccagtgcagtagtccctaaggcctttctatgaaatgtacattctgaaactggtgtggtataccaactgttttcagactgattatcaaacagtatggataaccactcatatccacagaaattaaaatttcaggtagaagtggcaataggtttgtagtacggaagtttagggtggatacagtggctcacgtctataatccctacactttgggaggccaagggtggatcgcttgagctcagacgttggagaccagcttcggctacatggcaaaaccctgtctctacaaaaaaaaatacaaaaataagtcaagcatggtgatgcatgcctgcagtcaggaggctgagcccaggaggtggaggctgcagtgagccaagattacgctactgcactctagcttgggcaacagagctagaccctgtcttaaacaaacaaacaaaaccagaaagtctaagaaacctggatatcactgtatcattataacattttataaattattaatgaatgatgactgtataacttttatctctcttttcctttcatcaccagtggctggtctgttcaaggagtatgtcttatttatttattttgtttttaagcactggcaatgatatgaaaaatctggagaatcttaagattatgtgttttgtagtattgccttgggtagatatagaaaatgaagaatcagttaaccaaaactctgaattacattcttttacagttgcaaaattctattccagttataaattattttccagtcctgtgtgagacatagaggcagaagccatctcttctgtaatgaagttctggagggaatgaacctagtgcctacattgcttggaaatggaatgatcagtggtaatgccatgcggtttatcacgtagtgttcaagaacatggactttggggactgcctttggttagctctctaactctaccactcttcttagttgagtgactttgaacaattacttaaatttggtcttagcagtttcatttctagggtaaaaacyctatgcttaggaaatgtttcaaaygttccatgttctattgcttataatagcaaaaaaaaaattattttttccccttttgcrgttttattatttatttttgtaaatgtcaattataattcgaaggacactttgtagttactaattagactatatgaaaaactgtacagactgtttgtactataatttgtgtccctaagagattaggggactcagtaacagaaaaatcaactcagaagggtcactgctcagcagtccacataaccacatagtagagcccaagctactggttgtgagtagaaagagacttcatacaaatatcttcacatgtcttctagcattatgcccctaccaggaaagggaatgtctgtcacaattttttttttttctgctgtaagataaagaaaaggctgtatcccttagacacatacttaatgaagacaatctcaaaagaagctccygtgtttttctgttttcactgttcttttctgaagttcacctggatgttccagagcagttttctaaacctttcattgttggttggccttttgtagaattcttcagcaacacacaatacagaagacacaggctaaaatagttctcacaaatacactttgaaataggtgtatttggatataaatacaacttgccattccattattttttttctcatgactaaactctaaatttttaaaaatggagattttcaaaccagtgatgtgcaaaagcccattctcatgacacagtcatttaaacttattaagtatgggaaaattttatttcttccctttgtcttgtggaataatttaggttctcaccctgggcatgattcacaaaatagagtaagaccacagataaaagtcacatagaatcacaggcaatgaagaaaacttctaaaaacaaatatcccccagtgtccagtatcatccatcccagcagtgatggaaatgatggccaccccaagattctgaatggagtgcgtgaagccatatgcagttcccagttgatgttcaggaactacagatgccactgttggccaaaatgcacaggcaagcgatgaataggagattcccagaagacacagcaacccaagggctccacatcataaaggccagcatcatgtgggacacaagagtggctgcaaccacacgcagaacccagatgctgttcttccccgtgtcatccactgggagcccaaatactggggtgtgggagctgataacgacatatacaacactgttcattgcacttgctgcctggaaagaaaatccaaatttgtctgtaaagaaaactttcccaagtccaatraaagggaacatggcaacacaatagcagacacagatgataaatatgagccacaggggtaaggagaaatcctttacatcagttaatgtaaaaacttcccccccctttttttkttgttgttgttctttatgaaggattctctctgctctcrcatctaagtaagcaagagccaaggaaggcacagattagtgaaagaatacattttatacccccaatcttaagtgtgaccccaggggttgtgtgaccagcagaaccccacgaagcttcaatcttagaatacagccaactcacgaagttcatgtttaccgtacttccaattctagccatgctaaattgttggagtccagacaccaggtttaattctttgtctttaaaccagctgacagcatatgtcctgggcaactgctgagcactccccaccaatccaaacacaagtctttcaaattccatcagccaaaaaacattaaatattccacccagaacaaaacaacctgtccagtgcaaataaaacagctaaaagtaattgtgccccatcatattccaaatactcggtcttttaaaaagccaccaaagaaacacaaaactacattgggccaagaataccaggcatatagcagcatgaatttcatggtgttcacctgcctgttccgtttatcctgagtctgaagggcagcaggattattatagcaaaaatagctgctgaagccaaggaaacacatcaataacagcatcaaaagtcatagccaggtgactggaggccacagaagggccagcagcacccatgctttctcatccttctcctccattgcgcccgtgggaggctgagaggcaaaaggggtgacaactccaggacctggcagaaaagcagtgcccacggagcacagccaagtcagtgatcacatgactatgtgattctgactatcrtagaataatagtgaactgtggcggatagaatgaatggacaagagacagctacaacaggactatagattaatagaacaatgttgagcaaattgcagacggcagcatacagcacattatttacataaaataaatatggcagtatggtaggatttgatccttgtaagatttttataatttaactcaaaaacagtaatggaggcctcatggaaaaaaattgaactaggcctgggtttttaaacactttcaaatgtgaaactgctggttacatatctctctctctcttttttttttttttgaaaacagagtctgactctgttgctcactgcaacctccgccgcctgggttcaagtgattctcctacctcagcttcctgagtagctgggattatgggcacctgtcaccatgcctggctaatttttgtagtttttagtagagatgggatttcaccatctcggccmtgctggtcttgaactcctgacctcatgatctacccgcctcagcctcccaaagtgctgggattacaggtgtgagccaccgtgcccggcctacatacctctttttaatatcatgrtagtacttatactatagtatctgtgatgaagataatatgtaatgaaagatattttgaattaattggtgcctttttaaattttattttatttatttatttattattattatttttggagacagagtcttgctttgtggcccaggctggagtgcagtggcacaatcttggctcattgcaacctctgcctcccaggctcaagccattctcctgcttcagcctcctgagtagatgggattacaggcacctgccaccacgcctggctaatttttgcatttttagtagagacggcgtttcaccatattggtcaggttgttttcgaactcctgacctcaagtgatccgcccgcctcagcctcccaaagtgctgggattacaggcgtgagccaccttgcctggccacagtcacatctttctatatttgaaaaatagtggatatgtgacatgttaatgtgtagtctacagtgttattctactctatgggttttgggctttctctttgctaacttggctgctcggtagaagtttgcacgcacaagttgggtactagttagttaagcatcaaaaaaaaaaaagcaggtaggccaggtgcggtggctcagaaggtcaggagttcaagaccagcctggccaacatagtgaaaccccgtctctactaaagatacaaaaattagygggacgtggtggtgtgcgcttgtaatcctaggtacttgggaggctgaggcaggagaatctcttcaacccgggaggcagagcttgcagtgagccgagatcacgccactgcactccagcctgggcgacagagcaagactccatctccaaaaaaaaaaaaaaactaaaaaaaggaaaagaggggaggggcaggtagaatttccacaggtaaaatagaagaagaggggtccacagataggagaaaaactcagaaatgctatggttgcttcagagtgggcaaggccattttcagatagagtgaaaattgtgtgctttaaatttttagggctactcttttagttgaatttggttgacattttagagattgaaaacaatttagagggtctaagtcagtttttcatgatgaggattccagtcagctattatgaagctttttagtgaatgtaaccaatcaaaagtaagtgacgtgggaaagctgacttaatgttgtcaaggaatcaagtggcaagtggctgccagtagaatcaagtgcaggggctttgtggcagtggctttgatgtccttttacattgactctttttttgttgttgttgagacrgagtctcactctggcacccacgctggagtgcagtggcacaatcttggctcactgcaccctccacctcccaggttccaacaattctcctacctcagcctcccaagtagctgggattacaggtgcacgccaccatgtttggctgttttctgtaattgtggctttcaaacccatarttagaaatactttacatcatgaygcagtgcatacatatgtatatatagattagtgaataaaacacatacatagattatataactgaaactacttgtgataaactctgttttctatttttgttaacaaaaaaactttgatagtgactcattaaattgcttttgcagccctgtttgaaaaactagtccatgtaatcagtatatcctaagacccattttggcactaacttacacagagcaacaggatcagtagataaagacttaactctttttggtgtaatgcactcttcacaacagctattccagtctctattccctcaagccctcatgcttcttccttwcaatagataacctcatcagttgtgaaaagtaaggcgctatggtgggccttacttcatttctacatttcttcgaatatctcttttaaagcgcttgttttgtacagtttccccatctagttactatcttcaactgttaaattttttgtataaattgtcctgtttattatgcttaagtactttactaccctgttctttaaccctttacagctttttttcctattgctttttactaaaaaaattgtattatcaaggtcactgactttatactctgagtcctgtggcatttcctaattattcagaaatgtttggtgttaatgatctgtctctttttttaaacttaatctgcaccttccccatgtcttatgatcagaaaaagcaataaaaattcatacttgcttgtgaacagttcaagctatattaaaaagagcagagagtaaaagatctcgtaacactaactattgttagttaactattgttatgtattgatgtcctgtttctggacatttttctatgtgtatacaaacacacccccaatttttcacttgttctttcctttcttttcttttttcttttcccaggctggagtgcagtgcagtggtgcaatcacagctctctgaagcctcaacttcttgggctgaagggatccttcccccctcagcctctcaagtagctagaattacaggcatgagccactgtgtccggcctcccactttttctttaaagacaaattagcttgttttagaaatacctgcttttaaaaatgtaacaatagattcctcatatcattccatgacaacacttactactgatatttttcttggtagatattttccttctgccactaaaatgataagctccacagtgctctttaatgctttgttctctgttgtatccttttacgtagaccaatggttagagtaactgggtaatcaatgtatatttgttcagtgaatgaaaaccatttaatgagctgagaatttcatttctcactgatctgaaacaaccacaatcatgattctaatggttggacacattgaacaacagaagaatcagatgtgcaaatggtactgcaataaagaaatttaaagaggtcaatgtactagaagggacctggtggctagtttagattttagtcaaataaaatctttctagaggtaacgtttaagctgagtaccgaatgataatcagaagacaaagggagaaaagtatttccaacagaggaaatatttagtaccaaggccgcaagacagraatttagtatttttgccctttaaggctgacttgatctctgtggttttagttaatgtatacaactcattgtattgttcttttgatgattccttaagaatgactgctgattaagtgtcagtgatctggaggtgtattgtctaaaatagcagtcacagggcatatttcaagtggttggtggctacattattggacagcacaaatacagaacatctccagcattacagtttggttttacagtgctgttctggaaagtcactcttgagattttttttgctgctatacccctggagtttgacacataaatgccgagtaaatacttgttaaatgatgaaatgaataaatggatagatggaggcaatatatctattcctagataaggaaaaagaaaatgtccataagttttgagatgagaaagggtttgatgtgtttgaggaatagaaagacgactggctagtttcaaatcaacatagagaaattggtgatgttaaaccttctgaattttgttttaagtgcactgggaagtgatggaagggtttgtagcatagcagtaatatgatctgatctgatctggtgtgaatgtctttttagcagatgatttcattttaccagctctcttgaaagtttaatcaatgtgatagccatgacagtttattaaactacttakttgagaaagtaactgcctgtgggaatccagattatttgtttacttcatttttgatgttagtgctagcacccttgttttatatttgttttaacacttctatacttaaaagcaggaacttataggcaagaacttctttttgttcttttttccagtgaaggtggtgtttttaaggctcatcttactttcccaaaagattatcccctccgacctcctaaaatgaaattcattacagaaatctggcacccaaatggtaagtttatctagttttacttttacatttgcagatttgatggcctgttattgaagtgttcaaggtcaataagaaagatctgtttctcagtgaaattgctttggcatttttgtactgttcattgtgcacatggctgtgtactaaaacctttaaaaggaggagaggccaggtgcagtggctcacacctgtaatcccagcaggccaggcaggcggatcacttgaggtcaagagttggagaccagcctggcaaacatggtgaaaccccatctctactcaaaatacaaaaattagttaggcatggtggcacacacctgtaatcccagctacttcggaggctgaggcacaagaatcgcttgaacccgggaggtgcaggttgcagtgagccaagatcacaccactgcactccagcctgggcagcagagtgagaccgtgtcccaaaaaagagaaggagaaacagagatcatgtggaaaaagttattttttatttatttacttagttttcagtttggtttgagactcgtgttttaaaccagagggcatggttactgagggataacatcaatagaactcctataattgaggggataattatcaaggtattagatgattcactggctattacaaagaacacagaaattatgaaacctggttctgtaacttatagtttttcatattatttttataccatggayaactcttctatgtgtattcataggtgtaagattacyggcagtgtcatatgaaacaacrtattacattttttaagcctggaaagcatctastatggctgtgcacgtagtgatgacattgactttttttacttaaagaagagctaccacttcaaatccacacggtggcagttctcctgcctagccagctgccactggactctctcccctgtatataagcccccaataactacgtcttatttaaaaattaaaaaaaaaattctctataaagtaaaataaagtccccaaagtttaggccagataagctatatttataaaacagtctctctgaacttttggctttgttttgtatgatagaacttgcagagatttcttttctaattattttgactatgtaatcagagttgtctctttaggctattatactaatttgcatttggcttcgcatcatcaagacttctgggtgcagggaatagaaacatatagattagtttaagctggaatcagcgagacaggaatgaatgattgaatgaagttaaacaaggatttatcggaaggatatggaatacgtaatagaagccaaggcttgaaaaccagatgggcattaggagagactggaactggcaaatggagaactactgggagccaagggacttagcgtattttattgcayctaaggcagcagtgatcgtaaaagatagtgatttttcctaccagtaagaagaggaaaatatctctaacagttgatggcagaatgcattaaccgtattcctgcatgatgcgggcatgcatgaatgggtgacrcttgcctcttgtgctttggcttttcttttatctcttcctaggctttcgacagtttcttctaccttcacttgcattacttgattataataggcaatcgttttgcacctatttcgaagatgtaacagattctgaatgttggcttcaccacagactagctgtgtaactctaggcaaaccctgttggagccttaagctagctagcttgccttcctccctccctccgtctctccttcccccactctgcccctccttttccccttctctccctctctcgctccctccctccctcacktacgtttctcccattccgtcctttttttctaagacagggtctcactctgccacccaggctgcagtgcaatggcatgatcacagctcactgcagccttgacctcctgggctcaagtgatcctcccaagtagctgggatgacagggacacgccaccacacccagctaatttttgtttttttttgtaaagasggggyttcaccatgttgttggccaggcaggtcctgaactcctgggcacaagtgatctgcccactttgtcctcccaaagtactgggattacaggcattagctaccacgccaggcctatgttttctatctgtgaaaattagatgaaaacatacatgtaagcaaatacatgggagacttcccttctggtaaaaagaaagagagcaatcacctaggtagtttaagaggacagctgataaaatggtggtgtgttttgttttaaggttgaagagacttttttttcttttyttttyttttcktttctttcyttttytttykttttttttttttttgagacggagtctcactgtctcgcccaggctggaatgcagtgggactatcttggctcactgcaacctctgcctcctgggttcaaacgattctcttgcctcagcctcctgagtagctgggattacaggtgtccactaccacgcctggctaatttttgtatttttagtagagtcggggtttcaccatgttggacaggctggtcttgaactcctgacctcatgtgatctgtctgcctcagcctcccaaagtgctgggattataggcgtgagccaygcgcctggtcttagatggaattttgaatgaagatgatgcttggcttgaacttcattctttaggctgtgaggactcrtttaattcatgacatttaaagctgtacatattgtcatgacaaaaagagaaaatgacaaaaaataaaaaagctatgtaataggtttctcttatattttccttcttgaaagattacactcatagaagattggaaggggaagtcagagagatagcagggaggtagagcattttagcaataatttgagtaaaaaacaataaaaacktgaactaagaatagtgttgcaggaagggtaatttagtttctttgacttgactgccagaggtgaatggtaaaggagaagtaagagtttaggattgactggccatttacaaaaataattatagagtgaaaaccataatgaaataccactttttacccactaggattcctataatcaaaaagataataacaaatgtcaatgaggaagtagagaaattagaactcccatgcactactggcaagaaggtaaatggtgcgggtgtttggagaagagcctggcagtcctcaaaaggttaagcatagttaccataggaccctgcacttccatcctaggaacctaaccaagaaaactgaaacacatgtccagaaaaactsgaacacgagtgttcacagcagcatttattattcataacagccaaaaagtagaaacagcccaaatgtctatcagctgataaatagaaaaacaaaatgtggacccatataacggaatattatttggcaataaaaagaaatgaattacatgatattgttttctaaagaaaagaaagaaatgaagtagtgatacttgctacaacatagatgaaccttggaaacattatattaagtgaacaaagtcagtcgaaaaaggtgacatagtgtacgattccctttatatgaaatgtcaagaatagacaaatccatagagaccgaaagtaggttagtggttccctactgctggaggggaggtgggggggattgaggaatggttgctaactggtactgcgtttcattgtagggtgaaaaaatactctaaaattgattgtggtattgattgtacaactctgtagacatactagacagaaaccattaaatcgtgcttttcaaataggtgaattgtatagtaggtgagttatagagatgttataaaattattataggggaatagttttatgtgactgaccttacatatattcagcttttcttgaggtatacttgctacacccagttagataattagttaaaccagtccagggttcagcaatgagcttaagggccttggaagttactgtatcaggatgatagataacatgataatgaatgggttagttttcctacggaaaatatagttaatgttggagattaggataacatcaaaagtcaaattaaggaaaatgaaaactagaaagtgactgagagaatgttcaagaaccaggggaaaacaagagtaccacagatgccaggggaggaaaatgtatccagcaaagtgttgtcacagtattagttgtcttggcccagaggggtgacttcaggtagctgaaagtacccaggagaataaatatgctatccagaccacttgtggacacagttgtagcatcctgctagggagaagccagtttctaggagaataaaggaatacctgagtagtaagtaaatagagaagatgagggtaaatcagtttttcagaattttaggtgcatggcctcaagaaaaaggaggtagctagaagtatatgcattgtttaggcagcttagttttgtttgtttggttttggtttgggttttttttttttttttttgagacagagtctcactctgtcgcccaggctggagtgcagtggctcactgcaacctccgcctcccaggttcaagcaattcacctgcctcagcctcccgagtagctgggattacaggtgcgtgccaccaagcccggctaattcttgtatttttattagagatgggttcaccatgttggccaggctggtctcgacctcaggtgatccgcccgcctcagcctcccaaagtgctgggattacaggccagccatacattacagtgggccgagccactgtgcccggcccaggtagcttagtttcatctctaatgaacactgaaatgaaagaaaaaagtaacaagcaaaaattatatggggaaaactaagaaacaccgtggcaagaggaaagtaaacattaagtacataactggctaaaggataagaacagacatttcacaaaagaggaaggacatacaggttatatccatggaaagttgtcaccccaaaagcatttagaaaagtgaattaaaccagatgttatatatgaaatttaaacagcatcaataaaggaaaatgttcatcctgaggaggcaatgaaatggccatctcagattgctgatggcagtataaattgatacaatcctttaaaatatggtttgataataggtattaagcctaaaaatcttctcattctaaaataaatggtatgtttaaaatgacatgagaaggttaaaaatgtaaagatcctggattagtgataacttgattttttttaaaaaggaaaatggatcttatatagtggtggtagaattctgtacacatatttaatagcatgtttttaaagaaaaatgacttggaaaaaatccttattacacagtaagtacagaaaacattgtaaaatagtaatactctatgaaatttttatgctgaattttgtagtgttacaagttttgatgttattcctttttttttttttttttttgagatggmgtttcgccygttgcccaggctagactgcagtggtgtgatgttggctcatggcaacctctgcctcccggcttcaagcaattctcctgccccagcctcccaagtagctgggattacaggcatgtgccacaacagccagctaattttgtatttttagtagagatgggatttctccatgttggccaggctggcctcaaactcctgaccgcaggtgatctgccctcctcggcctcccaaactgttgggattacaggcgtgagccaccacgcccggccctcggtgttattctggccctgattctattttagtaaatagattttactagcagatagggatgggttgggaagaggaaccttaattatagaaaacctcatacataaaacattgaaggcacgggccttgcctgtcatatattcactgctgtacttctctgtcagatgtgtgcctggcatgcagtaggcattgaaaaagtatttgtcggccagcgcaggggctgtttcctgtaatcccagtttgggaccagcctgggcaatatagtaagactatatctctaccaaaaaaaaaaaaaaaaagccaggaatggtgccatgtgcctatggtcccaactacttgggaggctgaggtgggaggatcactagagcccaggagtttgagaccagcctgggcaacatagtgagacccccatctctaccaaaaaaaaaaaaaaagtcaggttagccaggcatcatgccatgtgcccatggtcccagctacttggagggctgaggcaggaggatcgtttgagcctgggaggtcaaggctgcatagagctgtgatcataccactacactccagcctgggtgacaaagtgaggccctgtctcaaaaaaccaaaacagcaacaacagacaacaccaaaaaataagaatttgttgaattaagagagcaatgatattgattggtagatacaaactttgattctgattacccagagttcataacagcagaaatactgatgttatgaaacgaaaaataagatttagcattatatttattcacaaatttgttagactatataggataagttaggaatgaaatatacataaacattgtcactactcaaattcctttctaaaatttcttcctcaaagtatgatttttaaaaaaatttacggtgggtaaatgttaccataaaagattagtttcacaatagggattatttatatgatgtataaatgaattagtggattaggacctttttttaatgaataagtaatattttacttttttgctaaactgcttaaacagttatgtcaatacatgtctcctaaaaataaggatgttttcttattaaatgtgtttatagaaaggaggcctcttgagtgtcgtatatgttgatgagttttcattggcagtatggcatgtttgttttgtgaatttgaatatactcctttctcagaaaatacaattttgsctttatatgattgtaaaaatatatttcttaggaatagtctctgggcctttgactattaccaatttaagtcggtaagttagtggggaaactaggaggccattacatagaaactcagttgctagtttttggaaaaatatgctttctgcaaatgaagaacacatccaatagttgctatttattcatttattatattatacttaagacatgtaaatgttaggcaccatctacgtgctagatatcttcatgttttacataaatgaaaaagatagcttgtattcctattgggtttgtcagatggatcctgtgtatgtagtacaatctatactatagtcttcttaaaaagtcaacacattgcattttggacattaacttctgcgtatgtgtcatgtttgataaaggtactgtgtgaatcaggatcacatttgtaattgatatttcatgtataaccaaattagtaatatatgaaacaagcctcttcttgaattttgcagttgataaaaatggtgatgtgtgcatttctattcttcatgagcctggggaagataagtatggttatgaaaagccagaggaacgctggctccctatccacactgtggaaaccatcatgattagtgtcatttctatgctggcagaccctaatggagactcacctgctaatgttgatgctgcggtaaggtggtcacacgtcttcccttcccttcactttcccttgtaataaaacctgaactatagttagtatgtatgtaagtatgcatgaatgtatgcatgcktgtgtgtgtgtgtgtgtgtgtgtatctcttcccatagttcttatttttgacaaaataaatatatttatttacgtatttattttattttttttgagacagggtctctctgtcacctaggctggagtgcagtggcacaatcataggtcactgcaacctcaaactcctgggcccaagtggtcctccagccttggcttcccaaattgttccgattacatgtgtgagccaccatgcctgaccaaaagtgcatatttattgtatacaacatgttgttttgaaatatggatatgttgtggaatggctaatttgagctaattcacatatgcattacctcacatacttactaattttattgtgagaacacttaaattctcctctcagcagttttcaagaatactatacgtcgttattaggatgtaaactgtgacaccaaatttagaattgggggtggaatgggcagagcagaagtgtagtttttcaatgcaatcagatttttatcagcttaaaatggcttgtcgtaactgtgaaatttttttgtaagcctcattttaaccacggagcaaagtcctacagtagttaacacaaaagataaaaagtaaggaatcggggctgggcacggtggctcacaactgtaatcccrgcactktgggaggccgaggcgggtggatcacgaggtcaggagattgagaccatcctggctaacacggtgaaaccccgtctccattaaaaatacgaaaaattagccgggcgtggtggcgggcgcctatagtcccagctactcgggaggctgaggcaggagaatcacttcaacctgggaggcagaggttgcagtgagccgagatctggactctaaaaacaaaagcgattgtcatacctaagacaatttaatgcctggtctgaagttcatattattatccccaagttttcaattttcaaaagtttcacatctatagaaaaaaatgtattagttaaatgaacaccagcatacctttcacctaggttcaccagttgtagaaattttgcaactttttttcctaaacagtttgagagtagtttatagataccataacccttcaccccaaaatgtttcaggatctgttccctragaacaaggctgtctttccatatacacagtacaagtctgtcgttaatgtagtactattattgtttatgcatatataatctatattcacattggattggattgtccagtattctttatagctgccacgcccctatcctgcagttttttttttctttttaaatccagaggctagtctaggaacctctgttttatttgtattcaagttttattagtcggctttaatctagaatagttcctagttccttagccttctctccttctttgaaaagcctttttttcttattcttagaacctttgttagtactatataccaaagccagggcataaaatttaccttttttcttaggttaataacaacttgggtggaatcttatatacagactgagacactatagataactccctttgaaagctatgactgaaattaataatagaattgaactaaaaactggcagaaaactatctatttaatcaagtattagtctaaacaatgtaagacatgataagggagaaggggtgatagctgcattaaaagaaatcctaggaaatcattttgagagagacctgatgaatgtttatatggttcatgctcaactatcagcaattttaataataagatcagagttggccaggcgtggtggctcacacctgtaatcccagccgtttgggaggccgaggtgggcagatcacaaggtcaggagttcgagaccagcctggccaaagtgaaaccccgtcttaactaaaaatacaaaaaaattagccaggcgtggtggcaggcgcctgtaatcccagctgcttgggagactgaggcacggagaattgtttgaacctgggaggcagtgcttgcagtgagcccagattgcgcctctgcactccagccagggtaacagtgcaagactccatctaaaaaaaaaaaaaaaaaaaatcagagctgacaagttgccctttttattttatgtatgtatttatttatttttgagacagagtcttgctctgatgcccaggctggagtgcagtggcgtgatctcacctcactgcaaccacaacctctgccctctgtgttcaatcgattctcctgccttagcctcccaagtagctggtattacagacgtgcggaaccacgcccagcaatttttttgtgtgtttttagtagagatggggtttcaccatgttggccaggctggtctcaaactcctgacctcaaatgatctgcccgccttggcctcctgaggtgctgggattacaggcatgagctactgcacctggcccttttatcttaaagaagagtaaattaatagccaataaccaagaccatgaatatgcaaaaattactttattaacccttcaaaatagctgaatctaaaaagagccaaatgtactgccagagtaaagtcattctcttgatgctaaacattttcctaagtgttgaaataggccttaatgtgaggttgaaatatgcaaatatgagttctagtccaaataccacaaattgtgcaaaatctattccttttttttcttgaatcccactggttcttccttctgatttaactagttagttgtctcatattaaaaccaaaaaccatgacttataaacagtttaccattctttttttttttttttttgagacagagtctcactctgttactcaggctggggtgcagtggcacaatctcagctcactgcaacctccacctcccgggttcaagtgattctcctgcctcagcctcccgagtagctgggattacaggcatctgccaccacgcctggctaatttttgtagttttagtagagacagggttttgccatgttggccaggctggtctcaaactcctgacctcaggtgatccactcacctcggcttcccaaagtgttgggattacaggtgtgagccacccggcccagtttactattcttacttgctttttcttctctcatattacacctttgatcatattttcatagtattgattttctgacctctcagtctgcagtacctattccaggaaacccgcatttttcttagccacctctctcctgggtccctttcttctttggctccaatttttttttttttttaaagatgtagtctcgctctgtcgccaggctggagtgcagtggtgcaatctcagctcactgcaacctccacctcccaagttcaagcgatcctcctgcctcagcctcctgaatagttggaactacaggtgcgtgccaccatgcccagctatttttttgtatttttagtagagatggggtttcaccatgttggccaggatggtcttgattacttgatgtcgtgatccgcctgcctcggcctcccaaagtgctgggattacaggcatgagccacctcgcccggccgctttggccccagatttgattgactctctcagcctggggcttagttgatttgctcagattaccccttcactgctcttctcaattgaatcttttgtttcatggatcccatttcttctttttcttcttggttgatttcttccttcatcctagagtaatgttttagggtatgtggcaattaaatccttagtctatttatgatgtaaggtgcttttatttttcccttatacttgattgatactttgtttctaatattatagggagaaaatcaaatttatatagaatttatattttactatttcttattgctgatgtgaaaattggtactaggctgattcttttccatttttaggtgacttgttcttttttccttttctttttttccccattgtacttaggttcttttctttatgattggtctttggaaatttcacagagttgtgtgaactctttttgatttgccaaattaaaatttgctttaattttaaagataccagccctgggaaattttcgttttaaattattttgaggctgggcatggtggcttacgcctgtaatcccagcactttgggaggccgaggcaggtgagttacttaaggctaggagtttgagaccagcctaggcgacatggtaaaaccccatctacaaaaaatacaaaaatcagctgggtgtggtgatgtgcacatgttgtcctagacgcttcggaggctgaggtgggggattgattgcatgagcccaggtgttcaagcctgcagtgagctatgatcaccactgcacttcagcccaggcaacagagtgagaccctatctccaaaaaaaaaaaaaaaraaaaaaaagaaaagaaaagaaaagaaaagaaaaagaaatgacagtctcggggggaaaaaaacaaatggtatttatgtcactcaaagctatatggctatttggatgacaaagctactaaactgaaggtaagggtaagggttggaggaagaggtgtcttttaaattccaaaatgaaggagtaattgtttttggcaccartacccacactagcagttcttttatttattttttgttttttttttgagacagattctcgctctgtcgcccaggctggaatgcagtggcatgatctcggctcactgsaacctttgcctcccgagttcaagtgattctctcacctcagcctcctgagtaacagggattataggcgcgtgccaccatgcctggctaaattttttgtatttttagtagagatggggtttcaccatgttggccagtctggtcttaaactcttgacctcaggtgatccacctgcctctgcctcccaaagtgctgagattacagatgtgagccaccacacccagcctagcggttctaattatagtattcttcagtatatttatataaagtttatatattattattttgggaaagttaaaattttggatataggtgagggaaaatgttgagtatacagactttcaattaatctctattttcaggccctcttttttttttttttttgagagacggagtctcgctctgtcgctcaggctggagtgcagtgtcacgatattgsctcactgcaacgtctgcctctcaggttcaagcgattctcccacctcagcttcccaagtagctgggactacaggcrtgcaccaccacgtccagctaatttttgtatcttttagwtgagatggggtttcatcatgttggccaggctggtcttgaagtcctgacctcaggtgatcctgaggtcctgcctcggcctcccaaagtgctgagattataggcgtgagccactgtgcatggcctcagccccactttttattcaggctcttctcagatttgccatttccaaattttagcttctctaggcctctgtttaatagacccttttccctttgtttccyctctcctccaactcctctctctcctgctcttccctttccctcccctcccttcattaccccactgttctgttccatttttgtatgtcaggcagtgacagtgataattgtcatatattttcctctacagtagaaatggtacttagtatcatctcaatatgatgcatcccacctatctaccttatgttgcagacacttttatgtttattttctggttgtttccaatagggagagttggtaatccttcagattaccaactgaatgtctttttttgagatggagtctcgctctgtcgtccaggctgcagtgcagtggcaccatctcaggtcacagcaagctccacttccccagttcaagcgattttcctgcctcagcctcctgagtagctgggattacaggcatgtgccaccacrcctggctaatttttgtacttttattctcaccatattggtcaggctggtctcaaactcccgacctcgtgatccgcccacctcggcctcccagcttgctgggattatggacgtgcgccacggcccctggcctgaatgtcttattggtatattttagctttctatttcagtgtaatacaaaactgtaaatgttcttttgtgacctttttcttttttaaagataatttttaatgtagaggtaatttgcataggagatttctgcctgtatatcctggtagtgtcttgaaaaagtatgtctaactgctttctaccttttcaactctataatgtttctgaagtgtacaaatcaccaagggattacattcaaaattaaaataaatatttgagattataaaggggagtttgcatgaaatcacttgatactgcttttttaatctacagaaagaatggagggaagatagaaatggagaatttaaaagaaaagttgcccgctgtgtaagaaaaagccaagagactgcttttgagtgacatttatttagcagctagtaacttcacttatttcagggtaagtttattttaaatatcatacttttgtttttttgtaagtatcctattagtttttggaaattgtgtgatttgggtatttgaattacattttttcattgacttcattttttaatggtattatcctgtagtctcgttctcaaaactactgtataatctgcttgcttttctcctaagacacccagctgtttttgactagatattctgcattcatatggttagtatgctggtctgtttcttttcactgatggtaaagtttctaatgataaggttgttatttcagtttagtttctttgtttgactttttgatctagcatcctgatcacttgggcactaatgtatcttcatatactgtattatgtagggtataggcaagactattagtcatctacctattcctttaaggttggtcttctggccaggcgtggtggctcatgcctgtaatcccagcactttgggaagccgaggcgggtggaacacctgagatcaggggtttgagactagcctggacaacatggtgaaacctcccctctactaaaaatacaaaaattagccaggcctggtggcgtgtgcctgtaatcccagctactcaggaggttgagggaggagaatcgcttgaacctgggagacggaggttgcagtgagccaagattgcaccgtggcactacagcctggacaacagagcaagactctatctcagaaaaaaacaaaaaacaaacaaacaaaaagttggtcttctatctccttggtctttacagatagggccrgtagttaaaaacttcccttttattgtataacatctgtccacagttttatgttaggtctagaaaggagtcaaagatggaaggcacccatccaccttagaagaggaaataatatagattaattgctcacatgtgggttatttggtctcttcttttaaaattaaatattgaaatgatagaaactgaagtgaagactatcctttcagggatcatttctatagtttgttactatagaagttttctgaaggtgtagagcaccaaaggatacaacattgagctggtttcaaattcagctgctttgattcagcaagctgcaacagttaaaaacatagcagaaaattgttattgaatatctatgtctctgaaaacggaatagttctgcaagttggtgaataaagtctaagagttgtccagctacagaaacaagatgccagatgattcgtaagacctattcgtgatatttaaattactcaataaaagacctattgatttgtgggggttgagggagaaaccgaaatacactgtctgaaaaatcacaatccatggcacatcttgaatctacctattttaagaaaatgaacattaccattatcttctgtcccctacactccgctgctttcttctgtccctttctcatattcctaactctgggtttactattgcttttcttcataattttaccaaatttkcatgtttaaacaatgtatttcatgattttgaactgtttatatgtggaatgataatgaatgcattcttctgttacttttattgctcaatattcttcaaattgatctgtgttgcaaataggtacatttcacctgtgtgctattacactgggtaaattaccgctctactccttattctcattgcagttattttctgaattggtgtaggggtgtttgttctttttctgttatagagggtggctatccttgtttcctgatttgcatgtactgtaagaggttctctagggtatatacttggggtggaattcttaaatcaagggtacgcgtatttcattttgagtagataatgccaaattgttttctaaagtgttccttcttttcatagtcccattggcaaggataaagatcccctttgtggccaggtgcggtggctcacacctgtaatcccagcactttgggaggccgaggcgggtggatcacaaggtcaggagttcaagaccagcctggccaatatggtgaaaccccatctctactaaaaatataaaaaattagccaggcacagtggcgtgcgcctgttgtcccagttaggaggctgaggcaggagaatcgcttgaacccgggaggcggaggttgcggtgagccgagatcacaccactgcactccagcctgtgcaacaagaacaaaactccgttccaaaaaaaaaaaagattcccagccgggcatggtggctcatgcctgtaacccagcattttgggaggttgagatgggcagatcacttacaagaccagcctggtccatgtggctgaaaccccatctctaccaaaaaatataaaaattaccaaggtgtagtggtgcactcctgtagtcccagctactcaggaggctgagatgggagaatcmcttgaacccaggaggcggaggttgcagtgagctgagattgcatcattgcactccagcctgggcaacagagcgagactccatctcaaaaaaaaaaaaaaaaaaaaaaaaagcccaggcgccgcggctcacacttgtaatcctagcacttgtgggagctgaggcaggtggattacctgatgatgggagttcaagaccagcctggccaacatggtgaaacctcgtctctaccagatatacaaaaaattagccatgtgcagtggtgcacacctgtaatcctagctactctggaagctgaggcaggagaatcacttgaacccaggaggcggaggctgcgatgagccgagatcacgccactgcactctagcctgggctacagagtgagacttcatctcaaaaaaaaaaaaaaaagtctatctatctaaatctggatattgtggacttaatatgaattgccctagttaccagtgaaattgcatatcgtttcatgtgtttgaccattgaggttttctctgtgaattgcgtgttcaggtttttagattactttttcagtttgttgatttgtgtacttgtccttttattttctttgtggtatcctttggacaaactgaggttcatatatatatatatatatatatatatatatatatatatataacttttttttgggggcagagtttcgctgtgtcgctcgggytggattgcagtggtgcaatctcggctcactgcaatctccgtctcctgggttcaagcagttctagtgcctcagcgtcccagagtgctgggattacgggcatgagccaccgcacctggcctgaggttcttaattttaatgcaggtgaattgattagtcttttcctttatggattttacttttcgtttcttggctagagagcctgttcttttttaaccaccaaaaatctgttttgtttcgcttttcatatttgtgttgaatccattgaaattgatttttgtgtatggtatgaggtagaggttgaacttcactcaccccactttcccctgatgtgtaactgttgactgtaccatttattgacaagtccttgctttcaccactggtacacagtgcctgttatgttctacaatcagatttccaacacatcagccagtacgtgttgatctgttttgggcatttttttttttttttttgagatggagtttcactctcattgcccaggctggagtgcaatggcgtgatctcagctcactgcaacctccgcctcccaggttcaagcaattatcctgcctcagcctcccaagtagctgggattacaggtgtgtgccaccactcctggcttattttgtattttttagtagagatgggatttcaccatgttggtcaggctggcctcgaactcctgacctcaagtgatccacctgccttggcctctcacagtgctgggatgacaggcatgagccactgtggctggccatgggcttttgtatttttcaatggttggcttgtttatcttaattttaatttatttttgtgattaaatgtatcaaatgcaaaggtttaagtccgaagtaaagctaaagtctgtccaccatttatcctgttttcatgtttgatatctctggtttctagaaaaaatttagatgtgctttcagatctccttattataaccagaagtgctcccctttactaccagatataccatgcagtctaaaaattattcctattttcaccatcttttaaaaatctgcttaggaagtaaatgcctcagtaagtacctaaaccaatcattagttgaactaaaagtgtaatcatttaaaaattgaattaaatatacatcacaccaaaatcactaatgtgttctaacaatgggtctatatttcactcatctgtctgatattcagagtatagtatgctagcttgtccagcctgcagcctgcgggccacatgtatcccaggacagctttgaatgcagcccaacacaaattggtagaatttcgtaaaacatcaagatttttttttattttttcttttttaagttcatcagctgtggttagtgttagtgtattttgtgtggcccaagacaatttgtcttccagtgtggttcagagaagccaaaagactgggcacccctgctgtagacaatcaaatgcttaaataaatgagtcagtcttctttttattgagatgtgcacctaatttttaaatgtcattgccattacacaatttttttgtattaaggctttataccatggaaacctgtttccttaggccgggcgcggtggcgcatgcatgtaagcccagcactttgggaggccaagatgggtggatcacttgaggtcaggagttcaagaccagcctggccaacatggtgaaaccccgtctccactaaaaatacaaaaagtagctgggcgtagtggtaggcgcctgtaattccagctacttgggaggctgacgcaggagaatcacttgaatcccggaggcagaggctgcaggaggcagaggcagtgagccaagagagtgagactccatctcaaacaaaaaaaaaaaaatgtaaaagatacctgtttccccaaggccggctttgtagactgaatagtcagcagcctcacctgtctcttcttgaaggctggcttttctcayggctttatcaccatgcactttctgagtattttttgtgttttcagtcatgtgataggacatagacgtgaacgaaaactcactataaacacttgaaaaatgtattgtctgtctgggctgaactgaaagtgaaatcaatttaagattatttgaaaatacatatttatctacattcaagtccatgacccacacatattttctcaaaatgcacggattactgtgggtgccacttggcccaggctttatctcamattttgttagtgtttatacctygtcctatatagagattattagtacccttatgttctaattcagctgtggggtaggaagaatagagaggaaaaggaaacaaattctccccttgccacagatgagaaccatggctactttgtgtaccactggacaggaggactccgttctgcaccaaggctagagggactgtattggttctttattgctacgtaacaaattactaaaacttagtggcttgaaacaacatttattatctcatgatttccatggccatgggatctgggtgtggcttggttgactccgggtctctcataaggctgtggtcaaggtgttgactcaactggggtgcatctggttccaggcacgactgagttcctcctcactgcctgttggctggagttctccctcagttctgtctactgaagacctctccataagtcaattcacaacatggcagttggcttcatcagaggcagcaagtgagagagggtgagccaggtgtgggtagactgccttgagggaggcagtcattcccaagcttcgggaaccttgtctgctgtaaagcacagctgagttcccctgtaggaatcgctggtgcttacctgcattcagtgactagtggattagacgggtggagttgggktggtacaaaggcttggtcaactggctcttttgtcttgtttgggaattctcgggaaggtcattctaacatagtattgactgaggcctttgtttcaactgccttgagttagttcatcttctccctttgtctaagcttgcatccctcactcttgtttttgagagcacctcctgacaaacctcaaatctctgcctcagaatccgtttcctagggaacttgacccagaataagtactacggattgcgtaactcagcacagtaaggtagaaggctgcctgccttacttagttgcagatgtggggcatgaatctatagttatttctaacacatttgcaaaggcactgtcctcttggggaaagaaggaacacatagaatgcgatagatacactatactgacctgtaaagactgtttgcctagccaggtagaccaagcataaaacaaagtaaggttaaaccacattaaaaacttcagtsgaggccaggggcagtggctcacgcctgtartcccagcactttgggaggcgaagatcggtgggtgggagtttgagaccaacatggcaaaaccgcttcctactaaaaatacaaaaaaaaaaattagccagtacggtggtgtgcgactgtaatcccagctactcgggaggctgaggcaggagaatcacttcaacctgggaggcggagattgcaccactgcactccagcctgggcgacagagggtaactctgtctccaaaaaaaagggcgggggggcttcagtgggagtagaagcagaccatgactcaatttgaggtggttaggatagaggttagaagtagggctgctggtgacattgcaagtctccagagtagagatgaagatctgtttggtgtagagagcagtacttaccagggcaaggacaacttggagactgcacaattagggtacagaaggaagagacaragactggcttggtaacatgcaggagagttaggagagtgagttctcacagagagctcagaaaggaagttggtgttagagctactcaccaatctcatggtagaagacgacgagcagcacggtcccagtgtgggggaaaaagtcagcggattggtgacggagcaggagtacactgggtggctgtgtagggtgatttggaacttttggaagcatttttttgtgaagggtaatggggaaaacttaattggtattggctgttttcacttacaagatcattgaaacacttaagatcattgaaatacttccctatgattgaagaattacttttatttttgtcattaacatcaaaaagtggcttctatttgggagcacattggtctgttttatatttttttagatctttttaaaagattaggttttgtagccatatggaaaattaaagacgactctagttttagaaatattaataaatggaataagacactcaagttctttggaggtaaaccatctccagatttttaggttaaaaagcaggcataattctgagaagatatgaggcaaatgacaggtgcaattgatataatttcaattaatattgaaacataaattctgcgaaatggatatgcttaaaatgtaaatgactgttgcaagtcagcaccatttatttgcagtgttgtgctggttaattcagtttcacatttatctttctggagaaaagaatgacaaaacctgccttttctgtactgaggccttgtctctatttagaatttagtataacttttattaaaagggaagagggatagattttctttttcctctgctgaaaagggtaatgctgtttaaaactggatctttgctattaaaaggctaggtcgcctgattttagtgttgtttttttttaagacgggagtcttgctctgttgcctaggctggagtgcagtggcgtcctcccctgccctgttctgttccttttttgagacaaggtctcactcttactgtcactcaggcttcagtgcagtggtacactcatgtctcactgcagccttgaactcctagcttcaagttgtcctcccacctcagcctctcgagtagctgggactacaggctgtgccaccgtggctggctaaytatattatttattgtacagacaagggtctcctgttgcccaggctggtctcgaactcctggtgtctaacaatcttcccaccttggcctcccaaagtgctgggactacaggcaggagycactgtgcctggccatctcttgggtttcagtgtatgtcttttgattttctaataaaaatatgtatgtgcatacgtgtatctggtgaaggtgatatatttgttacttagtacatttcatgctttgctaagggccatttacattgattggtacatgtcttttggaaagacatatagcagtcgttctacctctcaggatcttgtagggaggttgtctaaatggctttctttctccccacaacagagcttttggtatggttgcatttgagtgattgtaagatagatcaatttggccaggcgtggtggctcacgcctctaatcccagcactttgggaggccgaggtaggcagatcacgaggtcagaagatcgagaccatcctggctaacacagtgaaaccccgtctctactaaaaatacaaaaaattagccgggcrtggtggcaggcgcctgtattcccagctactcgggaggctgaggcaggagaatggcgcgaacccgggaggtggagcttgcagtgagccgagatcgcgccactgcactccagcctgggcgacagagcaagactctgtctcaaaaaaaaaaaaaaaagaccatcctggctaacaggatgaaaccccatctgtactaaaaatacaataaattagccgggtgtggtggcgggtgcctgtagatccagctactcgggaggctgaggcaggagaatggcgtgaaccagggaggcggagcttgcagtgagccgagatcgcrccactgcagcctgggtgacagagcaagactccgtctcaaaaaaaaaaattggtaagttcatattgggctttagaaggcatgctgaattttgaacatgtctggtgtgagttaaaatttgtcataactctttaggtatatttggcttctctgtgaggaatttaaaattatatcccttgatttcttagtcatcttctgtttcttttgcccaaaattgtgcatggcaatggattcagagtttctgagttctttggaacacttgacctaaagatgcagtcctaataggtgtttccttttctgctgtccttggcgcccccacccacccccctttcaaagcacatattaatataataaagactctgaaaagtctaatagtcaaatgagacttttaaagctttaaccactgggtgcagtagcacatgcctgtaatcccaacactttgggaggccgaggtggcagcgttgcttgagcctgtagttcaagaccagcctgggtgacgtggtgaggaccctgtttctacaaaaaaaaattaaaaattatctgggcatggtggtgtgtgcctgtggtcccagctgcttgggaggctgaggtgtgaagatcacttgagcccagaggctgcagtgagccatgttcatgccactacactccagcatgagggacagagtgggaccctgtctcaaataaataacaaacaaaaacttcaacctagtgtttttctaactttttgaacaggaaactcagccatttattggctatgtgaacttgtctcagctttagaggggagactccttcataatgatgattgtgagcattcaggaaatgagtttgtaaagcgcttagcatgctgcttggcacatcagaactcgatgaggcggtgctgctttttatgtagatgtgttcttgacttacagtctaactggatgatacgaggccaacagatttgaaacacttagaaactgtggttgggatggagggtcatttgtggcaggctttgtggagaaaatgggtttgaagggagctatagtgagttagatagaatttagcaagttgggaagtgtggcaatcttaagttgtttctctgaacatcctcaaatgtttgtaaatttccaaatcacttggcttttaaatcttctcttatggattctagatttaatataagttgaaagacatttgaagtattgaaaaatctaaattagcgctgtccagtagaacgttctgtgatgataaggatacagctgtgctgttcagcttgccagtcactagccacatgtgactactgagcacgtgaaatgtgcttagcatgactcaggaactaaattgtaaattgtacttaatggcaattaatttacatttaaaattaaatatacccacgtggctgtgagctaccataatagatagaaacaaagtgagctcagaatgaaattaaggatttgttgtcaaataaatctaatatggataaaacctacttacagttaattcttttgtaattgatraattgactatataatgttgtttttgttgttgtaggtctccaattgagaaacatggcactgtttttcctgcactctacccacctattgctggacttctgttgtacaagttggcaaacactggctggaactgggctgcaataaaacatgccagttatcaatgctgacaagagcctaacaagtgccaacttacagatgattacgcattttgaattctaatgaactgttttaaccttcaggaagaattgtaaagacctgtacatagcacaacwtgatccggataatatatatactgttcatgtacatccacaaatacaccttgtaccaaataatgctttcttgtagtagaataagaatcgtgtaaattctaagagattttagcaggttttctttcctattcattgtttcttatcagtttaaaaggattcctttaagcatgtcagatgaaaagcaattaggattaaaagtttccatttaatttcccttaaacccttgaggcttcattaaactcttttcacttactaaacttttgtatcttctttgttttgacacactcccctttgcttttatctcttacctgccagaatgttctcaaatgatttagttcaaatactgaaatacttaatgagcaattacttgatttttaatgatgacttcgaaggagtcatcactaggtgctttgtcctttttgtattctagttgcacccacctcttggattggatatagcaataacatttattggccgttgtgagctcttgatcccagtcattacccctgagaactaaaaatagatggttcttaattcaacttactgaaaatttccccaaacaatagcaaatctgacttttccctcttcagttgcctggtattaaggttggataaatgaagcatgcacagctacaggctttctacttaacttctgggtttgctattacaaatcctatttactctcatacccttctccttagtccttcatatttctctgcctctattcttctatactgcagatttttctcacctattgtacaaagaaattgcgatgtatattttcatgtaatttgattttggaattctgtcaccttatgtagtgagttcttccaaaatataattttttttcaataattgtcaagttgttggcttttattgtattgaatgaaggctataatactgagtgccagagaagtggtttaggaaaatctcaggttgattccttatgcaaatgaacttttaatacttgaaaatcacatggccatggcagtatatgtatttggttctatctagattcttctgtgaatctaaaagcattacaggggtaaatgctttgctatttgacgtatagatcccgtcactaacaatagtacacttggatgtgattaatgtttgagcttcaatatatttcatatcatacagttttctaaaacaacttcagcaaatggtaaaatgaacatgtgcagtgttaaaggcaggccttaggctccttcatgtttgttgtgaggttgtgtgtgggaagtagtctttggcttataagggatagaacttgagacagtagcagatgggacatggtgtttgattgtgagaatcagtgagaattcgtgcatctctgctctgtggggtttggagaaatgctttggcagaagagtgaaagaactcctgccaagagcccagacctctacaaacgttgtatgtccttttttaagcagaaataaaatggttgaggatgtagtcacagtagagagtgatttttttctaagtccctgtcctctactctgaagcgttataaaaacctgtaaacattatacaaacccacaaaccttatagaaactcgtaagtgtgttgtgactggaaattgattcattagaacccagttttctttaagaactttgtgacttggttttttttttccttttccaaagactgtaaaaatagttgccccaaaatgtcagcactgcacaccctccagggacttggaatacaatcctttttacttttttttttttttttttaagaaactgggtctctctgtcacccaggctggagtgcagtggcaacgatcatagctaactgcagctttgacctcctgggctcaagtgatcctcctgcctcagcctcctgagtagctaggactacaggtgtatgccaccatgcctggctaatacaaaaaaattcttttaagagatgggatccctcccttttaaaatcagaacttgttcacatggtggttgcttgtggcaaaacggagttcaaattttgctctcctattgctataattctgctagcaatctgttgaggtgaaacttgggatctgactcttcagcaagcagcaaatgacctagtaactcagggacaactatttttgaactttaagtgccactttaatgcagttagtttgataaaaccatgtgggttttttttttagggctagctctacgggagtggaaktgagagccaggcatgagtgcgtctccacatgcttttccacctgccctgagtgtgttacatactgaaacaggcctacatagatgttacaacttcccttcctctgtcggagatgtcatctgtgcctttctcagtgttcatctgataatgtaaatttaaatgcctctacatttgatacgaaacccacattcaggtgacactgaacgaggtggcttttgtcccaccagtgcctcatcagtgtgaggcgattcctctctgctttaggaaaatgatttttccccctaaacttgtgccaaccatcaacaacatctccatagatcttatggattgtagaactgttggctgtttcctaaatttattccaagttctcgtagaggcatatagatttcagtctgtgcttgtatgggatagatgatctgagtggctttctggcctcttttttgagtttaaaatccatatgaggttgacktgtcatactaaggtaacatgtttgtgaggttattccactagtactgtgatcacgtgggtgtcagtatctttaacggccttcattcttggttgtgagattttatttgatatgcccactcaccctcgacgaatctgcccgctttgggctgtggtgcctgtgtatctttgcccgtctggtctccagttggtggaattaccttttttgtactgccacttctcagcatctttgaaatttgacataatgttgcttcatttcagtttttttagttctgtaatttgttgattgtatttaactatgtgagttctgttgtgatgtttactgtattgtaaagcacctcattcatgtgatgagtgctctatraatcaataaatgatgacttagaggctgtatcacgagctattttggttttaggatgcaggtctcaaaagcaagttgtgggactctttctgtataaacagcacatgataccaaaggaaccacagggaaaccttgtattttacagactttaaagaaggaaccagagaagttaacttgccttccaacctgataatgatgctctttagatttccagtacgtggccatgcaccgttttaactcagagtttgtgtgcactgtgatttataaccttcgagtgagcacttattagaacattattggggattttgtctttggcctaaactggctctaccataaaggtaagctgaaaggtgaggaacccagactcaaatgtgaactggaagagactgcaggcaccatctcagtcaccacctctgtcctctaaacagacgggaaaatgcgccaatacctgcccaggggtcatttagtaagttactgacaaaagaggcaagactgagtagagaaccttctttacaagatacacaagatatcaacatccagctttttatcctgaatccttacaaatagttcatacggagttagtgttagatgttgaaagcttgtttgtccttgatataaatcactagcgactattaagggctcttccttacaaactcggagaaaggaacatggagtcagacctcttattcagctaaattatgaacaagaaaatcccccgagaggagttttgggaagattagggattatttctagagtgcaaatacccgataaatatatttggaatgaactgttgtggaagggtctagacaatatatatccccaaacttacatcagttttagacataatcagctactcaaggtatagagccaaaacgttttatttgcatgctgcttccagtgcagatgaacaggttttcgatggtgtgtgcaaggcacgaggctcccaggaaagatgtggatctcccgctccctctcatgggacagggctaataaccgcctttcaaattgaaccctttctgccttgaggaggcccggaaccctcacaggattcagttcacagatcaaatgattttctgggtatggtatttctggtggttcaatttcagatgtgtgtaatctggctgccaacgtaggattaggctttttggcttgtggagttgacactcctcactgagctttagcgaaatgatgaaagaattttgaattctgttcacacaggtaaataaactgaaggaaaagcctttcacaaaagggagccaaacacatcttctaagacataggagctgcacagaaagtcctaggcaagaaacttgatttttttcctcttctcggcagtatgcaatattcacagtgacttccatttattcccaacaagagcgctggaaatcaagtttttctatttgttgagcctctcttctgtggcaagcttgtgctatgtgtttttcctaaaggttctagtcacattgttagaagcagcttccaaggtaatcatttctcatgaggaaacaggctcaggttaacttgccatcgttgcacagcacacaagttgcatggctgggattcggttccaccgcctgccttgcatactgggtgttattagcccttcttcacaggtgaggaaaccagagctcacagagcgtggatgtgttgagaccggtgcttgacccaattcatcggactagcactggaggtgtcctcctcttcctgccctgccatgataccgcactgcctcctgagtctgttcccctgtgctcttgaagctacggtagacagcatttattcccttcctgttcttcatgttccttgtctgagacagcaccacactaagtccctctgaatctgactgcaaaacctgaagtgggtctaaaatggaccatgctccagtgctcagctttttcaagacgtctgtatttctggttatagctaatgttatagctccatccaaacctggtgggtgctgtagtttactgagtactatgagtgctttatttcataggctttactaccttctctctaactcaggggttacaggtcagtaagagtcccctcaaaagacaagggctggccgggcgtggtggctcacgcctgtaatcccagcactttgggaggccgaagtgggtgggtcacgaggtcaggagttcgagaccagcctggccaatatggtgaaacccccgtctctactaagaataaacaattagctgggcgtggtggcgtgtgcctgtaatcccagctactcgggaggctgaggcaggagaatcgcttgggcccgggaggcggaggttgcagtgaaccaagatcgcaccactgcactccagcctgggcaacagagcaagactccatctcaaaaaaaaaaaccaaaaaaaaaaacaacaaaaaaaaccagacaagggcccagggataccgttaagtcatttctaagatgggtactttatcctctggtagagggctccttagagcgaggttgtgatgaggaggcagtcaagcccccgagttgatcaatcccttcaggcgagttgttctttgatcatggccatccagtccaagcacactgaaacggcacacatttgtgtgctactcaaacggagagggtctctggttttcatcaaattctcaaagggggtcatggccctccaaatctttaggaaccatggattctagtccaagttcttcgtcaaataggtagaatctgagatgcagcataaggcttgcaaggacttgcccatcatcaacacagcaagtagctgcagagccaaacttgaactcaggtctcttaattcccagaatagcacacagtggaaacacctcatcaaacattttgagtgcctgctatattccagaccctaggctggtgctgctgaggtaacgatagtcatcatgcaaaatcgggagtcagctgtgacagtactttacaacaactttcatgttgcttttacgttatggcccaggcaatattcgcagggtactccaccataaaaagatgaggctgcttgcatccagaggagcctggcctgcctggccactctgaaggccccaaagactcaccattgggcacccctataaaccattctcaacagacagggacgctttaagcgatggccttcccatggtagggaaagttctcccctaccatcttcgtgcctttcgtctcctgccacaacaaaaaggcttacacgtttcaacaccgtctctcatctcccaggtacctggcagccagaattcctactcttcctcaaaaattcagtgcttgactctatgttcccacgatctaagctccaaattcctcctccactccacctcactacccactaatgcttatccttaacagcacctaaagcttctccaactttaaatcctccttttcgtttctgacactcttattctgttctcagattcttctttttaaatttcttttctttttcttatttaattttagagacagagtcttgctctgtcacccaggctgcagtgcagcggcaggatagagctcactgcagtcccaaactcctggactcaagcaattctccagcctcagcctcagcctcccaagtagcgacaactaaaagcctgcaccaccaggtatagctaattcagatccttccttccaaccttttgtctcttactcctggctgtcctccaaggccaccactttccctgcaatcctgaactattgatgcattcttttgattctcccttgagtaaaagtcttttttgaaaggtctcatgctgggccgggcatggtggctcatgcttgtaatttcagtactttgcgaggttggggtgggaggactgcttgagactaggagttcaagaccaacctggccaacagagactccatctctgaaaaaaaaaaaaaacaaaaaacaagaaaggtctcatgctattcagctatgttactgtttagccctccattttgcaattgtcttaactaatcgtatagtcctccccacattcaccaaagattttagctcctgatgctcctttcctttcctacctctaaatcccaacatctaattttcctgccttctcacttccacttcagccactctattccgtggctctgtcctggactttttttttttttttttgagacagagtctcactctgttgcccaggctggagtgcagtggcacaatcttggctcactgcaacctctgcctcccgggttcaagcgattctactgccccagcctcccgagtagctgggattacaggcatgcaccaccacgcccggctaatttctgtatttttagtagagacggggtttcaccatgttggccaggctggtcttgagctctagacttcaggtgattcaccctcctcggcctcccaaagtgctgggattacaggcgtgagccaccacgcccggcctgtcctggacttttctcatctcctagtgctacttcactatgaacctgtttgccactttaaccaccaagctctcacaacattgcctgcactgcactggccttcaattatcagagacctgcagtttcgtggctcctccatcagtccctagccagtctgtatcccacgtttgatggcctgggctgtcgtctcatagcaccctcaatttattttgggcaatgcaatcccaagccctggataaatgctataattcaaaatatctgctactgcagcctggtggctgagttctagaaaaaagtgatccatcaacacatacatgaggcacatgaaaccaggccttccaacttcagcgtcctcttccaaagtttctttgctcttcttggtctccttccttgtctcataacttcacccataaaatcgatgtcatcaaacgatctccctgattttcttcccccctatatatctgcacgcatgttcttgtttcctaccgttttagtggaataacaggtgacctgcctctagtctaaatttaatccgttttcctgagttctgcatcgcatgcagagcatcctacctccccagggacctctccactgactcctttctcccagcctctcctttctttacaaacctaaggaccaacaaaccccctctctcgaccctctcattgccaagcttctccagagtagtctgcattcgttgtgtcatccttttcggtgccctgccaaggacgtggaatatgacagggctcagtcagtgcttaataaatctcgagcctcaaaaatacccggtaaaaagaaacccggctctccgcttcccccagagtccagcaaccccctccgctttcattcacccactttcctaccctcggctccgccttttgccgcgcctcccgcgattctcgcgagacttggtgattccgttccgcaccgccccggttgagccgcgcacttctcgcgaggttgcaggcagtgccgggccagacatggcggaaggtagggtttttttgtggagccgcgcgggaagacacggagctgtgggggcgctgctggccgtgcgaagctgccgtgggaggggaaggccgggcgtggttgcatgggggctccgcgggtctcgcgagccttcctgtctagcctctccggagcttctcgggccggggtccggagcgcggttcctatgacaacgtccctcccgcgatgccgaccccgcgggactgcggccggctgcggagccgggctggcaggtcccgcgccggtgctgcgtgcagccgcggggccccgagggcagcacgggaggctcttgattgccggcggtgccgggacgccgggggaagtaagccttctccttaggaaatcgaaactgctgtcctggcacgttctgcatccggaaggggtccatccctcgcttgcggaagagcrtgggtctcctcgggctgggttggggtgaggtggggtggggtgggggcgaggcagcagcgagctggcccacgcttcaggcgggcgcactggcggctccggctctgctgcaaccccagccttcaggccaggcgtacagatgaagacgggaggaaggggtttgcgggaagggagttggccaaggtcacactgctcacaagagggctgctcaaaccagacctctgtgcctttgcctccccgtccagtgcctaccctctggtctcgtgcacttttcatgacattgcagct

SEQ ID NO: 95602 - DNA, 52605 bp, Homo sapiens
aggactggctacataatttgcggagcccagtgcaaaatgaaaatgaggacccttagtttaaaaaacagaggggccaggtgcagtggctcctgtctgtaatcccagcactttctttgagaggctgaggtgggaggatcctgggagcccacgagtttgagactggcctaggcaacaaagtgagaccctgcctctacaaaaaagtttaaaaaataattagccaggcacggtggtgcgcacctacaggcccagctactgtggaggctgaagcgagaggatggcttgagcccagcatttggaagttgcagtgaaccatgattgcaccactgcattcctgctgggcaacagagtgagaccccatctcaaaagaatttaaaaaataaaataaaatgaaaaaccggggaaagagtctcattaaaggcactaaaatataaaacttttcctttctcgtgcagtctcgctcaacttgtcatggtgcttttgaaaaatctacactttaattttctttttctttttttttgagacagagtctcactttgtcgcccaggctggagtgcagtggcatgatctcggcttattgcgacctccacctcccgggttcaagcaattcgcaattctcctgcctcagcctcccgagtagctgggactacaggcatgcgccaccacaccaggctaattttgtatatttttggtagagacggggtttcaccatgttggccaggctggtctcgaactcctgacctgaggtgatccacctgccttggcctcccaaagttctgggattacaggcgagagtcacggcacccagcctacaaattcattttctaagaaaagaagaaataaaaattctaataatttgcatgaaattttttcatttatctttactttgtgcaatgcccgttttaaatgcaaaatgaagagcatttaactcatatgtgtaatcactaaaatgaccaagtcttggcgtgtagcttgtacatgcacatacattttgttctgaccagaacaggaaaatgccgtacaacatggactcggctgtttccatttcacttgtcaatatgaatacactcctccaacaccctctgcctttgctttactgatgagtaaagaagggctgaaaagaaaaggaactgtgggttgccttatcttttcctttccttctgtgtcatcatgttgaatgcgagtggttgttgaacgcagggaagtaatgtgagtaagaaatgatatgatagggaccccgacctttcgtgtttctcagaacactactgtcttctttctgcatgaagcaaattcgggttcaaatggaaagcagggcctctcggctgtcagcaccccacttactcagtcgcagacataacacattcaccctagacttgattcgagtccactcaactcccacccaccatgagtccaccagaattgtgtgctcacgagcacagtgagcactttacgggagagagatggcgtattaaacgggcctctttggctcacagcatgccccgttttcccaacgggcttcacttacaaagcacaagttcaaagagaaaattactatattaagaatttcaaagggccaggcacggtggctcactcctgtaatcccagcactttgggaggccgaggcgggcagatcacctgaggttgggggtttgaaaccaggctcaccgacatggagaaaccccgtctctactaaaaatacaaaaattagccyggtgtggtggcgggcacctgtaatcctagctactcgggaggctgagggaggagaatcgcttgaacccaggaggcggagcttgcagtgagccgagatcacggccactgcactccagcctgggtgacagagcgagactctgtctcaaaaaaaaaaaaaaaaaaagaatttcaagatggcggttggagagcattaaaccaagtgggaggccgggcatggtggtgcgttcccatggtcccagccactcaggaggcagaggcaagaggagcacttgagtccaggagttggaatccagcctgggcaacatagcgagacccccatctctaaaaacagccacaacaaaaatcaagcagacggtccttctgacaactggtgacctgcgcaggttgcatgcccatgaagccagctctgaatggggataataaaatcctcctccagggttactgtgagggttaaatgggagtaacttgtgaaacaagcttagcatatggtgaatgttcaagtcagtggctctaatcacagatatttccctacacagcttagaggcccctcccctggggaggcctgaaggaaatcagggtgctggggcatgaccctgactaccgctccatggtcctttcagccatggctctcccttttaatctcttctccataccagcttctatgggggacttttctagcaggcaaacctggccccatctctccattgcttaaaacccttcagtacaaaacccaggacataacatagacaatcgaggttctcagtgtcctagccctgtctctctaatctgccctcctggtccttgcactcctgctccttacgatccagccacactaagggatcaaatcactatccctgacatatggctgagatttctcaccttcaactcaggctgttgttttctgcgggcagcaccctcttctccatgtgtctgaatatttccagaaaagctgggtgtggtggcttacacctgtaatcccagcactttgggaggctgaggcagctggatgagtagagaaggactgaaaataaaaggaactgtgggttgccttatcttcaccatgcctggccaacacggtgaaaccccatctgtactaaaaatacaaaaattagtgagaccagcctggccaacatggtgaaaccccgtctctactaaaaatacaaaaattagctgggcatggtggcaggtgcctgtaatcccaactacttgggaggctgaggcaggagaatcacttgaaccccgaaggcagaggttgcagtgaaccaagattgtgccactgcactccagcctgggcgacagagcaagactcagtctcaaaaaaaaataaaaaataaaaataataaataaataaataataattccagggaagacctctgtttcctcatgcccacccgggccccctcaggtgaggcgggtagatatacttctgctagataggtggtatgttctgccaccttctgtctggtggaggaggtggcaaaagccgtgtctaggtgccaggcatggagttcttggttcctggcagctgggaggtggagaatgtggacctgccctttggacagcctgcctgtgaccatgtcgccctggccaccagctgtgtgtctgtccaggtacaaaaagagagcatggcggggagggacgtgagcccggggcaggcagctggagtgtgaaatgactgcatgtgattctgtgggagctgggggggcacccagaagttgtgacaggggcagccgagcaggcgggcatgctgacaggtgtgtgagcctgccaggtgagggccccggttgctggcaactgtttgtcctgccatggcggtttgaaggtagggtggggtgggctggagaaatggaacataggcctggctgccagagcaaacagtcaggccttctggccctaccttctagcaaataccaactcacagctgagggtgcggtggagcgggagaggctggggttaaggtccctagggccagcagagaagaagtcagacctcaagatgtgtgtgtagggtggagcaggggtttcccagcggcttgaacgcctagggctcccgatctctgggaaatagggctctagcggggagctgtgaggctctgtccccagtcaagtcctggctaacatttttcctggcaacttagggatacagttgggattttgtggactatagcagtgggggagaaaggaatagggtggaaatatctggggatatcagacttgagatataaaatgtcaggctgagcgggatgcagtggcttatacctgtaatcccaacattttgggaggccgaagtgggtcgatcgcttgagtccaggagtttcagaccagcctgagcaacattgggaaaccctgtctctacaaaaaaaaaaaaaaaaaaaaaaaaaaaaaaaaaaaaaaaaaacctgggcgtggtggctcacgcctataatcccagctacttgggaggctgaggtgggaggatcgcctgagcccgggaggcagaggttgcagtgagccgcgatcatgccactgcactccagcctagatgacagagccagatcctgtctcaaaaaaataataatggggctgggcacggtggctcatgcctgtaataccagcactttgggaggctgaggtgggtggatcacctgaggtcaggagttcaagaccagcctggccaacatggcgaaaccctgtctctacaaaaaaaaaaaaaaaatacaaaaaatagctggatgtggtggcgggcgcctgtaatcccagctactcgggatgctaaggcaggagaatctcttggacctgagaggtggaggttgcagtgagttgagatgtcgcctcgccactgcactccgcctgggcgacagagtgacactacgactcaaagaaattaaaaaaaaaaaaaaggaaaataataataataataataataataataawatcaataaataaaataccaggccggaggagccacaaccagaaaaccagcattcctctagctccacagcaccaggctgagacgcagctgatatcagggaatccatctggatcacccatcaaaagccccaaagcacctttcggtccagccagtcctcagggagtgtctttgctcagggaggcaccgagaggcggagaggaggaggggcccagtcctgtcccaggaggaagagcacagaatctgggggtgtgcatgatctggataggggtcagcagctccagaccaggctggaagttgaggctctcaggagcgggtgaggggctgtgttgttggggcagggcgcagctgcagctatctgggaaagcttcctggctgcagaggcacagaaggggtttggggtttgaacagccagctgtgcgggctcaatcctggcatctctgaccctgtgcagccttggtggatggcagagactgaggctctagaaggcagagcccagctcgtggtgggaggcagataagggctggggtgaggctgtctgggtctctcaagctggagggagcggcaatcaggctgttctcttagctcctccttttggcggggcgagtggtttctgccttcctgcgacttcctcctctgacccgctgccacttctcctggccctcctggggcgggtggagctcgggagcgctgaggcggaggctcatccatctctcccctccctgggccagggtcagtcccctgggagccctgggcagagacccccccaccccaccctctcgggcccctctggggagccccacctttgctccctggttacatttcctgctggggtgacggtgtgagtctagggtaacgagcctggttttctgaactttcttatgcaccggctctttgttaaaggttctggttatgtgaggaataacccctcgccggtgggcattggaaaagaataaagaaagcagaaacaccaaatgaggagaacatccagcactttcctctagagaagacccgcttattcagaggctttcgggttccctctggagtcacttcgcagaattcgagctgggaagcaggacgccccgggcccaggagagcccagaggaggcgacgcgcagcccagagccgggtgctccgcagaccgccccagctctcggccagatcccacccctagcagctccgcggaccgggaccgaggacccccgggccacgcgcccccggctcccgacaggcccagcacgcgccccgcgggcggtctcagtttcccctctgcagaatgggcgggggacccaggcggtgcgccccggggcgcggagggcggccggaaggggtgtgatggggggcgggccccgcgccgccccgccccggggagggagtcccgggcgcagcatcctggcgcgggccggggccgccgccgccactgccgtcgggtaaggtcccagcacggacatggcctcgcgcggcgcccgcccgggcccgagtcccccgcgccccgctttgtagccccccggcggagaggcggcctcgacggtgcggacggcgcagacggccgggcgggcggcatggaggcggcgcayctgctcccggccgccgacgtgctgcgccacttctcggtgacagccgagggcggcctgagcccggcgcaggtgaccggcgcgcgggagcgctacggccccaacggtgagcgcgcgggccgggccgggccggggagcgggggccgcgcgcgccgcagtctcagtttcccctcctgcctccccacccggctctgggcgggcaggaagcgagggctccggaaacctcttcggatgctcctggggcacccggcggggytgcgcggccaccttcgccggcgccggggctgggggctgggggctgggagcgggttccagctggggagaccggacgcctggcaccctctgcgcggtcctcccggacttcccacctccactccggccccgtccaccctggaagcgttattccaccccatcctggaccgtattccaccccaacgccgcgccgctcccgctggcatcctgcaggtgcagcgcagacaccggcgggcgagggacggccggagactcaggctcggcctcccagctggccccagggtctcccctgagggctccagaaaacgcccaggaaggtgccgcttatcagctagcagccttggggcccccacccccaccccaggtcttcctctttctgcaacccgaagcggatgtggctggcggagtcggtgggggctttgaactgctgaggcgggagacccaccttcctggggtggcggagtcaaggcctcagggaactgccagggaggcctttcccatctctggggagggagggaggcttcactatcatttcatcctcacctccttcaaaggagtgtgggattcttgctcttgccaaaaggcacattgagtgccaccgggtactgtccagatgtggcctggcaccttggaggtcccatgagggtggaaaatacagaggtgccctccccacatcccttccaggcaggacctgccaccccctwgctsatgcccgcagcatcgggcagagtgtgagggatcccaggagaaataccctcaccatctacagagggcagcctgggtctgcatcctttggggacttggagccttgcccttttggggttcccagccagccagaggggaaggtattctagccctgggatcctactactcagggctagcttgaaaattaggaagaagtgtcagaaaaggacttttgggttttgtattggtttatgaaaaccacctcttatataaatattatctttctggagcagaaatcctttttcaaaaaaattagttgctatatttagttgagctgtgggaggaactggggagataaatattatttaatatcccccattagtgacttggcagggaggttgtgctttgctgcaggagagctgggcagcatgggctgcctctgaccctggggtgggctgggggcgagggccggcgcaggcaggtctgcggtcccactgcctcttttgtgctgctatagcctccagcttgggaatcctgattcctgagggaaactggagacgcagcccttggcctgtccctggaatcacacaaatactgcttctgtacgaccctagccaaggtctgtcttcattctgatatcatgtcttcattggtccagcggaggaggaactgactgggagggagggagccccagccttccccacctgttatttggttagatgagatccttggggtgccctggccagcgcacacctgtgtgaactgatggggaaggctgtgggcttggcgtggtgtgtaggtccacagagggtggatgtgtgttggggtgtgatgggaaaagttggggagggatattgctgggctcccctggatcctctgggcattgatagtattaataataaaagctgatgttcactgagcacttactatgtgccaggttctagtctcagcatttttcatctattatctcatttcttccccaaaacaactccataagggaaggactgttgtcatccccattttatacagcaggaaacggaggcacccagaggttaaaccacttgcccgaggtcmcatagtaggtggtggagctggcactggttacctgctcctctctgggcctcagtttccccatcwgtacaagacagtcacaagttctgcaggatgcagaaccctggtgtgggcgtctgtgctaggagtttgggtcagccggcagcagctttttcagctttgcctccarccttcttgggtccctagagggctcttctctcagatcactgattggggctgggggcattccagggctctagaagtctttaggtgagcagaggggagccagctgttccttcctgcctcaggcttgccatggcttgaggaggaggtgcagatgtccctagcacagctgctggggtggagctgatgaggctttgaaccctagccctgccccttcatagctgtgcaatgctggaccagcctstttgcctctctgtgcctcggtttcttcaccataagcgaggctgccatagaacccatctcccagggttgtttgtgagtctttagtgaggtcacagacaccaagtcatccttccttgtcgcagaagaggctggggcgggctcctggccacaagctgggtggcagggtgggtcaggcctgwgggcagaagggacaccccagagacatgtgttctccccaccccaggagtctgtgcacctgcaaggtcgttattgttggaaaccacaaggaagtcatttgcttaagtcctgaagcttgcaaattctgccaggggagggaggcagcggctgggcatcccacccccaccttyccaccctcctccctcactgcacacagacacttcagagctggggagcctcggcagcgcagtcagtgagcacgctagccagggaccccctccactcacacataaaaccccatctgccgtaacccccaacagggagtgagtggggaggctcctggccccagcacctcctgtgagcccacctttgcaggtgccagaggtacccagagttcagcttccttggggggcttttacttgtacatcttttttatttttgaataaaaatgtgcacagtgcaacattcaaggggttcaaaaggtatacagtaaattctccgccccgtccccagccacccattcccagtcctcccaatatcttgtgtcttcttcccaagacagtcygtgcatatacacatctggagctgtgatcttgtgatcttttcccacacggaagcaggaggaggataagtgctctttgtccctgctttgaccttgacagtcattcttggagccggtgccaggaggagcacggtggggcttcctagtggctgcatggcatttcggcgtgcggcttttctctgacttctggtggacgcttgtgttgttggcagcctctgctatgacacgcagtattgcagagtatccttgttgccacatcatgtcacgcgcttgtgaatatcactgaaggacgcattcctgggggtggaactgtggggtctaagtgggtgtatattttcagtgtcgtcagctgtcactaaacttctctgtgcagttgtgccgactgaacggctggttctctgctgcctcgccagcacagggtgggatcagacggtctgatctgtgccagtcaggtggaagagtcctctcgtaggtttgcttggcatctttctgtttaaagtcacattgggtgtcttttcatatgttaaggagccaccaaaygggctgcccatctcctctgctggactggagccaaggcaagagacctggctgtgttgggcatgtcctttctgtagctaaagtccctggagaccccagtgacctgagagtcgggcagatcccaggaggtcttctggggtggtctctgttcaagggagctggcaggccgggcagaagcctgccttcccgggccacacgcggcccatgtgcagtgagcgccttggccccagggctgccaggtgggatgagtggtccagatttagactcctgccagcggcgtcttggctctggccttatttgctgccctcaaataagttccaggccatagctggtgctgaaactcgggcaacccatatgcgtagcccacggaaaccaggccaagaggaacggagtgtgtcaggaagagggggccatctgagtggccctgcttgctgggtggcattgggcagacttggccctccctggacctgctgctcctcaggatagcagggatgggaccctgggatcccctaagggccttgcgggatctgagagggtgtggtttgcccacagccctttggaagctcaacgtctttcatgcttcaccctagttttcactcccactggcccctgctgggcagcygaagccccccaggagcagcatcaggcctgcccagctgggccccctcaccctcttacaccctaaggcagggcctgtattttcccatagcacagtcggacgaagagatgttgagcaaacccttcatctccagctccggataagccaggggtgctgcaggccccgctgcagagcggagagctacttccaaggccccgcagtggctcccgcagagcaaggtcaggtgtccactctaggtggaccccggagacacaggcagggccaggtgggctgggcgggtcttgcccagccagggcctcttcctgactctgcaagtgacgatttaattgctctgtaaatttacctttgaggaagacctgggtgagtgcttgcctctcccrgctggaactgacatttagaagctgaaataccagtttccaatgaaggaaggagtagaggggggatgaggggagcaggtggtgtggagcctgggggcagcccaggggcatcgcttaccccccttctccctggctctggactgtgggctcagggccctggcctgcaccacggagcaactgagtaaacaatgactgtaaggactcagcataaacacagggatgactcagccccgccccaccctggaagtgttccagtgtggtggggggaccctaatactgacaactggtcagagaagggcacagcgatgaggtaggggaggggctttcagagaaggcttcctggaaagggggtttatatgaggagataggatgctgctgtgcacagaaggaatggcacaagcaaaatgttggaggaggaaggccgggcgcggtggctagcaccttggcatctcrgcaccttgggaggccgaggtgggtggatcacttgagatcaggagttcgaaaccagcctggccaacatggtgaaacctcatctttactaaaaaataaaaataaaaaattagccaggcatggtggcaggcgcctgtaatcccagctatttgggaggctgaggcaggagaatcgcttgaacccaggaggcagaggttgcagtgaaccaagattgcaccaccgcactccagcctgggcaacagaatgagactccatctgaaaaaaaacaatatatatatatgtgtgtgtgtgtgtgtgtatatatatatatatatatatttatatatgtgtgtgtgtatatatatgtgtgtatatatatatgtgtgtatatatatgtgtatatatatgtgtgtgtatatatatgtgtgtgtatatatatgtgtgtctatatatatgtgtatatatatgtgtatatatatatatatatgaatgaggaggagaaggttttgcaaaacgggattatcaacacatcacgctggaccccataattgtgtacaattatgatttgtcaattacaaatacactaaaaagcaggggtggcaatcctgaggcttggctaacagagggacagatgtgcattcgggatacagacatgatcctagaagggcaggtggggacagatccaggaaggccctgaagcccgtgctaaagttggtctttattctgtaggccaaggacagccactgaagctctgtgaacaggacagaggcagggtcagtcatccatcacatatgtttactgagcacctgctatgctccaggagctgctctgggtgctggagacgctgcgcttaacgaagtcctgctgccctagagcttatattctagcaagtgattctggctggagcgtgttcactgtgtgctacgcattccaagtgctttatgcatgccgttcaatcttccggcatccctgtgaggtacttacatttatcaccctctttttgcagatggagaaacagacacaggggattaggtaactggcctgtggccacagaagtaccgtgagatagagcaggatttgaacttgagccctctggaccagattccttgctctaagccacgaagcttctctgatcacctccctcttttcccaggactgcaggctgactcccaggcctgcacgctgggcctccgtgaacacaggccctctcagtctggcaacatgagccaggcaggggtcaccgtggcggaggctcagattagaatagtggccagccccactgtggctctcagagagagcggcacctcctggtcctgtctctgccccctgcagcccagcggatggcactgagagtgggcagagccagggcactctctcatttaacagataggacatctggcactgccagaggcccaaggccgccatttcaaggsgaactatctcagcctccaacacgcagcctgggagagagcaaggaaggaggcagcatcttccaggaatgcctggggtaggggatctcccagccctgggctccctccatcaccctggggctcattcatgcgaggggagaattgggtccttcagggttgcatttagaagcagatcaggcctgagcaggcagagcctcgtaaacccctaaagcaccatcagtgaggccagcagggccttttggacaggaggatttgggctgtgggctctctacagaggggcacgccgactgaagggatggggacatccagcccaacggtcaggacatgggacaccaagggttttcagatgagcttgggtgagcggtaaagagagtggaggagggaaggcaggacagcctaagagttagcatcggaggcccacagcagggggtcragaaccagactgcctgagctcaaaacccttccctgtctcccccgctgtgtgacggtgaactagtcrctcaacctctctgttgtgtactctgtaaaatgggcataacaatggcatcctccttcccagcttgtttgcggatcatgagaataaggcacrcaaggagttagcagggtgtctggcgcacaccaccagctgctgctgctatgacctccgctaagcacctcacgtgctcggtccccagcgtcttcccatttgttctctggwgataatgcggtaaggcacctggtacattgcttggcaggtgcttggtaaatgtgactcttaacagtaatgatgatgatgatcaccacagcaggccttcaaagtgggtgtgggtaccccacctcccaaatgaggctcaaggccccacaaggagctggctgtgtgggcaggaccagagctgtgctcagcggcaggtcaggcctccccaggtgggcggggtgagaggggagctttgcggaggaagccaggtcacagcggagggggtatcagtcaggttcagcttggatactgcagcaatcgcctccaaatctctcttggcaccttaaaggaccagaggctcatttctcactcctgctgagtgctggcagcaggctggtccccgggtgctctgtgccttcctcattctgtgacccaggtcgatggagcagacaccatctcacaggctgctggctgctgtaggagagagtgtcaaagagctccagccgcttggctatttacatttaaatgcatgaaaattaaagtaaaattssaaattagtcacagtccaggggctcgccagctgcatgtggctagtggctgcggtcctggccagcacagacggaggatacttctgctctcacagaacattctactggacagtgacctcctagaaagtcccccaccaaaagtcaatgctccaacctggcacgaatacacatccttcttctcaaaactcacacgggggccgggaagtgccctcctactatgtgcccacaaggtgggggagaaccagaaatatttggggaacaacataatgagcaccaaagactggatcctgggtcagggtgggtcagagagcagaaggggagatgatccaggtagacaggtagagaaaggtgaactgagccgggcgcggtggctcacacttctaatcccagcactttgggaggccgargtgggtggatcacctgaggtcaggagttcgagaccagcctggccaacatggtgaaacccygcctctactgaaaatacaaaaattagctgggcgtggtggcaggcaccggtaattccagctacccgggaggctgaggcaggagaatcgcttgaacctgggaggcggaggttgcagtaagccaagatcccgccactgcgctccagcctgggcgagagagcaagactccatctcaaaaaaawaaaataaaataaaataaaataagagaaaggagaacttgagagaccagccggggcaggcaggaggcatcatggggacctttgtggggaagtccaggactggagctggcacgtgtaccccatgacacgcttcccaaccccaggcctcgcccctgcccagaataaagaaaggtgagggttacaggcatcccccgggaagagcccagcacaagcccacccatgcgcaccatgaggttagtgctgtcctgattcgaggctggggcatggctggggwgacctcgaaagcacactgctccattggagaaytggcccagaaaccagtcctggccctccccccgcctttcctgttcgcctcagctaaatagatcagaaggaaaaagtctgtttgattttaatctcgacgcaggacactggagattacattttccacggaaaatgtcagccactgccgaaaataggactttggagaaaatgctagaaagtgtatttttaggctatatatttccctcctggattcctacagtccagtgggctgcttgatactccccagggttcagctgccaggtgcagaccccaaagcttccaaacaggtggtccggggagagggctcccgtagrraaaaaaaatgcctgtaggccaaaaacaggtggaccaatgcaaggacctgtttccagtgtcaggaagaaggaggtggaagagagccagccatggccggggcctcagattccgcatggctaacgagcttcggggagatgccacagatgtccggagactgtcctttgagtggcaagagacaagaggaggcagggctcagttagactgcsgcctgggaagggggagcttctccaagcccaccctgcagagcctggctcccgcccctctcatccccacacagacccactcactcactgtgtggccttgcccaagccacaccgccaccctgatcctccgtgcccgggtctgtgaagcagggcaggaactcccygccacctgcctgccctttaggctgtaggaatgattcaaccacttcaggggcccgaggcacctctgcctgatacaaaaggtgcttcgggaaatgttggagataaaaatcagcacctaggcctgggcrgtggctcacgcctgtaatcccagcactttgggaggccgaggcgggcagatcacaaggtcaggagttcgagaccaccctggccaacatagtgaaaycccatttctactaaaaatacaaaaatcagccgggcgtggtgccgcgtgcctgtaatcccagctactcrggaggctaaggcaggagaatcgcttgaacccrggaggtggaggttgcagtgagccaagattgygccactgcactctggcctgggcgacagagcgagactctcttaaaaaaaaaaaaaaaaaaatcagcacctcaattgaggtgggtgctgttagagtttggaaacagtgttcttcaccatgttgtgtggggggcgactgggtatgtggggcggggctggggggtcttcactgagctcgatggagtgcagggcctgggggggactgcaccatgggagggatcctcactgcggggtgctggctgctggggtcctgtccaggggagccctgctgtgcggtggggcccagcaggccggcccagctgcagaccttgtccagctggtcccaggggagcagggatgttagaggcagggtgagyggaaggcrcctgagctggtgttctccatttgagggaggggctgccttgctgtgggggtggcagagactcaacaggactctgcggccatctraggaagggctatgcagggagccgtgagaacagcccactctccgtgtgacctgggtgggggaagtgtctgttttctaggcctcagtttcccwtctgtgaagtggggcagggaggggctggactggaggggctggaaggaccctcttggctccgtactcatcccacgatgagccaagtcaccctagatcttcctcaatctgagtcgggggagggtagaggggtggaagcatttgggctcaaaccatttatcctgtggcctcagagagccctggggatacatccagtccgtggtgggggtctgggcgggcacggtggggaggcactgccagactcccccgaggcccctgcgtgacccactcctctcttgtctcctcatggctccygtggctgcctggatcctgcagagctcccgagtgaggaaggtgaggctggcaccgggatggacctctaggccgcgggcagcatccctgggtcgttctctgtctggtcatgacttccttctccccgctgagtgaggccttgctgagctccccaggatcacccacctgagcctctcagcgacctgggttctccctcttctgagtgcagggagggaatgggccgggaggtctcccgggccatcccagctctgagtgggcagggtcagtggtgggggcccagcctcacacatgacccccgttcccagggaagtccctgtgggagctggtgctggaacagtttgaggacctcctggtgcgcatcctgctgctggctgcccttgtctcctttgtaagtagggccctgccagccatccygtggtagtcggtagccctggagggagagccaggctgggcagtgctccgaggtcctggagcctgggcctgtcctccacaccctgggcctgcgccctggccttccctggccctgccctgctcagacttcagcttcccttgcctgaaccctcatggcccctacattgggtccccggctcccacctgacccctccaatccatcttatcctctggctctcagcgagctccccaactcacatctgccccccgccccgccctgctgtascctagggtttctctgcctcagcactactgatagtttagaccagatcattctttgtcggggtgggggtgggggctttccactgtaggatgttcagcagcatacctggactctacccacaagatgccagtagcacctcccggggatgaccatcaaaaatgtctttagacagctgggcctgacagctcatgattgaaatcccagcactgtgggaggccaaggcaataaaatcgcttgagcccaggagtttgagaccagcatgggcaacatagggagaccctgtctctacaaaaaatacaaaaacattagccgagtgcggtggtgcaggcctatagtcccagccactctggaggctgaggcaggagaattgcttgggcccaggaggatggagctgcagtgagccgtgatcacaccactgcattccagcctgggcaacaragcaagaccctgtctcaaaaaaattaaaaatgtcttcggacattgccaaatgcccctggggggcaccttgtccctggctgagtgctgctgccggagccccttccrtggatcccagtgtcccccacatggattttggggtctgaacctcttgcagcctcctcttggctgccgcatctccttgctgttcctccattcccactgatgctcccctggctaatgggctttggatgcgtgcatcagaatcacctgggcttggctgggcgcagtggcgcatgcctgtaatcctagcactttggcaggccgaggcgggtgagctcaggagttcagcctgggcaacgtggtaaaaccccgtctctactaaaatacgaaaaattagccwggcgtggtggtgcacgcctgtaatcccatctacccgggaggctgaggcatgagaattgcttgaacctgggaggcaaaggttgcagtgagccaagatccagccaccgcactccagcctgggcgacagagcaagactctgtctcaaaagaatccgtaggcttgccgacacacaggtgactgggccccaccccagaatttacgactcaggaggtctgggagggaccccaagatcaacatttcttacaagtwcccagctgctgctgctgctggtctggggaccacactgagatgctctgctccaggcagacagtaaggcctcggtgggcagccatccaactgccccacagccttgaaggttggcctgggtggggtggtcactcctgtggggtgggcaccctgtgccaaggccttctcggaggagtggccctctccaagccaagagctccccagtgctatctccccaaagcagggaagcaagcaggagatccggggtgccaaggaaaaggagagcagatctcggcccgcagcagggcctgagctsrccagctgtgatcctgcaggtcctggcctggttcgaggagggcgaggagaccacgaccgccttcgtggagcccctggtcatcatgctgatcctcgtggccaacgccattgtgggcgtgtggcadrtgdgaggcactgggggtgggaccgggcggggggsggtctcccagccactaggagtgccctccacctggtgctggcgtcctgcagactctcctgcttccacctccwwcccaggccccagaggagtcactccaagggggtggtctgcggggggcagcagggacagactgcctgccggccttctattctgcaggaacgcaacgccgagagtgccatcgaggccctgaaggagtatgagcctgagatgggcaaggtgatccgctcggaccgcaagggcgtgcagaggatccgtgcccgggacatcgtcccaggggacattgtagaagtggcaggtatgccggggcctcctccttttattttattttattttatttatttatttawtttatttatttatttatttattttttgagatggagtcgtgctctgttgcccagactggagtgcagtggcgcaatctcggctcactgcaacctcctgcctcccgggttcaagcaatcctcctgtctcaggcttctgtaggggcctcctccttttattatgtgggcctgggagccccatccctctctgtgcctccgtcattccggccgtatatacagagggggtggctgtcggatccctccaaagccctttggccaaaaccctgttggacagatgagactgtgggccagaggggcaggggtcaccagagcgatcacagctcaggcacccgacgcccagccccagccttgggttctgggaacccttctggcttttcccagctggtggtgcccaaagccaccctcagccaagccattctccccgcacagtgggggacaaagtgcctgctgacctccgcctcatcgagatcaagtccaccacgctgcgagtggaccagtccatcctgacgggtgaggccccccccaggaggccgggacctagtgggccaggactaagggatgggcgtgtcttcatgtggggcttctcatctctgattccctgaccaggtgaatctgtgtccgtgaccaagcacacagaggccatcccagaccccagagctgtgaaccaggacaagaagaacatgctgttttctgtaagtcaaatgtctggggcctttgcccagacaatgataaaaataacaacattaggattatgatcaygcctgtaatcccagcactttgggaggctgaggtgggtggatcacctgaggtcaggagttcgagaccagcctggccaacrtggtgaaaccccgtctctactaaaaatacaaaaagattagctgggggtggtggcgtgtgcctgtaatcccagcaacttgggaggctgaggcaggagagtcacttgagcccgggaggcggaggttgcagtgagccaagatygygccactgcactccagcctgggtgacgagagcaaaactctgtctcaaaaaaaaaaaaaaaatatttttttttctggccctgttgcccatgctggagtgcagtgstacgatctcgggtcactgcaacccccgccccccaggttcaagctactcttgtgcctcagcttcccaagtagctgggactacaggcacctgccaccacacccggctaatttttgtatttttagtagcaacaaggtttcaccacgttcaccaggctggtctcgaactcctgacctcaagtgatccgcccaccttggcctcccaaagtgctaggattataagcatgagccactgcacctggcccaacattaaggttaatcagctaaagtcctacggggaagaacctcatcgattcttgacaatacatgcaaatttatagtaataataatagcttgtgtttactggggactgtgtgcctggcactgttctaagctctttacacatactagtttatttaatccttaacaccaaatctttgaaataagtactcttgttatgcttgttatctatattttccagcaaggaaagaaacaagcacagagagattaagtaagtttcccaaggtcacacagccaatgagtggcacagctgggacgaactcagacatcctggatttctgctgggagaccctgccttcccctggagaagggcagagcctccctataatcactcgatagaaatgctctagaggaaggaggtctgccaaaatggtggaggatggtgggggatactccattctccgacaggaaaactgacccacaaggcatgatgcccggtctacctggctcttctcagggatagtgatgggttcagctttggcgggagagacctgcctctgtggcctcagagaaagctagcaagtgatactcacagctgccccgcagtagcctgaggccagcaaggagcgtttaggggcacaaggaagggtcaggccagtcagacaatggcccaggccaccaagttatcgggggatagaaaacttcctggaagggaagagggatgaagaaagtgaaactcacccagaactccttttttttttttttttttttttttttgagacagagtctcactctgtcacccatgctggagtgcagtggcacaatctcagctcactgcaacttccgcctcccgrgttcaagcgattctcctgcctcagcctcccaagcaggtgggattacaagcacacaccaccgtgcccagctaatttttgtattttactagagacggggtttcaccatgttggccaggctggtcccaaactcctgacctcaggtgatctgccygccttggcctcccaaagttctgagattacaggtgtgagccactgcacctggcccagaactcttcttgagaggggcctacctagctgcatagaagccttggacaggatgccttggggtggggagggaagctctgagagctgttgctccaggatcagcagctgtcactaagaagctttggaggggccgggcatggtagctcatgcctataatcccagcactttgggaggccaaagcaggaggatcatttgagctcaggagtttgagaccagcctgagcaacatagtgagacctcgtttctactaaaattcaaaattaaacaaaacaattttctaaagtaataataaaaagaagctttggaggaaggtgtctggctgggccctgcatgttgggggctggagctacgttgcttaagacagaagagaggctggggcctgccttctcgccagccccaacagcatatgcatttgaaggggcaccaggttcttagcctcctcagaaaaactatcttgggcctgtgttggaccactttacagaagaggacaccaagccacaaggctggctgtcccttatgctaggaattggggattttactggagccttggaaatggatgagctgaggctcaggttttctggattttttagtaaatattaatggactgtttattgggttcgtagtcagctatgctcctgtgtggctatagtgattgtttacgaaatcacattttgtggggttgatgcttgtrctgcgctggttgattatatcatcaatatcagcccccgtgcctcctctgtgcccggccccgtgctaggcactggggatacggcgatgaacccaaaccctgccttcctagagctgacactctcatgggaaggcagcagggaccccgtgcatacatagctacaggagtctggaagcactagcaacatggagaaaaggaaagccgggtagaaggataagtgccttattccggcctgaaggagtcaggggtcctgggcccctggttggctgctgagcagctttttccttgtccctcccctggccagggcaccaatatcacatcgggcaaagcggtgggtgtggccgtggccaccggcctgcacacggagctgggcaagatccggagccagatggcggcagtcgagcccgagcggacgccgctgcagcgcaagctggacgagtttggacggcagctgtcccacgccatctctgtgatctgcgtggccgtgtgggtcatcaacatcggccacttcgccgacccggcccacggtggctcctggctgcgyggcgctgtctactacttcaagatcgccgtggccytggcggtggcggccatccccgagggcctcccggctgtcatcactacatgcctggcactgggcacgcggcgcatggcacgcaagaacgccatcgtgcgaagcctgccgtccgtggagaccctgggctgcacctcagtcatctgctccgacaagacgggcacgctcaccaccaatcagatgtctgtctgccgggtgagtgacggccagcttggtgttgctgtgcgttgcagagcaggctgggctccctctctgggtctctcccccacctccttttcagtgagggatggaggagagaatctgtgggctgtcccttggcccagagcaggtccaggttttcacaagatgacagggagactatagcaaatcatgcctgggtagccacatgtcactgaggcctgtgtgtcactgtggggccctggccaggttgctgacagtctgttaacctcagtctcctcattggaagcctggctgtgtgagccctgctaggtaaacgtaaaggacataggagaggctcaagttcagccttggcataggggccaagctgggcctggatccgggttccatcctgccccatcatgactctgtgcagtcgacacctgtcaccagataagccagctccggtaacctgggaagggccagggcaggaattattcattccctgcacttcatcccacatcctgggctcactgcccacacggccaagggattctggctgagacttcagcaggcccatggggcagaaggctcctcctgacccagcagatgggtgggtggggagatggtgaaggctatgtgttccccacccttcccaggtccccagtgcctctctgtcacccctgcttccacatctgcccactgggcttggaaacccaggctctgtattctgagaccctaaggccttctgggagcccatcaaaggctgctttaggggaggggtgctaccgagctttactgtcctgctaaaagccctcataggattttatttaaacagagtgtttcttgactaatagcgatttttttttttgaggcagagtctcattctgtttgttgtctaggctgaagtgcagtggcatgatctgagctcactgcaacctctgcctcccaggttcaagcgattctcctgcctcagcctcccaggtagctgggactacagacaggcatgcaccaccacacccagctaatttttgtattttagtagagacggggtttcaccatgttggccaggctggtctataactcctgacctcaagtgatccacccgccttggcctcccaaagtgcagggatttcagccctgagccaccgtgcccggccctaataaatttttttttttttttttttgagatggagtctcactctgttgccagactggagtgcagtggcacgatcttggctgcaacctccgccttctgggttcaggcgattctcttgcttcagccacccgagtagctaggactacaggcgcgtgccaccacacccagctagtttttgtagttttagtagagayggggtttcaccatgttagccaggatggtctcaatcaagcttgacctcgtgatccacccgcctcggcctcccaaagtgctgggattacaggcgtgagccactgggcccagctaataataaagagttttaaagtgcagtgtggggaagttgtaggggccttacgtgctggatgctgggctgtgcttgctgggtgactgcccccaggagtagggaggagagcgggaaggaagggacacttatgcatctactgggcgctgggctggccatttgcttgagaatgtgcggtgaggccatgtccacgaagcaagaactgtctccccagcagagctggctgaacagacaaagaaataggcatgctgggccaggtaagcctcctgttcctgaggtgcacaggtgggggctgagtgacccagcaggccctgtggcaggggctcactctctggggacatctctgggctagaggggtctgtgccccagagaggcgtgtgggtttcctcccttgaaggccaggaactcatttccttgaaggcaaaggagggggcggttcccatgttactagtggagaaactgaggctcagctacttggccagggatcgcacagtgagatgggcaaggacccaggctttctgcctagctcagggctccctcaagctggcaactgcccccagagcactgaagaatctgccataaatccctcagaagtccaggacattgggacaaaccggagccggacacatctggcagagcagacggtccctgcctcagcctggaccctgcgttctatttccctcctggtgggcacggacggccaggccggtttggccctcggtcgggcagggggcctgcaggaccccaccctggggtcgactggccgcccggggaggagggaggcgaccccgcccgcctaagcacgcccctgcgctccccagatgttcgtggtagccgaggccgatgcgggctcctgccttttgcacgagttcaccatctcgggtaccacgtatacccccgagggcgaagtgtgagtgcggggccaggggacgcgcgggcgggcggcctgggggcggggccacgcgtggcggcgccgaggtggccgtgggaggcccctgggggcgggccaggaggcggagcctctcccggggcggggccaggaggcggagcccttctgggggcggggccaagaggcggagccccctcctaggggcggggccaagaggcggacccctctcgggggcggagccgaggtcctcctggtgaccgccccggctccgcaggcggcagggggatcagcctgtgcgctgcggccagttcgacgggctggtggagctggcgaccatctgcgccctgtgcaacgactcggckctggactacaacgaggtgggcctcaccccctttcatgacctccctagtatccaggcgaccaggacagacccttttcccagcctcaaagctcccagggttggcagcccttgctccctggaagtgccacacccagggagcacggttacccctgcacacccctctctgccgcccctccctttccgcagacaggcttcagaaccctccccctggggctcttggtctgtgggggactgccatggaaggggctgaagggctggggaaacctgtggggggaagagatttggggaacaggaccaagaaaatgttgaaagcagaagacacagcccacaaaaggcccacgttcagttaaagcctcctgcgacttaggcattcacgtggccggggcagtggaatggggcatgcagcaggcgtctgcccaaagggaggtccttggccagacccagtccgaggccaagctgagggcagtagagcaccaacgaagagttttgagcaggagagtgacatagtcagatgtgcatttacagaagatcactgaggcttccgtgtggaggccagacagacagtagaggaccgaagccagggaggcctatgtggtcattcaggccagagagatgcgggctgagccctggctggagccttggggagaggggagaaggtatgggtcagagacatttaggagccaaaaatcctgggacttggtractggttaggtgaaagagacagggaggaagccaggggggctcctggttcttgtgctgtctggggctgtcgccggagtggcaaatacagagagtgggagaggtgkcctgaggggtccccggggaacaaggttcagcaggcagctggacatctgggcttggggctcagcaaagggccccagggagagcaggtgggagggtggragcgggcccagacagcagaaaccggtgaaggaggctgacaggaagtggacagagatgcaggcggagggcagggacggtgtgtggcgatcaatgccagtgtggggggctgaatgtcagtgtcagacaccaccccgaccccagggcggccaggctgggaagggctcacgggccggtgcaaaggaggttacacggaactccagcaaaggcagctkcaggggsaargagtgagtgaggctggggatgcgggctggaggctgcctgcccctcactccctatcccctgggtccttgccaggccaagggtgtgtaygagaaggtgggagaggccacggagacagctctgacttgcctggtggagaagatgaaygtgttcgacaccracctgcaggctctgtcccgggtggagcgagctggcgcctgtaacacggtgagcaggrctgggggctcaggcctccggctgcatggctggggcttctgggacatctggagaaggcagacaggacactgaagtttttgttttgtttcgttttgtttttttttttttttgagacggagtctcattctgtcgcccaggctttagtacaatggtgcaatcctggctcactgcaacctctgcctcccgggttcaagtgattctcgtgcctcgacctcccggcgcgtgccaccacacccggctaatttttgcatttttkagtagagacagggtttcaccatgttgtccgggctagtctgaaactcctgacctcaggtaatctgccygccttggcctcccagagtgctgggattacaggcgtgagccaccgctcctggctgacggtgaagtaagacttggagaaaagaggggagaaggctgcgtgtgggcaaaggtttggagttgggctgcacacagcatggtcagcaaacggcatcgtattgccatttctggggctggagagggaaatggaggccttgaatggtggggtcagaggagtgtagatgtcatcccacacagagcaagaggctctcttggggccaagcagttggtgggaaggcaggcgagagttgctggctctgtccttcatgccctgacctgcctggaccccgcaggtcatcaagcagctgatgcggaaggagttcaccctggagttctcccgagaccggaaatccatgtccgtgtactgcacgcccacccgccctcaccctacyggccagggcagcaagatgtttgtgaaggtgggggcctgcctggctggcctgggcccctgcgcgccctggggaacctggtcatccacgctcctctgtgagccccagtcctcccgtgtgaatggcagggttgggttacaagttctcaggagccccttttgcctctaaccggtggtgtaggggtggttggtgccacccttggtgctctgtgttttggaaactgagtcccagggagggaaaggaatcgactcccttgcagaccactgtctacagygtctccgttgctgctcccaaaaccgaagagagaaatacagctctagcttcaccctgcaagggaagtttaaaccccttttgaaatgaaaaggcttctgtactgggagctcgggccacttggaaaagtcagtgcctgggtgaccttttaggagcaggagaagccactgaaggagctttagaggctgttcctaggcccggggtgaggtctgaggtgagacctgaggccactgaggggcctgtcatccctggacccccttcccagggctatgcccgccataccctgtgtatggctctatttctggtccccaggcagggctcagcctgcctccctgctgctgaggcccctaccaaattggaacccgagtagcaccagggaagcagggcctgcaggggatgccattctcacccctgcctgcaaaacgctgcagtgcccgagtctgctgtgggctggtgggggaagggcatcgctaggttggtggctgcccccaccccagcacactccccccattctctttagattgtctcacagggggacccacttggttctcattctgaactttcagtgaatggattctgctccctgccttgcgtgtgtacccttgggtggcctttgcccgtatcttagtctcagtttcctgagtttgggcaggaaggagaggaggggttctgackgatgagttacctcttctccctctccccacctcgcagggggctcctgagagtgtgatcgagcgctgtagctcagtccgcgtggggagccgcacagcacccctgacccccacctccagggagcagatcctggcaaagatccgggattggggctcaggctcagacacgctgcgctgcctggcactggccacccgggacgcscccccaaggaaggaggacatggagctggacgactgcagcaagtttgtgcagtacgaggtgggtgcaggagccgattctccctgcagtacgaggtgggtgcaggagccaagtctccytgcagcagctgagcaggtggtaggtcagggatgggctcaggccccgcttgaatctgccccctccctacagacggacctgaccttcgtgggctgcgtaggcatgctggacccgccgcgacctgaggtggctgcctgcatcacacgctgctaccaggcgggcatccgcgtggtcatgatcacrggggataacaaaggcactgccgtggccatctgccgcaggcttggcatctttggggacacggaagacrtggcgggcaaggcctacacgggccgcgagtttgatgacctcagccccgagcagcagcgccaggcctgccgcaccgccygctgcttcgcccgcgtggagcccgcacacaagtcccrcatcgtggagaacctgcagtcctttaacgagatcactgctatggtgaggccacagcctggagccccaggagggggtgatgagtggggccacggggtgtgaaaagagcaagccgtgcaactctcccctctgcctcattcttaccttttctaacatcttattaccaaaaaattcaaatacaaaaagaaatttaaataatgttattctgggccaggcgcggtggctcacacctgtcatctcagcactttgggaggctgaggcgggcggatcagttgaggtcaggagttcgagacaagcctagccaatatgaggaaaccccgtctctactaaaagtacaaaaattagcggggcgtggtggtgcattcctgtaaccccagctactcaggaggctgaggcaggagaatcacttgaayccgggaggcagaggttgcagtgagccgagatcacgccactgcactccagcctgggtgacagagtgagacttcgtctcaaaataataataataacaatactaattttattctgaacacctacatgtctatcatctggattctacaactaacattttattgtatttgctttatcacatacctgtccatgcagccattctttgcccatccctagcccatcttttcttaggtgtatttcaaagtcagttgcagacatcggcatacttccccctcacctactttagaatacatgttaaccagagagcaatgttgtttgtggttctgtttttcctttttgaggcaaaatttgccttcgatgaagcacacagatctttggcgtactatctgatgagtttaggaacatgcacacacctgtgtaactcacagccttatcaagataggaaaatgccaggcatggtggctcacgcttgtaattccagcactttgggaggccaaggcaggaggaytgcttgagcccaggagtttgagaccccatctctccaaaaaaaaaaaaaacaaaaaacaaaaaaaaaaagatatgacacattaccatcaacccatgaagttccgtcacacgccttccccatctctgtccttcgtcgcaaaacaggcgatcactgttttcggttttttttttcaccgtatatgagttttatctgccctagattttcaaatgaatggaatcatacagtatggactgttttggtttggggcttttttgagatctatctgccttgtcgtatcagattattgcttttttttttttttttttttttttttagacagagtctcgctctgtcacccagggctggagcgcagtggcacgatctcggctcactgcaacctccgcctcccaggttcaagcgattctcctgcctcagcctcctgagtagctgggaccacaggcgcgcaccaccatgcccagctaatttttttatttttagtagagacggggtttcaccacattggccaggatggtctcaatctcttgaccttgtgatccgcccgcctcagcctcccaaagtgctgggattacaagtatgagccaccgcgcccggcctattgcttttttattgttgagtagcattccactgtgtgaatatttcagtttattgaaccattcctctttggatggacatttagtttgggcctagtttttgttcttaattgctgacctattcttctgacctcagcctctcccctgacctggtctctgtttttaatcttgacctccagcctaacccagtccttaaccctgacccatggcccagccttgatctgcacaccaagcttgactatcactgcagcctggttcttgatcttatctttgacctctgtgctgactttgtccctgaccttgatgttgaccytcatcttaatctaattctttttttgtttgtgtgatgaggtctcactctgttgcccaggctggaatgcagtggcacagtcatggctcactgaagcctcatcctctcgggctcaagagatcctcccacctcagcctcctgaggagctgggactacaggcatgcaccaccatgcctggctaattttttaattttttgtagagatgaggtctccctatgttgcccaggctagtcttgaactcctggatcaagcaatcctcctgccttggcctcctaaagtgctaggattacaagtgtgggccaccacacccagcccgacataactatttacgttgagcttaaccctgatatgaattccagtcttggccgggcacggtggctcacgcctgtaatcccagcactttcggaggttgaggcgggcagatcacctgaggtcaggagtttgagaccagcctagtcaacatggtgaaaccctgtctccactaaaaatacaaaaattagctggtgcatgcctataatctcagctacttgggaggctgaggcacgagaattgcttgaacctgggaggaggaggttgcagtgagccgagattgtgccattgcactccagcctgggcgatagagtgagactctgtcccccaccaaaaaaaaagaattccagtcttgacctggaccaagaccttattctcaacgttgaccttgacactgccccacccccaatgtaatgctttatgttgacctcaactttgatctggccttcaatttttttagatggagtctcactctgttgcccaggctggagtgcagcrgtgcagtctyggctcactgcaacctccgcctccygggctcaagcgactcccctgcctcagcctcccatgtagctgagatcataggcacgcgccactgcgcccagctaatttttgtattttcagtagagatggggtttcatcatgttgcccaggctggtcttgaactcctgacctcaggtcatccacccacctcggcctcccaaagtgctgggattacaggcgtgagccaccgctcctggcctggccttcartttgaccttgattgcaactccagacttcatgtcacttgacttcactcctcatgtggaccttgacttggcctctgcctttgccttgatcttcaacttgactacaacacctacctggctctttacccgggccatccccttgacttcattcctgacttgacctcagctttctccctaacctcagtttcatcttctaccccacatccaacctcaatttcatccctaccctcatcgctgactcaccgtcatccccatccccacctcatcatcttccctaacctcatgcttgatattctccccaactttgtccttgtctgcatcccttgccttctcctcagcctcatcctctgcccaatttctagttcattcttgaacccaccatttgttctgtctaactgtctgcttcctttggaacatcccctaagattgggggtgggctgagttgagaagagatggggaggtggaagggaagtttctcaggcacagccctacctgacctggcccacagacyggcgatggagtgaacgacgcaccagccctgaagaaagcagagatcggcatcgccatgggctcaggcacggccgtggccaagtcggcggcagagatggtgctgtcagatgacaactttgcctccatcgtggctgcggtggaggagggccgggccmtctacagcaacatgaagcaattcatccgctacctcatctcctccaatgttggcgaggtcgtctggtgaggccgggccttccctcctckcagccctctcaatccgctctgtgcccctgagatggggaaaacgcctgttcctcrgatgcgctgcagggatggaggggcctgtgccctgccctggctggggctttccagggtcccaccttggagtggacagggragagcacctcttrtcattctccagaggccctggtgacctatggatcatggtcaccccagcacccacggaggtgcctgaagagtcgcctgtcagccctccagccatgaacttcccacttgcagattagcaagatgagagaaaagccccacctttaggcagtcgtgtgtgtgtccgtgtgcgaatgtgtatttgtgtgcacatggcctgagtgcctgagtgagaggtgtgtgtaatgtgtatattttgcatgtgtgctctggtgcattttgagcgtgagtacaagcagaaggatttgtgccggcgtgtgactgtgcacacactcrtattcacatgtgaggatgcctgtggggaatggtgagcgtgtgtgttgctggacatggatggattctgcatctctgcacctcagggcagatatgtaggtgtttgcttgtgtttgccggatggtgtggcatgtgctaggtttttgcacatgtctgattcttgggcatgccctcttcrtgtgcgtgtgtgtgtgtgtgtgtgtgtgtgtgtgtgtgtacttggcctctgctaggcctaaagagcaggtatgtccaggatccagagctgggactggggaaggcaggactggccaggcccgaggcagagctgtgtacacacacccttcacatcacagctggcggagggaggaggggctgcygtggagacagtgggtgggtgagctcccagccttgggtctgagcargagctggagcctgcatctgccgggggctaggcctaccggggctagagctcatgactctgttccagcatcttcctcacggcaattctgggcctgcccgaagccctgatccctgtgcagctgctctgggtgaacctggtgacagayggcctacctgccacggctctgggcttcaacccgccagacctggacatcatrgagaagctgccccggagcccccgagaagccctcatcagtggctggctcttcttccgatacctggctatcggaggtgagtggggcctgagccctccgtggaattcctaagcttcctaagagccttgtatcaggcttgcaagctgcagacagtgtgactcagcctggcttgtgccagtagaaactgtatgagctcatgtaatggaaaagaccaggcatggcgggatctgggtctcagtatcactggcatattttggcactgcctcagcttcattctcaggcccacgtccctcatggtggcagaatggctgctgcagccccagccctctgctcactccattacaaccccaaattcagcagaagagagagtcttttatcatgctgctctcccggtagtatgataagaatctcaggcctgggctgggcatggtggctcacacttgtaaccccagcattgtgggaggccgaggtgggcagatcacttgaggtctggagtttgaccagcctggccaacatgtggctcacacctgtraccccagcactttgggaggccgaggcaggcagatcacctgaggtcaggagtttgagaccagcctggccaacgtggtgaaaccccatctctactaaaaatacaaaaattagctgggcatgatggcaggtgcctgtaatcccacctactcgggagactgaggcaggagaatcgcttgaacccaggaggcagaggttgctgtgagccgagatggcaccattgcactccagcctggkcgacagagtgagactccgtcmcaaaaaaaaaaaaaaaaaaaagtctcaacaggcctgttctcattggcccacatagggttcacctgctcatctccaagcactggggccaagggtatggcagatgctgattgaccagccagggcccaccactggcatcgaggggaggtgcctgcaaaccacagggctgagagaggaaaagggtggctccctgcagggaattcagggaattattaggcaggggaaacrgaygccagaaaaccaccgccattctctacagccggtctcctcccttccccgcagtgtacgtaggcctggccacagtggctgccgccacctggtggtttgtgtatgacgccgagggacctcacatcaacttctaccagctggtgagcaagggctggccagggagcctgttgaacttacagctcgagttgttggagttccaggggagatgggtctagagccgcatgggtggcctgcagtgtccttccccactcgctatacacgaataaacatccccacctggggagccgagctcagagcccacgggaaacccagagacaccagcacggacccccaagccaaaggcgcctccccatcccagtcagttagcggggaccaagaggcctcactgccagatgtatcttacctttgtcaagggacccctaaaacgttgaggcctcagaggaatgagcccctaaatggtgggactttaggcagagggtcaaactgaggagatcaagaatggaggggagggctgggcacggtggttcacgcctgtaatcccagcactttgggaggccgaggtgggtggaccacctgaggtcaggagttcgagaccagccgtccaacgaggtgaaaccccgtctctattaaaaatacaaacattagctgggcgtggtggtgcacgcctgtaatcccagctactcaggaggctgaggcagttgaatcacatgaacctgggaggcagcggttgcagtgtgccaagatcataccactgcactccagcctgggtgacagagcaagactccatctcaagaaaaaaaaaaaaaaaagaatcgaggggaggctgggcatggtggctgacgcctgtaatcctagtactttgggaggccaaagtacttgagcccaggagtttgagaccagcctgggcaatacagtgagaccccatctctaccaaataaaaataaaaatgaaccaggcacggtgatgtgtgcctgtagcttcttgggaggctgaggtgggaggatcagttgagtccaggaggtcacagctgaactgagccgtgatcacaccactgcacttcagccttggtgacagagtaagaccctgtctctagaaaaaaaaagaacacatcctgccgcggtggctcacgcctgtaatcccagcactttgrgaagccgaggtgggcggatcacttgaggtcaggagttcaagaccagcctgaccaacatggtgaaaccctgtctctactaaaaatacaaaaattacccaggtgtggtggcggatgcctgttttcccagctactcgggaggctgaggcaggagaatcgcttgaacccgagaggcggaagttgcagtgagctgagatcgcaccactgcactcgagcctgggagacagagcaagacgcagtctcaaaaaagaaaaaaagaaaagaaaagaaaaccaaaccaaagggggtcttgcaggacacagggaataggacataggcaggcaggcaaagggaaggagtgggcacagcagtggcctcaccagtagaaatgggctcctccagggcttccccatgtgcctgtgaggcagaagctccagcccgacgcactgtctttttttgtttgtttgtttgagatggagtctcgctctgtcacccaggctggagtgcagtggkgcaatctyggctcackgcaacctccacctcccgggttcaagtgattcccctgcctcagcctccccattagctgggactacaggcgcccaccaccatgcccggctaattttttgtattttagtagagacagggtttcaccatgttggccaggatggtctcgatctcctgacctcatgatccgcccgcctcagcctcccaaagtgctgggatcacaggcgtgagccacggcacccggaccccagcgcaccttctaatgaataattccagaggccacaccgagacctatgacctggggaatactgtgtgtgtgtggcaggtgcttgctggtgaaacccagaaggtctgcactgggcagggcatttacagcaagagcaacagacccattgaaacatatttatttatttatttatttgagacagagtctygctctrtcacccaggctggagtgcagtggcgcdatctcagctcactgcaacctccgcctccygggttcaagcgattctcctgcctcagcctccsgagtagctgggattacaggcacccgccatcatgcctggctaatttttgtatttttgtagagatggagtttcaccatgttggccaggctggtctcgaactcctgayctcaggtgatctgcccgccttggcctcccaaagtgctgggaatacaggcgtgagccaccgtgcccggccgaaacatcctgacatgatcttgttggtattttcttctctgtgtagacgcataagcgtcttaagcattcacatgcccgagtgggaggtgtgtgtccctatgtttgtgtgtacatgtatggataggccattaagatctggcagggtgaggcccgacaacagtggcacaattggcaggaggatttggtcctctcggtcactgggtgggtagagtcaggttcaaagttctggaggttttcccttctctatgatcagcaccaaatagaaacgtgtggctgctcacgcctataatcccagcactctgggatgccaaggcgggcagatcacttgagcccaggaatttgagagcagcctggacaacatggcgaaaccccgtctctacaaaaaagacaaaacttagccaacagtgacggctcaggcctggagtctcagctacttgggaggctgyggtgggacaatcacctgagcccaggaagtcraggctacagtgagctgagatcgtgccactgcactccagcctgggtgatgggagtgagaccttgtctcaaaaacaaaacaaggccaggcacagtggctcacgcctgtaagcccagcactttgggaggccgaggcgggtggatcacttgaggtcaggagatcgagaccagcctagccaatatgatgaaaccccgtctctactacaaacacaaaaattagccacgggtggtggcgggtgcctgtagtcccarctrctcaggaggctgaggcagaagaatcgctcgaacttgggagatggaggttgcagtgagccaagatcacgccactgcactccagcctcggtgacagagtgagactcagtctcgaaaamaaaaacaaaacaaaacaaaacaaaacaaaataaaaagaaaacaagacatatccacttgcctcaaatgctggagcttgagttttggagaaaacgtccactatcgatttaagagattatcagattctctatctctttgttaaaatatctagccaggcttatttctcttcctgcacgagagaggagaaacgatactcagagtggccttatctgcatttgtgcagtgtgggaaaacggatgtatttatgcgacagacagtagatcagacagccgggcattttacacgtttttctttgaggattatgttcacagcacatggccccaatttctaatttaaaagatctccatggccgggcgcggtggctcacgcctgtaatcccagcactttgggaggccaaggcgggcggatcacgaggtcaggagttctagaccatcctggctaacacggtgaaaccccgtctccactaaaaatacaaaaaattagccrggcgtggtggcgggcgcctgtagtcccagctacttgggaggctgaggcaggagaatggcgtgaacccgggaggcrgascttgcagtgagccgagatcatgccactgcactccagctcgggygacagagcgagactctgtttcaaaaaaaaaaaaaaaagaaaaaagatctccatgttcagattagactcccaagagcaggatctatatttttggtgaactaagctggttaacggttggaaacattcaccctcatcccyataatatggaagagaacaagacaagttcccccaataccctccgttcagcctcttagcacgattctgtgaacaaggtttttgagcagtaagaaaactcccctgaggctataggggttatcrgccctgagcgcttcatgttaattacagagaagctacctgttacagctgcaccttggcaattcattagtctctgtcagaagcacacatcagatctgatagagttcagtttcagtggcagaaatggagtgaggtatgaggtgtaaatggaatttttttttttttttgagacagagtcttgctctgtcacccaggctggagtgcagtgacgcgatctctgctcactacaacctctgacccccgggttcaagtgattgtcctgcctcagcctcccgagtagctgggattacaggcacgcaccaccacgcaggctaatttttgtatttttagtagagacggggtttcaccatgttagccaggctggtcccaaactcctgacctcaggtgatccacccgcctccgcctccctgggatgacaggcrtgagccaccacgcccagctgtaaatggaatcttaataacagtgaacagggcctgcgtagccttcatcttctataccgcaaaggtgaattccactcccgcatggttttgttggttgattttcacatgcatttccctattcagtgatctccaggctcccgctagcctccccaggctaatgccagctgttctccttctgagccgctgcaytcctgctccagaacgtctgcctttcccacgctgtgcccttgcttctccctggcacggtgcagctctccccaccgccgcccygaccccgcacccctcccgggatccccagcccaccccacggcagtgttttgtgtgctggttgtgcccaggcgtgggccaagggcaggatgaggcttccctcctcccacccaccagcccctcgcctgacctgccgctctctctgacctgccacggtgcccccagaggaacttcctgaagtgctccgaagacaacccgctctttgccggcatcgactgtgaggtgttcgagtcacgcttccccaccaccatggccttgtccgtgctcgtgaccattgaaatgtgcaatgccctcaacaggtaggctgggcgcagggcctggagctggggccgaggagtgggggctgagggctgggggttccagtatcagtgtctgagggtcaggggtccaggtgggctgggcgcagggcctggagctggggcygaggagtgggggctgagggctgggggttccagtatcagtgtctgagggtcaggggtccaggattggggtctgtgggtcaagagggtccaagattggggtctgatgtttggggggttcaggattgggatcagaggttcaagggggtccaggattggggtccagaggtcaagagcatcccagactggggtctaggggtcaagagaggtccaggattggggtctggggtcaaggggttcaggttggggtctgatgtttggggggttcaggattgggatcagagggtcaagggtccaggattgggttccaggggtcaggggagtccaggactgaggtctgggagttagaggggtccagaacaaaggtctggggccaagcggggtccaggattagggtctgggggtcagtgggggtccaagattgggatccaaagatttggggatctggattggggcctaagggtcaaaggggcccagagaggattctgagagtycatggggaccggaattggggcccaggagacaaagaaggctgaaactggggtccaaagaaatcggccaagattaggtctgaggggcagagaaaggggtcccagcccgggacaggccctggcaggccgagcgggcaacagcaatgcaccgctagagaagtggtgaggctcctcccatgggggtgggtgcctggcagggcctccctgcacccyggcctaaggggagcaccctgtgccctggcagcgtctcrgagaaccagtcgctgctgcggatgccgccctggatgaacccctggctgctggtggctgtggccatgtccatggccctgcacttcctcatcctgctcgtgccgcccctgcctgtgagtcaccccgcctgccccactgccctggtccctggacatcacaggccctgggctggtcrctggacctctctggcccccctgcaatggaaactacctggaggagagggaggtgagaggtctggccagccaccacctccagctgtggccccaccttcaggagctcccagacctgggggacggaagagggggaaaccccttgctgaggggactgtgcccaggctggggtgggaggaaggacgagctttcccagggcagaatcctcccgcctcccaacaggatggatgggagttgacccagtgggcaagggcagaggtgggcccttgaggcagaggaagctgagcggacaaagattggggggtgcagctgaacagacaaagatcggggggtgcagctgagtggacaaagatcgggggtgcatccagggggttcttaggagygctcatgaagagtccatcagagcccaggtggataaggccagcagatggctggggcacgggacagccagtccttcctttaaccaaacctcccttcccctccccrccagctcattttccaggtgaccccactgagcgggcgccagtgggtggtggtgctccagatatctctgcctgtcatcctgctggatgaggccctcaagtacctgtcccggaaccacatgcacggtgagtgggaggccccgtcccrcctccagcctgcctcccsgcccgcctctgctcctgggctgcagtggacgctgtgggtgtggagcgcagagcctctctgtctgcacatcggggaggcgttctcggatcaccaagtggagggtgtgaaggggctctggtggctgggtcccaaggtgtccgcagggtcttgcactgcaggggacctgggctcactgggccagcaacgggagcacctcttgggccacactgcctcactgtcttcacctgccaccccctacatggccagggcactgtgtgctcttctgggcctcagcctctgacccctctgcacccagcctgtctttatccaggccttctcaggacagtctcgcaggcctggagtaggcagccgctgaccacctcttggaccccagaccacaccgggttggcctctttggtatcaccttgtgggtgggtcaaggggagggttgtttctgagctcacagctctgggtctgccttaaccccggagtggagaggacaggatggcaggtgtcgggctggagagaagtgggctgggacatggggtccatccacctgcctctgccaggtgggctctgagagtgggtgattctgaacttccaagggccagggacacagcatcgtctcgctgtcagagctgctcagagagggaggaagcaggggtgagctccggttcctgggaatttgcgcagaggcrgtggccgtatggctggactgctgtgcaggggcctaggttgggctgggcagtggctgaggcctgcactggggcagctgggtcgttgggggccacctctggcaggaatgtgccccaggggagtgggtggagggactataaatagatcacgcgtctgtcattccctaggggctgagcaagggagctggcctgtccagggagtggccagacacatgtaggggctcactcgagggtgcaggtgggcactcagccaaggcaagcctgctggggccaatgggtgggggtggggggagctgagcaaggccattctgccccctgtctggttctttctggccaatgctctgtgacagccctggggagacactggaaactcccatccatgggggcccaaggcatccctgcactggccggagcaccgggccggtccrccaggaaatcctccagccgcccttgaccacactcactcacctgcacagccaggcctctgggccgtccttgaccacactcactcacctgcagagccaggcctctggggacatgacagctcaggtggcttgtcttcctcgggagagttcccaaatggccacaactgcctaggagctcagcagattttcttgagaaaacttaaaagtgagaaaattatgcccatggctaaaatgtctcagccagcacggaaaagcctgtgtctcagatgcctttcagcattggctgctggatggtggaggattccccaggcctaaagagcgggagggtcctagcgggaggggacaggctaggagggctgggagggagagattcctgctgggccaggagtgagggggagtttctccaggctttgaggttaaagcagtggttggaaagaacaggattgaacctggtggaacagggctgggtgagcacagrtgttgacactcagcatgcagggcagaggggtgaggcccggcaggggcaagggccttgagtgccaaggtagagaccctggacattgtcctcagggcagtggggaagcacgggaggagtgtaagcacggtgcggactgtgtcaaccatggaggacaggcaagagggggtgagactaacgggccgggyrcartggctcacacctgtcatmccagcactttgggaggccgaggtgggcagatcacctgagtcaggagttagagrccagcctggccaacatggtgaaaccccatctctactaaagatacaaaaattagctgggcgtggtggcaggtgcctataatcccagctactcgggaggctgaggcaggagaatcacttgaacctgggaggtggaggttgcagtgagctgagattgagctactgcactscagcctgggtgacagagcaaaactctgttcccccactctcccccaaaaagagagggtgagactaacaccaggaggtgggcgagcggcattgaacagatctggggagctggccccagaaagcacctccacctccacctccttgagatgttgacggtggtccctgtgaagtttggcttggaaaggtggtgcctggctgctggaggacagacacaggctgggtacctgyggctccatctgaggggtggggtggaggcaccccgaggaatgtgctcactggaagcccagacagccctgcccagcgctactgcagtccctggggcctcctaaagccagacggggcgggggtgagagagggaccctttgcgctcccaagccagctgggtggccttttagggaagtttttctgaagcctgatgcttgtggcttccccgtgatttatgtcatttacgagggatgtgtcctggggagaattctggatcctgggtcagycctgggggctgggggcggtcctctcaccccacctcctggctctgcccaggtgtggctgagcagttgtcaggggaggcgtgggggctgggctgtggtggttgtattggggacagatctgggaggttacaggcgggcttagactttactctgaggacagtgaggaaccatgaaatggggtgttgggactggatttcggcttttgcttgatgctaggggcagaagtatgatgggacggtaagactggggctgggggcagggcggcaggccttgaggccttgaggcctggttggggaaggcagtgggagagaygagctctcgcaatttgggtgaaatcaggcctgggtgtgtgtgatgggcaagagaagcaaggatgagcctggtgtctgaaccttacgataatgggtggtgattccccaaaatgaaaaccaggagagtatgtactggagggtttgggggtgctgatggaacagtggagtgaaggaggcgtgggggacgttgyggggatggatcctggatgcagcttggggggtccggtggggctggggtagactgaggtctggactaagggaggccttgggagcctggggctgtcctgggagaartggaggatggaaggggctggaaggaagctgtctggatgtgtgcccttacacatacatcttaacgcgctcttgggtttttcttccagaagaaatgagccagaagtgagcgctgggaacagrgtggagtctccggtgtgtacctcagactgatggtgcccatgtgttcgcctccgccccccacccttgccaccacactcgcccacttgcccaccgggtcccgccggataaatgacaggcccgaggtcagaatggccatccccgggccccgtcctggggtctctgtccccacttccttctggcctgggaggtctgtaattcctgtctcctggactctcctgggaagttccctgctctgcagctctggcccaggagctgcaggctgggagggggcagccaagaagccggagctggcagcatacccagagatccggggcccccccacccccaaatcacgagtgcagctggagcttgctcccccttgttcggaagctggacgttcacttggtgactggtgcctctgcactgacggaggactctgggggtccttcttaccggctctgacctctctcttcgtgcctggtctgggactgggtcagccctgggggatcagaaggggccatctgggcccagctgtgtacagcgagggtgggcagccccctccactccactctgcttccacaaagtcggctcccgagagctcgaggctgcttctgtttatatgtgcagggccygggssggtgaagggtcagagagacggacacaaggagccggcaggagggcggagcgaggatgtcctttcccgggagacaagtcgggaaagcctggctggactgcctcagccccgcgcgcctcctggactcagggttccccgtcctgagctcgggagatgttcagagtcacactgccgcccggtctgccacgcagaggtccaacttgccacccgcgtccctggtacctgagaccaccgacatcctcaggttcctgaccgtggcgcccttctacccagcccagtgtgcggccgccgcgctgtctgcacagctgggggcctctgagcctggtgggcttcctggactcttggcctcactccttgccccctccccacgacacccatgagccgaaaggatgtcactaaggatggctgattccccaagggcacccgctctccctccctccctgctggaggaacacgtcatatcagatgagaggaagatggcctctgatggacagaatttttctcttaactcagcttttgctactttggcaaaaactagcgaggggtagcagaaacctgcaccaaggattgtccctatgtcttggccmctcctagagcgtgtgcagactgatgattttatatgtaaatcaagactcacatccctttcctagtcccccacatccaaagcccctcagcctgccttgcagaccaatgggctccatgttctgtagccccctcccctacgcctcacccctcctccctctcacaggttctgggcggccagtgagagaaacgcagtgggggaggcagggagtctggtgcctgcagagattctctgcttctttcctggggggaggtggggaggtcttagcaggagcgggccctgtacccacctgctgacctgctgtttggtagagaaataaaggttgtgtgactgggggaacggaggatcctcagcgtctgttttcctggggagtggtcccgccgtctccacctatggggcgtctgcctggggccctaccacctgcccataccacctgcccataccacctgcccacacccagtccaggaaacgctgagcaaaggtctggggttcacacatcaccaggattgctcccttggcccccaagacaaggctctggagagccacactcgagtggcaggtgcagcgcccgcagagcctcccagcttgggatgctcgctcctcacagggacggtgttgacaatttgtgcacgagttcaaggccttttgtgcattttattttatttgtttatttatgtatttatttgagacagagtctcgctctgccacccaggctggagtgcagtggtgcgatctaggttcactgcaacctccacctcccgagtagctgcctcagcttgaagggtagctgggagggcatgcgccaccacagccagataatttttgtatttttagtagagatggggtttcaccacgttggccaggctggtctcaaactcctgacctcaggtgatccgcctaccttgctcggccttccaaggtgccgggatgacaggtgtgagccacctcgcccagccccttttatgcattttatgatctgcatgtcaccccctgaggaaacagcctgggagagttccatgattgggcctggggcagggctgggcccggagcctgaatctcaggggccccttgcatcccacagaggagcctcaaccccagctcttctgtaggtcctacagctctcctgctctatctccctctcctcctcaaatcccaggatcccatccacctttggcccttccaagcccagctcaaatgcacctcacacctaccacctccccagggcttccctcagctcacaatacccagggacctctgcgaggctgcctggggtgagccggctcgcacaggtggccctaccttcctggaagccggggctcagggaagggagtcgccatggccctcgtttcaccaaaacccatcatgaaggcttagtatctaatccttcactcagctatcctgggaaggagacgcaggccctgcccacagggccagaggcaggattgtctacataatttgcagggcccattgcaaaatgaaaacctggaaccctttgaccaaaaatgacaagaattacaaagacagaagaacattcaatatgatggccggacgtggtggctcatgcctgtaatcccagcactttgggaggccgaggcaggtgaatgacttgaggtcaggagttcgagaccagcctggccaacatggcaaaaccccgcctctactaaaaatacacaaattagccaggcgtggtggcgggcacctgtagtcccagctactcagaaggctgaggcaggagaatcgcttgaacccaggaggcggaggttgcagtgagccgagatcacatcattgcactccagcctgggtgacagagagagactctgtctcaaaaaaaaagaaaaaaaaaagaacattaaaattcaccaaaccgtgtgcttaaaatgggtgcattttattgtttgtgaattacactgcagtacagtttgacttaaaagggaaaaaaagaggtagccacagaagaggtgggtgggcacatggctggcatgttggtgtggtggtgtcagaaccctcaggactggagaggagtgctcagtgtttgggggcagggccagcccccaggagttcttaatccagggcagagagaggccgggaatgagggaaaatggccccagcacagagcgtttttgagcccggggcctggtgcaggtacttggatcacacgtccatgatgccagcttgtcggtggaggcagcacccccacccccaacccaggagctcccaggttccttagcagggggcctggggttggcgccgagctcacagcaggagcagggtaggcagaaggcgcctccctccacatggtccacccgtaagacctctcataccacaggaccttctcatacacttcatctcccggtgtcttcagccagccctgggagatgggccaggcaagggctagggctccatttacggatgaggagcccgaggcccagaatgggcgggccatgccttccccaaggccctctgacgatctgagcatctagcttgcatcacgggggccaggcaggctgtgaggctcagatgggctgggggtcctgcggacaaggcggtcggctccaggcttcccagccacgctgcctccacccccgcccaggccggcctgagtccagctccgtccagcccacagcacggagccgacgggccaggatggggcggccaaggtaaacagaggtctccttacctcacagctggtcacccaggagggaattccggggcaagccctggcacgcttctaactggcaactaccaaaaccctcctggggaccctgcccctccagagaccaggactctgtgctccccagaccccacgctccagtcctcacagtggtgggagggaccccggtggggctgtgttaggagaaatggaggcacaaaatcacagcagggaggagaagggaagctggacatgcgcacaaaggcccccgagtgtccacagcggcttcacccagcacaggcctcagatatccatgaacagatgaaggataagcaagctgcagtacgtccacgcaaccgagaggaaccaaccactgatgcacgcaactgccacccgaagcctaaaccgctgggctgagcaaaggcggccagacgcgaaggagctcctcctgcctgattccacctccctaacgctctggacgagactgcacaaatctgcagtgacagagcgggtcagtgattgcctgggcctgggggtgctgaggaaagatggaccacaaacgggaggcgggagtgttctaggctgatggatttggagggggctggtgcatttgtcaaaactcatcaaaccatgtgcttaaaatgggtgcgttttattgtatgcgaattacaccccaagacagttggatttaaagaaaaaaaaaaaaaaaggctgggcattgtggctcacgcctgtaatcccagcactttgggaggccgaggcgggcggatcacgaggtcaggagttcgagaccagcttggccaacatggtgaaacctggtctctactaaaaatacaaaaattagccaggtgtggtggcgggygcctgtaatcccagctactcgggaggctgaggcaggagaatcacttgaacccaggaggcagaggttgcagtgagccaagatcatgccactgcattccagcctggatgacaagagtgagactccacctcaaaaaaaaaaaaaaaaaaagaaagaaagaaaagaaaagaaaaaaagaaaaagaaacagaaaaaaagaggtgagtgccagagaggaggtggatgtggccaccatgctggtgtagaggtgtcagcaggattgggagctggcggtgggcgggggcaggtctcccacctgagtgctcagcactgggtgtttgaggggcagggcccagcccagcccccaggagtcctctttatttttatttaattaatgtattattttgagacaggctctcgctgtgtcacccaggctggagtgcagtagcatgatcacggcttgctgcagcctccacctttcaggctcaggagatcctcccacctcagcctcccaagtagctgggactatgggcatacaccaccatgctcagctaattttttttctgttttgttttgttttgttttttgagactgagtttcactttatcccccacgctggaatgcagtggctcgatttcggctcactacaatctccctgtcctgggttcaagtaattctcctgcctcagcctccctaatagctgggattacaggctcccgccaccactcccagctaatttttgtctttttagtagagatggggtttcaccatgttggccaggccagtcttgaactcctgacctcaggtggtctgcccgcctcggcctcccaggcagctatgggctataagcatgctccaccatgcccgcctaatttttttttctgtatattttgtagagacaggatttccctatgttgcccaggctggtctcgaactcctgggctcaagcaatcctcctgcctcagcctcccgaagtgcggagattacagacacgagccaccagccctggcctcccaggagttctcttaatccagggcagagagaggccgaggatgaagggaaatggcccagagggatggaggaggaccaggagggtgggacattttaaacacacgggaggggggcttcggccaggtcacacccagagttgggggatagaagaggcctgagaagcagcccgggtccaggcaatgggagacgccaaacatgggggcccacgctgtactccccaggcctccccgtagctgtcggccctcccccaacctccccttgacagcctctgccaggctggcccagggccctgctccagtcagggtctaaggggctatgtggcattagaggaatctctggcccagatggcatcacggtttgactggggtgtggttgcggcatcctcgggcccctgagtgactaaggagacctgttggaacccgtgtctgctccctcgagggctccagccggcctccagcctccacgctgcacagagccgctaaatttagccaggccggggaggctgtcccggggccragtgcttggcagcagggctgtctccctacaaggcccggcccagtacccgagtcggccacccggtctttgggcttataaggcaggactggcggctctcaagtgctggaggcttcgagtgggcccggggccaagccctcagactttggggagcctccttctcagccaccagcagacatgggaactactcactgtgtgaccatgggccagggackcaatccccacagcctcagtctcctgatctgtcagatgtgggctctaggacctgcctcatgggcctgttgtgaggaaaaccctgccagactccagagggtggagctctggcctctgtcctgcccacctcagccccaaacacccagaacaaaggcaggtgtctgtccctgaggacgctggggcagggcccaagggtgagaaatcacagcctttggatcagaaagatgcattttagagccagtgaaagagacattgaccccgacagctggctgtcttgctcttgtggagttatcagcagcaggaaaataaatgtaggtccctggggtacactgtggatatgataagatccccaaatgagacagtgctccaggccagtccactttctcagggccagggccagggcctaggctgtaactgaatcacgtgtgtgtgctctgtcggtccatcaatctgtccaagcaagtctgtcagtccatccgtcaatctctctgtcagcaagtgtggctccttggaggaggaggaggaggaggaggaggaggaggaggaggaggaggaagaagacatggtggtgatgtgagaggaagaacttcctgatcttccttccttccctccctccctctctcctccctccctccctcttccttcctccctcccttttttccctccctccttcttctttcctccctccttccctccctccttccttttttccttccctccctccctccctccccttcccttcctttctcctccctccctcccttccttctttcctttactccttccctccctccctccctcccttccctccctccctcccctccctccctcccctccctctcttcccttccctcccttccttcccttccttctccctccctcccttcctccctccttcctcccttcccttccctttcctcctccctctctccctcccttcccttcccttccttttccctccctccctcccttcctccctccgttccctcccaccccacccactctctagaacgcatatcagggagaagggtggctgaaaagggacccagaatggcccacacagtctcagcacccaccccactccccatcacaagcagctgtgtcctggtgcctc

SEQ ID NO: 95603 - DNA, 13479 bp, Homo sapiens
gcagagattgcaccactgcactccagcctagatgacagagtgagaccctgtctcaaaacaaaacaaaaacaaaaacataaaacatgctaagcactataaattaggcaaaactcaatgtaatgaaataggaaacatactacattctccatcctttgccaagacgtaaataataggaaaaaaagtgttcaatgtggagaaaattgcatcttataaataaggagaaagtcttcaattaaataaggagaaatataaagctactttgtaagtttgaagaattaaggttattctttatagaaaaatcaaaattgatttccctcacaatattctaaaatgctatctttagaaaacagaaacctgccatgaaataaataaataaaatttaaaaaataaatggtgttttaaaatagcaacagaaggctgggcgcggtggctcacgcctgtaatcccagcacttcaggaggccgaggcgggtggatcacctaaggtcaggagttcgagaccagcctgaccaacatggagaaaccccgtctctacaaaaaatacaacattagctgggcgtggtggcgcatgcctgtaatcccagctacttgggaggctgaggcaggagaatcgcttgaacctgggaggtggaggttgcggtgaaccgagattgtgccattgcactccagcctgggcaacaagagtgaaactccgtctcaaaaaaaaaaaaagttaaaaaaaaaaaatagcaacgaaaaacaaagtttgatttcctaaagccattataaaattttttcagactagctttcaacttgtatttgtattaccttctatcaatttgctgataacatttcctgagccatcccagactgggcatttttcttcgagttgttgcaccatttaaataaactatcatgtagttttctgctactartagctccaaagtgccaataacatatctgtaaaaaacaaattaagtttaagccttaaaaatcactgtgcataactgaactaggttctctaaattgtaccattatacaattccttcctctctcctacaatgagagcaacaatgaaaatgctcaaaccgcattagctagtattacgattatcttattttttagagatatattttgaaatgtttctaggtgaaatgatttgctcctgggatttgcttcaaacttgtaaactgggggttagaagtgggaacaaagtataaattggtaattgttgaagtgactgatacatgaagatttgatatacttctctttacccctgtgtatgtctgaaactttccacaatacggtttttaaaaactgcactaacctgagaaatagaatgaccttgtggaaaaagaactgatttggctcaattatattggccttctaggggtaaatgtaatttagccacatgattttgagacaaaaatcacttctttacacttaatgtgcctgcaaatgttaacataaaacagttgggacaggtaaggcatggtggcttacttgagcccaggagtttgagaccaaccctggcaacatagtgagactctgtctctaccaaaaattaagaagtcagcaggatgtggtgacatgtgcctgcagtcccagccactagggaggctgaggtaggaggatggcttgagcccgtgaggtcaaggctgcagggagccgtagttgtaccactgcactccagcctgggtgacagagtgaaactccatctcaaaacaaaacgaaacaaagttggaacaaataatctgagatatatttcccagttttaaaatgacaatttttctcttgaattggaaaactatcgttccataatatcaaagaataaggactcatctagtcctgtatctagtaacaaatacttttactttaaccttcattctgttgttcacaaacttgcacgtgaaaagatctgggatatttatttttctgagacagggtcttactctgtcacccagggtagagtgcagtggcaaaatcacagttcactgcagctttgacctcatgggctcaggtgatacttccacctcagcctcctgagtaggtggggctacaggcccatactaccatgcctggctaattttttgattttgtagagaaagagctttgtcatatcgcctaggctggtctccaactcctggactcaagtgatctgcccacttcagtctcccaaagaactggaatatttataatttttgaaaaggttaagtttcttaaggtgtagatctaattagctcacaattctgtccaaatgtttttgtttaatatatacttacttaaaaagattgtccatcaggtatctatagttaggctgactactttcaggcatgaaacagacagcaaacacaacaatggcatttaatccatccccataatatcctaaaaaagaaaccaaagacagtatcaccagcacgattttactcttaggcatttttagaagacatctgtatgattagtaaattataaataagagtttacttttcacagatttctgtattaaatgtatgttttgtaaatcttatatggtcttatatagaattttaatgtcttcttcccaaaaagagaacagtaaaatttaaagaggacggtggacagaaaaaacaaaaaaacccaagaccacttaaattcgcatatttaaaaagccagccctattttagcaggtagacaaatatagtgatataacccaatacaatacagacacaatacaataactgcaatgtatttttatttatttctatgatgcttatggttaaagtgggtgctttttttttttttttagatggagtctcgttctgtcgtccaggctggagggcagtggcacaatctcggctcactgcaacctccgcctcctggcttcacgcgattctcctgcctcccgagttgctgggattataagcgcacaccaccgtgcccggctaattttttgtgtatttttagtagagatggggtttcactaagttggccagactggtctcgaactcctgacctcgtgatctgcctgcctcagcctcccacagtgctgggattacaggcgtgagccaccgtgcccggcaaagtgggtgcttttttaaatttttttttagaggatagcatcttgctccattgcccaggatggagtgcagtggcacaatcacagctcatgcagccttgaacttctgggctcaagggatcttcccacctcatagcctccagaggagctggggatacagcgcacacaaacatgcctggttaacctttataaaattttttttgtagagayagggtttcactgtgttgctcagactggtcgtgaactcctggccttaagcaatcctcctcctttggcctcccaaagcactgggcatgagccacatcgccagagccataagtgggtgatttttaaaaggtaagtttatatttaaaaatgctagcattttgtagaaattaggacattaaaactaaattaggccgggcgaggtggctcatgcttgtaattccagcacttcgggaggctgaggtgggcagatcacttaaggccaggaattttgagaccagcctggccaacatggcgaaaccccatctctactaaagatataaacaattagctgggtgtggtggtgtgcacctgtagtcccagctactcaggaggctgaggcaggacaatcattcaaacctgggaggcggaggttgcagtgagtcgagactgcaccactgcactccagcctgggcaacagagcaagacttgggtctcaaaaaaaaaaaaaaaacaaaaacaaaaaaacaaactaaattacatctctgacataattttcagtaatggaaaacagcgctaaaatatgtatgtttcaacagcagtctttagatattaagccaatatttagtagcaaatacttctgctttaaccttcatttctattgcttacaaatttgcacatgaaaagatttgaacatttcaagaacatcagaatcttcactacctttcttaatcactcagtcacaaaatatattaagtgtggtaatgcaataaaataaggtggtcttattttcccctataaaaaaagtgctatttctgaaagataagagatttaagccataaatcaggtcttataatttgattcctgtgaactagctgaataatgtatgtctgtggacttcctgatgcagattacgccattttcttcatctgagtacgattaaattaggcagaagaatgcaactacaaatattcatgtgatttgctttcagatgaatgaagactgtagaaataagcaggggaatgcatctggcagagagtaaatcaagtggaaatgaccctgaaaaaaaatcaatctgcttgacccatatgccctccgtcctgtgttaggaggatttaaggtagtatgacatgctctacagtgagttgtgttctgacttaccactaacattctagcactatttacaatgtgcctaggttaacttctatatatggtactgttagattgaaaggatttataacttaaacttttatggyttttcctatttcttaagggcagggacttaagccttgtatttttgtatatcccataagtatggaaagtgggtgctgtatagaagtgtggagtgaactagttctctattaaaaaataatttggcctgggcactgtggctcatgcctgtaatcccagcactttgggaggctgaggcgggcagatcacaaggtcaggagttcgagaccagcctggccaatatggtgaaaccccgtctctactaaaaatacaaaaattagccaggcgtggtggcgtgcacctgtagtcccacctacttgggaggctgaggctggcgtatcgcttgagcctgggaggcagaggttgcagtgagccgagattgcgccactgcactccagcctgggtgacagaatgagactccatctcaaaaaaaaaaaaaagaaaaaaaaatttgttcacggttttaaggcaaattaagagttaaggttaaaaagtccaagttttagggccgggcacggtggctcatgcctgtaatcccagcacttcaggaggctggggtgagcaaatcacgaggtcaggtgatcgagaccatcctggctaacatggtgaaaccctttctctactaaaaatacaaaaaattagctgggcatggtggcgtgcacctgtaatcccagctactcgggagactgaggcaggagaatcccttgaaccgaggaggcagaggttgcagtgagctgtcacgccactgcactccagcctgggtgacagagcaagactctgtctcaaaacaaaacaaaacaaaaagagtccaagttttacttatatccataaatgacttctacaagaatgttcaaagcagttttgtttataacagcccaagctggaaacaactcacatgcacataaaaaaaaatggataagcaaattatggtttatccaagcaatggaaaactactcagcaataagaaggaatgtactgtggatacgtgcaacaacatggatgaatctcaaaaacttcatgctgaaaagtaaacaaaagagtgcataggatgattttagttactatatatgaaattctagaagaggcaaaactaatcagggggtagatatgacagtggctaccgaagctgagtattcattgcacaggggtactaaataattcttctgggacaatgaaaatgttctacatttttaggggtatgggttttatatatatgggtatatatggttatataggcatttgtcaaaactcattgaactgcacacttaagatcagagcatttcactgtttataaattagggagactgttcagtcccagttttgggtagcctagagacagtttaaaaaattttttaattttgagacagggtcaaaaaccaaaacaaaacaaaaaactagagtgcagtgggatgatcacggccactgaagcctcatcttcccaagctcaagctctctctcctcccaccccagcctcctaagtagctgggactacaggcatatgccaccactcctggctaattttatttatttttttattttttttatttttttgtggagacgaggtctatgttgcccaagctggtcctgaactcctgggctcaagtaatcctcctgcctcagcctcccaaattgctgggattacaaacctgagccaccgtgcccaacctgacagttttcactacaaattcttttgtactttttcaacttactgtatgcatataatcatttttaaatggtacttttattcttttactttaaacctgtcatgtttctaaaatgaatgagaaatgcttattattctttcaaaattacataatatctctaggcagagtttctaaaagtatttagaattctgatattgcatgaaacggctagggcaggcgagcgcagtggagtgccgcgcggtgcggtgcgggcggcagagttggggtgtcatggaggatgagcggagcttttcggatatctgcggtggccgcctggccctgcagcgccgctactacttcccttcctgccgggaattctgcctcagctgccctgggctctcgctgcgttcgctcaccgctgtcacctgcacggtgtggctggcagcctacggactcttcaccctctgcgagaacagcatgatcctctctgctgccatcttcatcaccctcttaggtctgcttggttatctccattttgtgaagattgatcaggagactgttaatcattgattcccttggcattcagatgacttcatcttatgcttcaggctaagaaagcactaccttcatagaaatgggcaaggtcaaggatattgtcatcaatgaggctatttacatgcagaaggtgatttactacctctgcatcttattgaaggatccagtggaaccacatgggatatcccaagtagtacccgtcttccagagtgccaagccccggctggactgcttgactgaagtatacaggagctgccaggggatcctggcacaccagaaagccacatcaacaagcccatgagccccagcgttcagaaggccagcatygtcttccatgggagatgactcttaagccataagggttggttttccgtactccaaaccatcaggtggacacagtcctaggaaccattatggatatagtgcatctcagagccatagagcaggtgactggaaatctaactcagtatatttccacgtattatagtgttttccttgtaaggttttgcctactttaccaaaggaggggagaccttaagaattttgacacagtatgtcaaaagtaatgtcagcaaagaacattgggaaattgctaagcatgttcaggtttactttgttgatgtttgtgaagcaaaacaatgggaaactgacatyagatgtcttgagaaagctatattttccattagtgccccttgtgtaaagttacaaaaaaaacaagccctccaggaactggttagcaggaagaaatgtcctacaaaagacgagtctctcaacctagcgcctgtgttctgtacagggcttatttactcttaataaacagatatccttccaaaaaaaaaagaattctgatattgcattaaacaatctgaaaaatcctcagtaactcttacccccatggctgataacttttttatagggttcaattgccttcatatcaaccctgtggtcctgttctccaatcctgaacatacgccagcgtcgtccatcttctttttcctctgctgctgtgtattcagtaattgagcctttcctaattacttcagtagtcttgggttttggaagatcatctgtcaaaatamaaagtttttgaatcacaaattgttacacaacaaaaatcaaattatacgttaaccactttactacctagattttacagagaattttcattataccatctgcacaattttcaatctctcttccataaaggaggaaaaggcttattcttaacatgaggctgttttatgtctttggaaatcatggttctttaacttttattgcccaatttagcaaaaaccacctaatcatagtgaaacgtgtatccacaagttcagaaaatataatttgtagagtcatcaaaatcttagtacactggccttacaatgcctttccagattcaacttgtgacaatattctccctggcagttatgactataggttacttcaagtagctatctgggagccaattttgttgttgttgagcacataaattaactgtaataccagataggaagtggttaactactcaatgatcacttctcatttgatcagttttataaagcagaaatgtatttataatactttgaagtatacatgcagaagtctatttaaattagcattagccaaagcataagcaccaatgattaagtgtaatttatgttttgagattgcagtttagctgattttcaatgtagtaataattttcaaaatttcagtattatagtccttaccaaaagatggggggagggggaaacctactgcatgttagttgtttccaagacaaagctgttaacggaaaatatccttccaggaaatgactacagcagcattaaagaaagaagagacaaaacacataggcacaaaactatttcagtatctttacaaagtattgcttactactggactgtttattgaaccagtaaaacagggaagaaaaaagaaaccaaaaatatagcatatcacactttattacagtaaaatactgaatgctaaacactactatgaaaacaaaatcattttcaagatggaaaaaaatatgtaaaaattataacaactatatataagatactgtagacaattttgtaattaaagaaagcatgcaaagtaaaacagcacaattcctttgaattacaagtaataaggaatactaggttcgggggctaaaagtatacattaatttaagttggtcatttcacaaagtagagcaatgtcaggcaaacctacttaaaaagtcaccccaaatgcctcctttcagaactcccttcccacaaactgttaactatatgtctcttcaaaagtttcttacttgattgactaaaaaagagcatgccataattatcaagaaatatttttgaaacagctatgaaaaaaacatgagagcagtgggcaaataagaggggaaaaaagccactggtgtactctatacacactttttaagtccttgagaatattcaagggttagcacaatttcctatcttagtaacaaatatatgaactttagaaagaatgatgtatttcaaacaaaatcccttagtacattaataaagatcagattaaaaacagtgaaacatttaccttcccactcaaactcattactattctctgacggtgtgtctaagccatctaagtcaatctccccactttcatccaaatcatctgacaatacagagccatcactaggatccagtgtcaggctaatgtctggagccattagtttctttctcactttatttccattaacttctagtgagcctggaattggaaaataaagaaaaagatacgtaacaaggaatgcttagatgctaaagttgaataagaaaaattttaactaccccattcttgggaaaaaataatattaattgaacataatttcaaagcacctattcacaaaatttttattctgatcattattgcttctacatcgttggcaagagatcaataaagtatcaatgtcttttaaatagaggcagaccttatagatacctcttaccactaaaaatgatctcctccacccctttactgtaaaactttccaaaaaccaagtgtatgtttttggaattttttttaaagcattctaaaaatgctttcctcaatgttcaacttatactttgacttctatgatggaataaaaactcaagttttttttttttttggacaaagaaacgtgttttaaaaaataacacaaagtccataatttcaatgaaagtaagtgtcaagctcttaccaggctggtcctctggtccagttatagctagtatatctgcttcaatactatcatcttctggtaaaggtctagaagacacaggcatactttttaatccagaaattaagaaagaatttttttttgaagttcaatctattaaacatacagcttatagaaataattatttggaaaatggaataaagcagtgttgttgtttttgagacagggtcttgctgtctgtcacctaggctggaatacaatggcacaatcatggctcactgcagccttaactcctgggctcaagagatcctcccgagtatctaagactacaggtgcgtgccacgacgcttggctaatttttagtacagacagggtcttgctatgttacccaggctggccttgaacttttgggctcaaacgattctcgtgcattgacctccctaagtgttgggattacaggcatgagccactgtgcccagcctagcagtgtttaagataaagtctcagccttctgagtagctaggactacagtggcacaccaacatgcccagctaattttaaaagtttttttggtagagaccggatattgctatgttgcccaggctggtctcaagcaatccttctgcctcggcctcccaaagcactaggattataggcgtgagctgctatgcctggctacactttcaaagtaaaaattctgactgtcagagctgacttatacacttattatatataagtaacacataaaagtagatataaattccttatgcaacagctcttatacaattataaaacaggtaacaattttaaacaaatatgactgaaatgcacaaatataatgtgatgtatgatgcaatgtatgaagctcaatttttactcacgagactacagtaacaatggttcaattcttctgagatcagcattcctatatttactatcaccaccatatgcaacagtgactcaggtctccgatcagctgtccaactgctaagctatccaactgctaaggcacctgattatgcactaggatgtcttctgacaagtacggcacggaagcactatttaaacttaaggtctgcctttgctctctttttcattagcctacctggtgccaatataattgtaaatacaaatgcaaacatgtcaaggtggctggccagataagctagaaaatccttattaatttacttagtaaggtttttttttttttggtgggggggaacccacaaatttttttttttttttttgagatagagccttgctcggtcgcccaagctggagtgcagcagcgcgaccttggctcacggcaacccctgcctcctgggttcaggtgattcttgtgcctctgcctcctaagcagctgggactacaggcgagcgccaagcctggctaattttttgtatttttagtagagacggggtttcaccatgttggccacgttggtctcaaactcctggcctcaagtgatctgcctatctcggcctcccaaagtgctggggttacaggcgtgacaccgcacctggccacaaaattaaagaaacattttaaagacaactaaagacctccttctctgaggaatccctcagatcttgtttaaatgaaaacaaaaacaaaacaaaacaaacaaaccacactaaaacactttattataaaagcaaaaatttgcaaacttaagtgaccaaaacaaaaatgaaagattatagaagattatatatatacttggttggaaagtaagatacaagagaatcaatctaactgttccgaagaaactttacttcctagtatcaaatgatcgccttgtattactgagtttctcagtgacatctcagctgtgcagtggctcacacctgtaatcccagcactttgggaggccaaggcaggcagatcacgaggtcaggagtttgagaccagcctggccaatatggtgaaacaccgtctctattaaaaatacaaaaattagccaggcgtggtggcgcacacctatagtcccagctacctgggaggtggaggcagaagaattgcttgaatccaggaggcggaggttgcagtgagctgagatcgcgccactgcactccagcctgggcaacagagcaagactccgtctcaaaaaaaaaaaaagtaacatctcgataaagaaattttgaacttttgctctaaaattgttttcttttaaaagcattgctcacatcggaaaatcttcatcttgccattcttctttaagttccacaccttccatcctcagcctggattcaatgtcaactacaaactcttgataatccagggagccaatgtcctatgaagagagaaaaatgtataacttaatttccactttactttttatccactgaaaaggcgtaataatcttatatattagttcatacttgatgtttagtacaatggtctggtcatgaaattcatttacagggttgcaatttttttttttttttaaagaaaagagaatactcagactacatatattctgggaaagttaaatactgtttatagtaaggatactgttcagtgaaaatacttgttttcagttgcatgtatagtatctcaggttatgattgaaaatatatttcatactatggattatattaaaaaatttgaagtggggtaagaaataaaaatgttctttattacagactcataattaaattttctgtcccttggatagaggttgattctagaccgtaaataatagtaaatcaataatatttaaactcatgattcagcagagtcaggtggtgtgctgtctttcatatttccttctcaatagtttgatgccacaattcctgagccacttaaagaagtctattcaataacttgtcccgtaaatgaattatgcaatcttttgatttgtttcatatctatactatgcccttctcatatagctcggcatatgttttcaaacactgaacttggtgaatgcccttttatgcaactacgtattttaacatatgccatgaactttagttttagtttttccaaggaatcacgtgagtgccaatatcctcattttaaaagtaagaaatctagagatactccctctggtgatggagtaagaaatagaagttgaggtaaggtaaagatcaactggttaacaatgcaacaaaacagtgaaaactatagaaggaaagaggtatacacgagtatttagttcatttacattcaagtcaatagatgtctaaagttattcaacaaacagcagtaacatatttctgttcttttcttttctttttgcagtaacatatttaagagatacggagcatcactagcagtactaaaaataaagttaaaagtcgttgacactaggccgggcgcggtggctcacgcctgtaatcctagcactttgggaggccgaggtgggcggatcacttgaggtcaggagttcaaaaccagcctggccaacacggtgaaacccagtctctactaaaaatacaaaaacattagccggatgtggtggcaggcgcctgtaatcccagctacttgggaggctgaggcaggagaatcgcttgaacctgggaggtggaggttgcagcgagccgaggtcacaccattgcactccagtctgggtgacagagcaaaaccagtagcagaggaaagagggtgaaatgcagaaaatgactaatgctt

SEQ ID NO: 95604 - DNA, 24135 bp, Homo sapiens
  misc_feature (1)...(24135): n = A,T,C or G
aaagcaaaggcactgaccagcttggctgcagggcaagctgccttgcagctggatttgcgactttttttttgtcttaaaatttttactggatcagttgtaggggactgtacttcctaagacactgttctcaccttccaacctcacaaatctcttactagatatttggtttttataacaagggtaaagaatcccaggtccctttagcatgcagagtaatggtgatccctccagagccattggcacttcaaagtggtcccagacctgggagattctggtgggatcttccttaaaaataagcaaaaaacctgagtaccctagatgcaattggccatttgtttcaggcccatcagcgaatcagggctccctcctcaaccctactgctacagttccttagctgtatgcctcagccagatccttggggttagggcatgcactcgctgactgtccccacccatccacttgctctgtagtttctgagctttctccatttcacaagtatggtgcctaacgatctttttctttaggattgatgcagttgtttttcctgaaagctaactcagcatctattcataaaaacccttaatagtatacattaggagttttcccaagctctacagtccctcagacattgcatcctaaacagatttgaggcacacaggccaagactccaccaaggcataaatggtcccccctactcccttttgaccagggtatcacttgtgtctctgcagtaagagttggtcaagttgctctacgcaccttggtgctttccagagatctcactccagactgcccccaagggtggatagagtatcctgacagccagtgtgcactcatgactgccttaattaacattcttctgctattatggagcctgtccagcaataaacagggtctaggaaggtacaagattagcttccagttaaaatcccattttatattggaatgcatgagctacagatgacagcagagatcctgaggtttctagacatgttgattgtctcttttttctaaatgaactccaagtacttagaaaacagtccctgtccatcagccagaaaaggtgaccatcacccctaaagtaatttccaaacttagttcagtgggaagatatgctggtagtgcatattcagtgttgattttcagtgctagtaaccacttttaatgccagaaatatgtaacaatgataatgtaacgtcaaagtggttactaaagattatagccttaacttttttatgtaaaagataaaatccattcctcctcccagtgagcaagcatggcttgcatttctcaaaaatgagaacttccatggcagccaagaaaacgtcttctcagaggaactttcgtttgatgcatctcccaagcccacatgcctcctgtgttccagccacctcttccatttcacatttaaaccagctctccattcccattgagttgccctaacaacattgtctccagtgtcagaaccatattaaggttcgtttctcagattgggagcctgcaacaccatacagccaacattgcctttgccacgccactgccaccatccccaccattgccctatggtgggcagatgaattccagaaaccctcagggagccaggataattaggcaacccatctgaattggccacgtaagtgacaggcacttatctctcgggttcttgcttttgcagactccagggaagtcctgtctagaggtcgatggcagagactcctagtctttsccatgaggggttgataggaatcaaattgggattcctttggctttgggttttgtttttttgttgttgtttttggttttcagtttgttttttggtgtatggggggtgattttgtttctgaataagaaaaagaagaggcaaccatggcccttatgtgggtttatcctttttgagcaatgttttagccacaagtaaggaatcttgaaagtcttttgtccagcaagcagtcttaaaaatgtttttcctaactccttttgcaggtgactaagtacaaaaaaawagttttctcattgtattcaaaatagtgagtaggttccctggataatacacagtggtagttgacatattttctcaaaacacaaccagaaaacccacttccggtatttgtaaatcacctttcaagggaaaaagtgaacacgtattccttgtatttctagtttgattaccaaacctgatgttacaaagaaacctccgttctgtagacagaatttcttttatttttcttcttttactcctcacaatcactttcccagtgccatcaccatctataaggtctcagagcagaggattattcatggtaataagtgggggtgtggtgcagccattccagtaacacccacaagaggacagctgttctgaatgtccccacccacccctctttcagtacaggtgagacattttcagttcatgagctccagaccaaatcccaggccagcccttgcaccaaaagccttttttagaaggcttatcagtctattaggaatgtctcaggaaagatgagccatttctttggggagaaatatatttacagatggaagtgtgtgactgcgtgtctgtgtgtgtgtgtggtgtgtgtgcgcacgtgagtgcgtgtgttcatctatgtgcatttcacttccataaagacccagcccaagctgctgggaaccatgtgttcctgagtattctcagaggttaaacaagtgacaagtgagcttctgaaattagtgtctcagcaagctggctttaggaatgagccccattttatcaagcagagaaaaaaaataacagcagaaaagataaagataaaccaaaaatatataccccccaatggaaaataatgttgattcagcaattcccataggatgtattacatgctctaatttattatattattatttatctgtctttgatctttgcccattgtactcttaaaaagatgttgggatgttgattgcgatttttaaacaactagataatgtataaatcagcagtggaaatcagttttaatgtgtggawgtgtctgattattgttaaatgcctctttttttactttttttttttttagatgtataatgtttcataaaccctggcactggtcacaaagctcagctgtgaaaatgaaatttgtagtatttttaaacatgaatgtcaatttcaagtgtatttgaaatggttcctccaggagagatatttgtgcaccattaggaaaatcttctctgcagaggaagtagccttctttggagaaaatggaaaatgggttctgatatgtgatctcagagtagcccatttcctagggcaccatggaaaacacaaatgtgatctttaagtatacctcttccccagtttggggaggaaaggactcagtttgcaccctttttgtatgtaaaataaaatgtcttacctttcttggctacttctgcttgtttggttggttgattggtttgtctgtttttaatctccctcggctcatttgtaattaacaatctagctaggactaactttgatgcgattcaagactcctgtgaacaaaaataatttggcattcttgtttcattccttggattaaatattgtcttctcctgtgagtcacttcaaaaataaatactgctgtctctcttcgagtgctgaagaagaaaattattttttaattaaaaaaataaatattggccaggcgcagtggctctcacctgtaatcccagcaactccgggaggccaaggcgggtggatcatttgaggtcaggagttcgaggccagcctggccaacatggtgaaaccctgtcactactaaaaatacaaaattagttgggcgtggtggtgcacacctgtaatcccagctactcaggaggctgaggcaggccaattgcttgaatccaggaggtggagtttgcaatgagccaagatcgcaccactgtactccagcatggacgtcagagcaagactccgtctcaaataaataaatattcctggaagaatttggacattatcactcatacgttagttcctgggtccctgttgttctcaggtggtagaacacaggaaatcaggatctgctctgtggaacaactttagtagctttataattctcctctacaaatgcggaatatgtgtccagacagaagatagaactatgatgagcaatgtaaaaccatactgcatatgtagccaacagaacaactgtcaatctgggcatgattgactccttccagtttgttactactctttaattactttttcacaggcaggtagcagtggaagaatcatgagagaaaagtttcacattgagagcattttatccatcaacctgatttcttttgaaagtgggagtgggagaaaggctgctgtgatgccattttagccttagctcctcatgtgcaggaggctacttgggttttttgagtgtttctttgtttttgagacagggtggagtgcagtttcacgatcacagtacactgcagccttgaccttctgggctcaggtgattcccccacctcagcctctggggtagctgcgactacagatgcgcaccaccacgccctgctaatttttgtattttttgtagagacaggtttcaccatgttgcccaggctcaaactcctggactcaagtcatctgcctgccacagcctctcaaagtgctgggattacaggtatgagctactgtgcccagctggaggctactttgaaaacatgatttagtaaacatttttctctggctatggcagcctgagaccagtgagtgaagaaagaggcttaacaaaataggagaaaaaaaaaaaaaagggatgagagatggatctggaagatcatctttgtcagtataacaatgtttaaaacttcctcctgattggggttgtctgaattgaggtgcaaggatgggaaataagagaactgtcttgaagctctacaacctgtgtaaggccgctgtaatgaacaacaaagttaatgccagtggccttgcataacttcagtctcaggtcagcgcctcatgaagactacattgcataatttatgtaaatggagccctgcctataatctgtgctgtgacgacctggaatttctacgaagttaatcgttgaaaattagttttaaagacgttttaacgccataggtccaaattttggaagtttgtgttttggtttgttttggtgtgtaagactcccagtaccaaagtatctatgttgtagaktgggacaacactaagtgtgtgaagacctaaaatagccctgtggggacatctagtaactattcctgacctccggaaaaaggcattgtatcctcaggccgtggcataaattatttctcatgtcagtgcggatgtgaagctatcccaaccaggacttgttgggcactcagtactgccgcgctgtgagggagctgtggacagagtaaatgcaacacagtcccttccgcagaaaaaaaaaaaaatgtagtctattgggggaaaaggtaaaggaagttaagaacagcgtatacaataagatgtccattgatatacacaacagtaagcacagcaagattacagaagggagagaaaaatgggtagtaacttgacggcctcagtaaaaaaggaagtgggttgtgcagcaagttttgcaagacaagtggaggagccgtacaaggccacgctcggtaaggataaatgtccctgaagtgtttggaagccacaacgtttagagccaatttggcggtgacaaacacttgactggcccaaaacagtgacaagcttcccgtgccccttgtccaggcccacgtatttgctaacctcaagcgccagctaccgcaggccagtggaacagcgctccgggcggggcgggccgcggagcatgccggggcttgtggtcttctcggagcccgggcccgtgctctgcgaggccgccttccgccggtggccttcctgtgggcgggagagggcggccgggagcccaatgagggagcaataacgtggcaaccacccacgagcccgcgtcggtgcccgccccgcagggggacctactatccggcgccgagccggaggggggaaacggcgcccgccgcccgcccggagcccgcgagcaaccccagtcccccccacccgcgcgtggcggcgccggctccctagccaccgcggccccaccctcttccggcctcagctgtccgggctgctttcgcctccgcctgtggatgctgcgcctctccgaacgcaacatgaaggtgctccttgccgccgccctcatcgcggggtcmgtcttcttcctgctgctgccgggaccttctgcggccgatgagaagaagaaggggcccaaagtcaccgtcaaggtccggtggagtccgcggcatttacggtgccggagctcgggcccgggcggccttggcttggccttggctcagcccctcctccctcggcttctgtctgtggcctcgtggcgtctgggccgtcctgcccattcagtccagggaacgacccggacccaccccgacacccccagcccctgccctgacccagggagttagttggatccccggatacccatctggggccgacactggcagtctcagagcaggctttttgcaaacacccctcagtgctggggagatggtgaaagatcacgcctgccggattccgaatcctttctctccttaagccaaattttagccacttccaattacaaagcacagtatgtatacttcaaacttaagtggtgaacttaggctccgctccttatgggttttctaatgttaatttttagaatctgggtccattagctgttyagagcaaatattgttatcctgtagtccaaggagggtatagataagcatgttttccaagaaaagggtctggagctttcattagattctyataggatttttaccgtcaccaaaatcagattcagaaccacttctctaaaaatatggctctattctctctcccatcctcaggttagcttcttgtaccttccctcccctagcaacgcccctttaaagaagctaagttggaaatggtctctttcctcaggtgtattttgacctacgaattggagatgaagatgtaggccgggtgatctttggtctcttcggaaagactgttccaaaaacagtggataattttgtggccttagctacaggagaggtaagtggctggagcaggbgtagtcaactcacatgaagtgaaattggcactggggatggcagcaaactgacctgcagagttcagccgatctgtagcgtggacctcactgagcaccgactgcctgttgccctgggaacacagtattgccctttcttaagagtaatggggccctgaccaggcacagtggctcacacttaaaatcccagcacttttggaggccaaagtaggaggattgcttgagcccaggagttcaaggccaacctgagcaacatagcaagaccctgtctctacccccgcaaatttttttttttttttgagacggagtttcactcttgtcgcctgggctggagtgcagtggtgcggcctcagctcactgcaacctccgcctcccgggtttaagtgattctcctgcctcagcctcctgagtagctgggattacaggcatgcgccaccacgcttggctaattttgtatttttagtagtgacagggtttcaccatgttggccaggctgaactcgaactcctgacctctggtgatccgcctgccttggcctcccaaagtgctgggattagaggtgtgagccactatgcccggccaaaaaaaattttttttaattagctgggtgtgacggggtgcacctgtggtcccagctacagctactcaggaggctgaagtgaaatggaggttgcagtgagccatgttcatgccactgcactccagcctgagcaatagagtgagaccctgtctcaaaaaaaaaataaattaattaaaaataaaaggccgggcgcagtaactcatgcctgtagtcccagcactttgggaggctgaggcgggtagatcacctgaggtcaggagttcgagaccagcctggccaacatggcgaaatcctgtctctactaaaaatacaaaaaattagccaggtgtagtggtaggcgcctgtaattccagctacttgggaggctgaggcaggagaatttgttgaacccaggaggtggaggttgcagtgagccgagattgccccactgcactctagcctgggcaacaagagggaaactccatctcaaaaataaaaataaaaaataaaaaaacaggctgggcatggtggctcacacctgtaatcccagcactttgggaggcggaggagggcagatcatgtgagtttaggagtttgagagcagcctgggcaccatggtgaaaccccatctctactaaaaatacagaaatcagctgggcattgtggtggcacatgcctgtaatcccagctactcaggaggctgaggctggagaatcgcttgaacctgggaggtggaggctgcagtgagcggagattgtgccattgcactccagcctgggtgacaagagagaaactctgtctcaaaaaaataataataaaatttaaaaaatgagataaaaaagagtaaggggtccagagcttcctggggagacttcacctagggtgagggcagtgggttttaaggaaacaacagtgccctatttcagtttatattaactttccattgagccagcaggtgacctttcttctcagttttcttgtatctgttcttatgattggaagaaatgaggggaaaagcattatgtgatgtagaattgtataaagcttgggaattgtatggaggcagagggatttccacatctgtgtgtaccatgcctgtcctgtggcgcctgcccgctcacttagtagcacactgaacagtgaaagtggtcagcagtggtgtctcttctgcgagcaggagttgtggacttgttcctgtgaggcctatttaatgtaatgtcttcctgctgccccataccacctccttaccttctcttccctttttctagaaaggatttggctacaaaaacagcaaattccatcgtgtaatcaaggacttcatgatccagggcggagacttcacyaggggagatggcacaggaggtaaccacaggtcctctgggccaaggagtatgtcagtgtagcctccacagtgggagggccaggttctgctggggagaccaggcctytttcttccccagctctagaggcaggcctacttattacttacctactttgagaccagcggcacccttctttgaagagggaacccagtacaaaggagagagaataatggggtggacctgatggtagatctaagagaatctctcccaggtgaccgtcctgctgatccaggcctatagcctggtgacctttcctgatacctcttcagaatggggattggggagagaggcgtgtggaagcaaagtgaagacatgtgggtacgcgattctaggtcagatgcccaaagcctgtccaggctaccctggaagccccagcaagagtgagagggccaggcgtggtgactctgtgatcccagcactttggaaggccaaggtggctggatcacttgaggccaggagttcaagaccagcctggccaacatgttgaaaccccatctctactaaaaatacaaaagattagccgggcgtggtggcacgcgcctataatcccagttacttgggaggctgaggcaggagaattgcttgaacctgggaggcggaggttgcagtgagccgaaatcacgccactgcactccagcctgggcgacagagcgagactccatctcaaaaaaataaaaaaaagagtgggagcagttactttccttgacagtctttcaccagagaccactctgtgagggccgaccctcaccttggcattaacttgcacacataggacagaaagacccccggacgcctgcatgagtctcactgagctcaggtacagcctgctgctcccttagaacacagctcactcctcgatgagtgtctatggggctctgtggtgggggttgaggatgtgaagacccatggggcagtggctcccttttacttccaacaactgaaaatgtacaagtgagccatgatgcagcgtttaggactcaggctcacaaaggagaccaaagaactgtatttgtggagtcagacgcagttgggctcgatccagtgtctgccaccttcttgttttgtgacctcaggcaagtgagtccttggagcttcagtttcctgttctgtacagtgagggtggagagagttgtggggccatgaggattgggctagatctggagtgtgaagtgcctggcatgcagtgagtgcttagtaagtcagccattgttgaagtgctgacaagcagagggatcccctcaggccagggaacgggggaatgaccttgcggatgtgaggaaagatttcagtggggtcctcaatgaggagaatttgaacgggcagaaaagaggcagggttagggcatgagcccggtgctgttctgtggcaggagcttggccaaaggtggggtgaggacatctgtacccggagtgcagagaggtgggtgatgtcctgcagcctgggcttcggcctgcagggagtcagggccacagagctgagtaagaggatgacccctcacttggggtgccaggggagtcatgtggtggcagatccaggatgtggaggctagggcaggcaggctgctgggggcattggtgccactgaccctgggcagggagatttggacctgatcctgaggtggctgagagcagagattcgagagcagaccaccttggtctgaactctagccccgctgttgctctgctggggctccttttattctctgtgcctcagtttcttcatctttgaagtggagttagctcctcctcatagagtggattgttaaatatgtaagatgcttggaacagtctctggctcacactatgagcaccctaagcactcgcctactgcagcggtggtggtgggaatggaaagaaagagtaagtacatggggagtgggtagggacaacctgagccacgtgcagaggaaaaggggtcaaaagaataactgaggtctggagagaaagatgacaaggtatgttgagtttaaatagaaatgtccatttgagtttggaacccctgtatcttgagagagtggctggagctaaggatggagatttgggggttttctggataacaactataatcaaaatcccacagttggctcaaatgggggaggcttttagccagcactccagccaggtctcactgcacatgtggcagagtccagtctccccagcgtgggggtgagaggtggagcacaggcagaagcaccctgtccccaccagccagagtctggtcattcttggttttcagtcatcctacctgctgcccaatcagaaacatcttcctggttggcatctgtctaggacagtttcccagctcagttccattctgtggaaccacaggatgaaggtaggtgcagtgagaaggaaaaaagagttttgcatgcaaatatgtttgaaaggtgttagataaaacaaaatgaaaatgaccccatttttggctgagtttcttggggcctmatgcacagtgtcagtctccaaggggtgatagggaaaaagaagggtttcggtgttcctcgtggaagcagctttggaactaggatctctgaaatggcatagagatcactccggattgcccttaccatatccccaagccccacgtggacagacgcgtcacacacactcacagctgtcttttattcctgttcattccttgttaagaggctttgactctccagaatccaaggggcagcccctcttttctgcccctccccacacatctctggctgctttctcctctgcagctatgcctgtgtcttttgtgctcataggaaaacaggctggtcagccacagcagtcctccttttctggagagttccgaccctgttgactcccctgcatcctgcacggcacttccctccaccaaagtccctccgtggcaggcctgggccatagctaaggggagctgataacatgcgccttatttaaaagccacaaaactatcttctcaaagtaatccttctgtgagctgttcaccacatcagcctggcctgatgccccacttggcctcagtcagcatggcttggctctgaggccagaagataggaaggacgctgcttttatgtccttgtagtccactccagcctagcctggcacagaggacaggttaagccccctcagtcctggcccygaatgtctgcttggtttggcgcaatccagcgyccctgacctgctctgtcttttttcccaggaaagagcatctacggtgagcgcttccccgatgagaacttcaaactgaagcactacgggcctggctgggtgagcatggccaacgcaggcaaagacaccaacggctcccagttcttcatcacgacagtcaagacagcctggctagatggcaagcatgtggtgtttggcaaagttctagagggcatggtgagttgtggaagcaagggctactactgggcaatcctcaccggggattcaacacagaccccagggcaggagctccatgtgtccatccctttcccaaaaggacccaacccacagatgcagcccagtgctcctgtccagaataaaccctgtacctccatgcctccaaggttctaaattcttccagccccctcagagcccagccaggaaggctgcacaactgccagagcctccctcccctccttcactcagtgacgtgctggtcccacccctgaggtatacagagtgcagctgaacgcaatgtccctgagaagccacatgccctggtcaccctyttcctcctcctcacccttggcccaacctgggtcttacttcaaaggaacaaaattcctgtaccccmtcgtcaaatctgcattctccctgctctggccaggagtctgttagaattttggtgcctccagttttgwgtgctgttgatcacttgtgggtcttagccctcctgagccatacgctggggcctttctcctgagcggtggacctcctgatccaccatgccctcctrcttccacctttcttttccaggaggtggtgcggaaggtggagagcaccaagacagacagccgggataaacccctgaaggatgtgatcatcgcagactgcggcaagatcgaggyggagaagccctttgccatcgccaaggagtagggcacagggacatctttcttwgagtgaccgtctgtgcaggccctgtagtccgccacagggctytsagctgcactggccycggtgctggcatytggtggagcggamccmctcccctcacattccacaggcccatggactcacttttgtaacaaactcctaccaacmctgaccaataaaaaaaaatgtgggttttttttttttttaatatataatgtgtgggcctggttcttgagcctgcagcacctcccctaggcctacatcccaacatgcctgcaactctcctgtggcaatgggtgcctgccccttccctgggatcctgcctgaaattttgacccaggagctacccaggaaaagtcaggcaggagcttttgccccctgcttctaaactttgccagctactgggcctccacatttgctccccttgccaccaccctccagtytatgttaagggatgtatctgtactttttcatagcctacctytaaattgattttttttttttttttggtagagacaggtctcactatgttgcgctggctggtctcaaacttccagacccaagcatcctcctgccttggcctcctaaagtattgggattacaggcatgagcctctgcacccagctgacttcttcctttattatttatttattttgagacggagtttcactcttgttgcccaggctggagtgcagtggcgcgatctcggctcaccacaacttccgcctcctggcttcaagagattctcctgccttgggccgannnnnnnnnnnnnnnnnnnnnnnnnnnnnnnnnnnnnnnnnnnnnnnnnnnnnnnnnnnnnnnnnnnnnnnnnnnnnnnnnnnnnnnnnnnnnnnnnnnnnnnnnnnnnnnnnnnnnnnnnnnnnnnnnnnnnnnnnnnnnnnnnnnnnnnnnnnnnnnnnnnnnnnnnnnnnnnnnnnnnnnnnnnnnnnnnnnnnnnnnnnnnnnnnnnnnnnnnnnnnnnnnnnnnnnnnnnnnnnnaaaaaaaaaaaaaaaaaaaaaaagagattctcctacctcagcttcccgagtagctgggattacaggcatgcaccaccacaatgcccggctaattttgtatttttagtagagacggggtttctccatggtggtcaggctggtctcgaactcctgacttcaggtgatccacccatcttggcctcccaaagtgctgggattacaggcatsagccaccgcgcctggctgacttcctcttttattacttatcttcttgaccctgccttgsstgttgggctctaagagcatacaaattctaccacctccagctaccaatgcgagccaagttctgagccttgagtgggaatgtggcacaactgggcactgggtaattaagtcctgggtccaggccaaaggaggacccagccttatatggagttcataggacagaggcacatgactttcttaggaggcagccaaaggcctctggactgatcagggcatcggtggcagaggagcagggtgacaggccgcctttggctgggctttatctgggctgatgctgaagctgtagaggccctggagcacaccattcaccaccacgttgggcagcgactctgtgggatagaattaaacaggtctggcctcagacctgcagctccttgagctcctgctcatgggctcagcccccacttgggagtaggagcccctgccaaggcagcagacagcagctgtccaccccaaatgaagcctccgcattcccaggtcacattcttttcacatcagcttggtaaagaagtcaggctgctgaagaaatggagaccagggaagccaaacttgttttccttgtgtctacaaagcaggctccaggggacaggagcaggaggtagtggctccagaggtgggcagcaggaaggagatgctgtctgagggtcccaggagccgagaaatgcaaagcccacaacccagccctgtagccccatatctaggcacctcctcacctggggaggggttgcaaacatagggatccacatggaagctcaggacaggccgctggtgctgctgggagctgggaggaaacagggtcatgaaccatgggtgcgggaggcagggcagaatcccacagaggggtggagacggggttgccatcaccagggacccatgaaggaaaaggtgagtgggaaatgggctcaggaggcaccaaagggaaaacagacttcagggcccaggccagacaggcccagscagcaggcctgcctcctagcatatggccactagggggcagcaggggccaagcgcgggctagggctttgacttgcctgctgtcgccaggcaggaactccctcagggtgctgaagagaagagaaacactgtaagctgcctggggatgccgggggagcgtgaggaaggggtggagacaccagagcccagaactgcacctcccaggggaccactgcttctatttgtaacaagccccagttccggaggtggcgggggtaaccaagtctgtccaaaaaaaagcccctccacccaggtcaagagagctggtgagggcggtcatgctggatcctggcagatgtgaaaagaaagggcttgccctccaacacctttcctcacctgctcactgctgacagcccctggcccccgccatcggccccccttacccccagttgctagccttggggtctgtggggaagtgccgaagtctcaggaattccagtaactccttgggcacctcctggttcaggtacaggatgccctggagaggacagaggagacctgcaatcagacccagctactaatttgcatagcgcagtgccagtgaaaatgcagggctctttgttccaaaaaaagaatttcacgacaatgacagcagagcgttgaaccaggctcagggcccttctgggcgctgggcgctgtgtgcacaggttgtaccccatgacgcggcatagctttgctgttgggggaaggaccctcaccctacatgccatcaggagggcagcacaggacctcaccatggaggggacaggacmtgggtttcatggagctgggactacctgtgtccgttacctctttcagtcctttcaacaagccagaggggggtgtttggacctatattagactcagaaaattgatgcttgaggtggtgaataacatccccaagttgtgggttccctccctgccatgcccccacacctctctgtctgggccacacccctggcacagaaggccggggggcaaccaactgtgctctcgcatacctggatgtaagcctccaagccctgccggcgctgttccaaccctctggtcctccagttgggcaggcgtttcgaggggaagtcgggcactttgtacagcttcttgatctactggaggtttaccgcgtgcgatcacagcatcccgactgagccctcaagccctcttcgccccagccagaagccctcccgcgcccccgccttcgggctctactgggacagaccctggtgagtggtggaccggccgagggcgaggaaggccccaacccacccacagaggcccgggggctgaccggctgcgcagggactgaggcagtaatgggggtggcggaggctggggctcgcccgcccgcctcacagggcctgggcgggggctggacagaggctgggccggggccggtgggaggtcggcgccgcctcacccgcttgtgcagcgcgtggaactcgctgtagcgccttggcaccgtgtgtctgcgcccgctgcacagcacctccactcggaacacctggcggcgcgggcgggcagcgggtctgcgcgtgaggccccgcgggaggacgccgcagcacctgcgcctggcgacgtgcccaccctcccgctctcaaaggcacaaagcggccttgcggcgccgcggctgcccggggactctccgctcccgcacacctgggagaaccggctggcggacctgcccctcggagccctggggtccctcaagagctcgaaccatggtccgcgaggctggcaaatccaagcggcccccaaaccctcgacaaggtttcccccgacggtccagcccgcagcgctcgttcacccaggcccgggccccgggtccccactgagcgcagcgcggggaaatcctgcgggtcccggcgcccctccccatccaggggccgcgctcaccatgtggcttttctccgggctctgcctgggcccctcggcctcgggccccaccgacgggatgtgaacttccagcatccgcgccccggccccagctgctccgcgcgctcggctcggagccctaactctcccggagcggactgaggaccccggggcggccggctccgccccctcggtccgcaggccccaccccaggccccgcccccaggcgaccccgccccgggcgttcccttgcgccgcgggtcctgagcctagaagattaggcgggacctggacgccgcccccgaagtctagtgcgcccacagcgcggggcagtggagtcaaccgtttgtcaaacattgacggagcactcactgatgccaggaactggcgagcgaaaatgtcacccaacctgagttaagcgcctaccaaggacggcctgtggctccaggcgcggacggaggcggggcccgggcctcagcgccggtcctggggccaaccagggacctgtcttgggttcctcagtcccttcccgagcctttccctcctttcagcctggtccctgaaattgtgatctggattccccggctgaggccacacctgagcaaggcttggacccagtccagctttgatgcccctttccccagcatccacaggcccccccattcattcattgttttcatccatccattcactcatatcttccaaccctaaggggctccaggctgtttgtggggaagaggcagtttagggacctagactccgatttggacgtcagactgcctggatttcaggagctccgtagacctttgctcatctgcaaaatagggataacgtggctccttcaggcaagtgtataaagtgagatgatttggccgggcgcggtggctcacgcctgtaatcccagcactttgggaggccgaggtaggcggatcacctgaggtcaggagttcgagaccagcctgaccaacatggtgaaaccccgtacctactaaaaatacaaaaatcaaccaggtgtggtggcacatgcctgtaatcccagctactcaggaggctgaggcgggagaatcacttgaacctgagaggcggaggttgcagtgagccgagatcaaaccattgcactccagactgggcaacagcaagactctgtcttaaaaaaaaaaaaaagtgagatgattcatgttaggcccttaacagaagcattgagcagcagcttgactgtgggcttctcctggatgactaggataagtgggcacagggcagtggatgggaagagagactttggggggtggcaccgggttgctcttgtccacccctccgggcaggttcttcctggatatgtggcaggattttgatccagaactctctcaggccatgtgctggaaaggacctctgctcccacctctcagccctgcacccttcagctgtcggagagctgctatcagcagcaccatggcaggtcctctactccactgacttcccccacaaaggccccgtgacatgcagagaggcgaggccctgccttccaaagctcatacgtagtgggaggtcttggggtgggcaggaggaagcagagtgcctgtcttcggggctggggttgaggggactcacccctcccctgcttctgcagagacgcctctgagctggagcaaaaaacctccatccccagccctgcccccagagaagggctgagatgacgaccccaaaatggggcaaacaggtctcaccaatatcatgtcccacattctctttttccaaattgcatcacacaaggaccacagaatcaggaagctgaaacttcccagattctagtggggtcccctagaagaaaagcagcccagagtgaggagaagtgctgtgctttcatttcctccctacggccccatcattcagggacccagctttccctggcctacagggcctccccaactcccactgtccagggaggcctctcctgggatcctcagacttcttggtcctcatcctaatgactgtctgcccctctgtctgtgagtctccattttttcctgccttcatccccaatagaacgtccattctctaccctgcagcacaaactgttatcaaggcatgtgcttaaaaccttccaatgtttcccactgcacttagaataaaacccactctctctatgcaatccacaaagctgtaaacaacccagcccagcctccatcttccacctcatttcctctcctctccccatcatgcactaggctcttccaacctgacaagctctttcctgcctcagggcctttgcattaggctgtttgctccacctgggggcacccttccttgactcttcaaggattgagctcatcctccaattcttagcctaaaactcaactcaaaaaggtttttttttgtttgtttgtttttgtttttgtttttttttttgagacagggcctcactccagtcacccaggctggagtgcagtgacgcaaccacagggctcactgcagcttaggtgattttcccacctcagcctcctgagtaactgggactacaggtgcgcaccaccacacccagctaatttttgtattttttgtagagacggagtttggccatgttggccaggctggtctcgaactcctgggctaaagctatgcacccaccttgacctcccaaagtgctgggataacaggcgtgagccacctcacccagctgaggcttccttcttgaccaccctatcatatgaccttttctatgcacatattacagtctgcaattattgtttggttactgtgtgtctcaaaaacatttgggttgaaagactatatggataatatttgtgattgaaagactatatgaatgaatgggcagtgggggtatgctgagaaaaaactagggaggggaaggagcagcgtctgctgaagggttagaggctgcctgcatggtgggacaacaagaatcttcttcctacctccagaattaaacacacttctcctctcttctctcttggcagatcattgtctactttttccatttacttaattttcaggtgttccaggaagcctcagatcagtggattttcatcaccagttgtggaaagagattccatgcaactgacttgtcaaacatgtgatagggaacctgcagctcctaattgcacagtgttccaccgcacaagagtgcaggtacaaaagaagaaaaacgagatccttgacacagaggcatttaagatgtctttggggagataaaacaggtatggagaatattttctaattttttaaaatcaattatgtattaatttattgagacagggtctcactcgtttgctgagactggagtgcagtggcacaatcatggctcactacagccttgacatgccagactcaagcgctcagcctcccaagtagctgagactacaggtatgcattattaagcccggctaatttttgttttgttttgtttcatagagacagggtctcactatgctgcccaagctggtctccagctcctgggctcaactgatcctcctgcctcggcctcccaaactgctgggattataggtgtgagccacagtgcccggccaagtattttcctataaagaggaacgcatgacatgatgtaaataccatagcagttattacaatcaaagaaagtttgctttctgtacgccttcagtgctggccagctcagcatatgaacaccacgttccagactctatatgatgggtgtgcagacctcaaagtaacttgtttttagaatgagctgttttatgatacaagcttttgtcttttctccaccacgatctagcacatggattgtatttcaatactagattatagtagttctcagactttagcaatcatcaccaccacctgtagggctgtgaaatctcacatttgagtgccctggccctggattttctttttttttttgagacggagtctggctctgtcgcccaggctggagtgcagtggcgtgatctcggctcactgcaagctccgcctcccgggttcacgccattctcctgcctcagcctcccgagtagctgggactacaggtgccctccaccacgcccggctaattttttgtatttttagtagaggcggggtttcaccgtgttagccaggatggtctcgatctcctgacctcgtgatccgcccgcctcggcctcccaaagtgctgggattacaggcgtgagccaccatgcccggccgccctggccctggattttctaattgctgggctggggtggagcctgaagcggtcatcttcaacaagctccctggtggtcctgaagctcctggttggagatcacactaagcaagcaccggtctcctgattaccgcagcagccccgccgggggcctggctccactcgctcctctatgcaggcatagagccggcagtttgccacttggaaatagaaccaaggagcagagggcaggaagggctggggagtgaagatgtaccccgactcgccccattcctgcgcacgggtaggctggcccacagaccctgccttagctcaggccctggcttccattgcagtcacacaaagccccctttcaccggcaaggsttctgctgcgccacaaaggctgctcaggaggtttggtcaacctcgttaagaaaacaaacagcccctgggccacgagcttgtgggcgccacggggcacagaggctggattcttttctgggcccgggctgggcgggcggcagcggaggggtggactggccaggaggggcccagccactgggggctgtctgagccatggtgaaccttgcctgcgccaccccagcccagctctggtcaccggcatcaccttggacaacccccctgaggctcagggtccttatctgtccttatctcagggtcctcacacaacagagagtggtgtgtggattaaatgactgcagcttccacagtgtttggcatggggcccagcacacagcagagagatgttagctattattgactgaattatgtgaatttgccgttttcgtaggcaaaaaacggcaaggtcttaccaatgacatggttcatcctgatggatactgactcattgacaacaaaagcagattctatttcttccgtaccctgagactgcaaggttagcttaaaaaaaattaacaatttcaactactaacactgcaataaggatttttctgatttcctccatattgtgcaaccaaaaatagtaaagaaataaattggaagcagaggttgatataaatcaccaactatgctgttcatcaaaacagcctcctactgttcacagagttcctactgattaccttgttaataagtacattttataaacggaaataataaatataacatttaaaaacatcatttttatgtttattagattttggtgtaacgtgtcttttaaaaagagtgctactaaaaagcgttgttactgagttggtccaaactcttcacttctgtcaaccgggggaagccaggcgtgagggagtggtgggtactggaagcagctgttagaacgcacctctgacaagcatgtcctgcccaagtccttagagcaaaaattggtccaggacaggcaggccccaaacccggggctccagccagcaatgtcacttctaggagtctcctgtcccctgcccagataggacagcggcagctcagctgcttcagacaacacgactcaggtctggcacagggagagctggcagaggccaccccaccactttgacggcacagctctccaggctgcgtgtggtgatacagcaactcccagtgcctttcagagccatgtcagccaatcaaccaagtggcccctctggtgtgccaagcactggggttcaagaaacaaagacacacttgggtccctcaagtaacaggggttcactgtgaagagagctgagggaccaagaactggggcaacaggcagaagccaggatgggcaggagctccaggcctcgaggtctggaagggaggtggccctgcctcatatgctagctgtccccagggtgctggcggtggcttctcagcaagtggagtttttcatgtctgccattaaggtccccagctactcaccaaagatgcttctgtcttccagcctctgctactactccactgggcaacccctgcccatctggggaaagaatgtcttgcaggggtcagagaagctccaatgcttaccaggtcaggtgggtatccaaatgggacttgtccttaacaggcctactgtgtggatgccttcaggtctttaagaaaacaacttagggccgggtgtggtggctcacgcctgtaatcccagcactttgggaggccgaggcggacggatcacgtgaggttgggagttcgagaccagcctgccaaaatagagaaaccctgtctctactaaaaatacaaaatttgccgggcatggtggcacgtgcttgtaatctcagctacttgggaggctgagtcaggagaatcgcttgaacccgggaggcgcaggatgcggtgagctgagatggcaccattgcactccagcctgggcaacaagagcgaaactccacctcaaaaaacaaacaaacaacaacaaaaaaacaaaacttagtgggttgatttccaggttcctcttgtctgtccccgtctaaatgtctacagtgtgtgggatagggtgtggcagagaggccatgctaagagcttgagttcatcttagctatggggtgtgacctgggccagctgcttcagctccctgaacctgtccttagtgtgggtcatgagtgcaccctgcagggtgacagtgctggatgtgagctatctcagggcccagaggcagttcttactatagttaataattaggcccacgagtgggaaggggcggtcatgggcagtctgtcccctgctgcggaacatgctcctggccgcaggagcctcgtctatttttcttgagaggctgccagtgaaacctgcgtgttgggcccctgtggctatcgccactgcag

SEQ ID NO: 95605 - DNA, 352989 bp, Homo sapiens
tggaaagccaaggcaaaaggattgtttgagcccaggatgcaatgagctatgatcacaccactgcactccagcctgggcagcagagtgaggccctgtctaaaaaaaaggaaataaaagaaaatggttttggccaggaacagtggctcacacctgtaattccagcacttcaggagaccaaggcagcaggattgcttgaggccaggagttcaagaccagcctgggcaacatagcaagaccctctctctctaaaaaaaaatatttttttaataagagaatatagacagttgaattgcaaaggaaagaaaatgactaaaaatggtcatttctatgagtgacagatcatgggctatttaagaagaagatttaggatgaaagtgaaaataaaaaagttactccttttagattataactaataaattacagaaagtggggtcatttcaaatgctgtgcttcaaagaatactttgaagtatttattaaataatagtacctctgcagatgagtgagtgttttaaacctagtagtcttagattaatattactgtgtttggtggagataattagatagatactgggaaagacatagacatagacatggacatggacatgcatatcgatacaggtgtaggtatatccttaaagttttctcaagctgcaaatggtgaagtatttgtatcatgggagaacacagtcagcagttgcctctaggaaacagggacactggacactgaatttgttaagacacttcctatgatgagcaacagaaagccaacttaacctcagacaaaaaagaaaatccattgactatcataactgactgtcttagtctgcttgggctgtcataacaaaataccacagactgagtgtcttaaacaacagagatttattttctcacagttctggagaatggaagtccaagaataagatggcagcagggaggtatctggtgagggctcttctcctggtttgcagacagccaccttctgtctgtgtcctcacatggtggaaggagagagacctcttgtgtctcttcctcctcttatgagggcatcagccccatcagattaggaactcacccttttgacctcgtttaagtcagttgtctccttataaacctatctccaaatacattggaggtaaggacttcaacatatgacttagggaggaggcataatttaatccatagcaccaactgtttgaacttgatttctgagagaccattatcttggctgtgcatctgccttcagggcactccttcttgatcttctttgctggatccttctcaatttcccattacctaaacagagtttagccttgggtctattctcatttcctaagtgatctcatgccctcccacagctttcaatactatttcatcgtccttggtgctccagaatgctatataagctgcctacataagattcatatttggatgtatcataaatattgcaaaggtaacatgctatctagcatcacgttagttaatgacaaccaaactcaaataggccctagtactcttggccatcatattatatttctctggtaatttaggctctttactctggtggatgacattttatacctcctttcctcaaacctccatcacctccccgtcccctctcttagacaattgtcatttcactgagaaattagaagtcacagagaatgttcacatacagtgacggttgcactgccattgcaacctgcctaccaacacctgtaccatttactctgttttgccttctatgtctatggatgaaacatccacactcttttccaaagccaataactctgctagttatatatcactgctgaaacaaactaacacaaaatatattagtccctgtttctctaggtgggtttggctaggtactttgcttaaaatctcacaaggcaagaaaacaaggtgtcagcagggctgtattattttctggaggttccagggaagactctgtttccaagttcattcaagttgttggcaaatccagttccttgcagttgtaggacttaggtggctattttcttgctagctgttagttgggggttcactctttgctagtagagatctcttttgcatccttgcacacgggctcacaactcagagacagcagcatcgtgtgaattcttctcaaacttggaacttctatgatgtctgctgcatctctcttctgcttccagccagaaaaatctctctgcttttaagggttcatgtgattagattgggcacactcagaaaacccaggataaaatctccctactttaagattcataacctcaattaaatctgcaaagtcccttttgccatgcaattaacatgtccccacgttccaggaattagagtgtggacttacctggagggcatgtagcctaccacaaatttgatttgtgccccagaaatttgctccctctcttccgcatcaccaattattccccttaactgcattttttccatcagtgtacaacatgctgatattccttttcaatgactgctccatttctctgctctctttggggcaaaacaccttgaaataattgcctatactctttgttcccaattcttctttcgtttttcttaacctttcaactttctactacactcaaccttcttttgttaaagacacaaatgattacacattctaagtttaagggtcaattttcaatcttcatttaagtgtcattttacacagctgatcattgaaatagttaatttaccttctaaggcaccattctctcttggtttttcttatactttctggaggctccttgtcagccttccttgctagtccttctttatattcttgacagcataatcgtggactgcctgcagctcttccatctgcattcattcccttggtaattgtatctagtttcatggctttaagttctacaggtatacaatgacttccaaatttatatctacagcccagaactgtaccctaaactgcatgcttatatattccactgcctagtcaacatctccatgtagatatcttacaggcaaggttaacaaattcaatatcaaacttcatcttccccacaaaacctgcttctcccgccatcccttggtcagtgctagctctgttcttctacttgatggaaccccaaattttggagatgtcattggctcctctcactaatctccctcctttgtacttagcacccaatccatttaacaagtcttattgtccttaacaccaacatataattggaagtaaaccacttctagccacctccaccaaagcatcgtggtagacaccactaggatgtctggcttgtttattgcaatatatcgtttattagactctcttctaccttgacctccacatggtagccagagcgatcctgtcaaaaagtaagtcagattgcctcattcctctccttaaagccctgtttcatgcagacaggaagccaaagtccttacaatgacctagaaaactctccttgatctgtcacctctgcacccattgccatatcctactacttaccagccaaatactccagtccccagagccttgcacttaatgtcctcttgtttaaaatgctctccctatgcctccctcatcaacttcccctttgtgtccaacatcatctttgcagtggcaccttctctgcatactcactttaaaattgcaagcctctatctgactagtgacccttccctctcctgtttcttcttcacaacagtattaccacccgatatcctatataaattttttatttgttgttatggccattctcctttcagaagaatctaagtttcgtggggtcaaagaattacgtgttggagggtgtgtatgtgtgttatatgttttcactgcattctccccagcacctagaacagtgcctggtacagagtacacaatcaaatatctgttgctgttcagtgaaggtccagaactgttatttatttcacctcaaaaccaggctcttctcccagtcttccccatgtcagtaaatggcaactctagtccagtttgcccaagccaggaacctggaaattactcttgattcctctctttttctcacacctctcatcttcaaatactgccaacgctctctgcaaatacacaggcccccttccaaaatctggccctcccaccttctccactgctctcacccaagtccgagccatgatgtgctctcacttaggttagcacagtggcctcatttattggtctctctgcttctactcttgctccctaggagtctatcttccacagagaaaagagagaaatctcttcagaattcgtgtcgaatcatagacattcctcagttcaaaacactctgataggtaggttttcaccttggaataaaatctaagtcgtgtgcatggcctgtaagacatgtcctgatcttgtcccagacataccttctgaaacttatttcttccctttgctcattctcttccagccactctatttcccttcctgttccttggctctgccaagcactcatgtgttgtgggacctttccatggcttcatctgcatggaaggtagaggcacacagtacctgctatgtcccatcattcgggcctccgctccaagttgctttatcagagggctgccctgatcatctttcctaaaatagcacacacaccacacacacacacatgcacgtgtacacacacacctcattctccttaccttattttgaagccctcattgccaactgacattatacgtttacttatttttctttgacaatttccctgcttctccaaaatgtagactccatgggggcaaagaaccatctgttttgttcactattgtagcttcaacaccaaagataaaccccaacaactacagggatgcttaatcctagcgcctaggctcttagggatacataaatactttctttctcaaagaaacaatattagtatttgaaaaaggaatgtggacattctttagtgttgcgcccacccctaaaacatagtctgcctcggagcaatggagaaatctgattggcccctgtgggtcccatgcccccttgtggctctgtcgtgggaatggggctgggggcaaagtccatgcaatccatagaagatagaggaaggaaagttccgcccaccgcccacccaaaaaaggtctgttagcagaatttaggatggggatggggaaaaggaggaggatgtgggggaggcagaaacaacagatggcaactatggggatttttccagagtgggaagtgtaacccagggataagctggggtccctggtaarggaagtatccctaaataactggaccttcatactctttgggaaagaacaagctgaggccccaggcacacctgcatggcatcaccatagccttgcttcttgaatgactcctgctggcatcaggaggcatctccctggcaggaacaagcctgaggcttcaccacggaagctggaggaaacgcagggacccatggcacaaactgacacaggagttctatgtttcattgcacatcattttgttcaccagtgcatttgtacgattctgcctctatggctatcaagtttaattaacaactcatttttaggtaagagtaaaaatgaattaggtaaaaaaaaataagcaacagctgccaagtgagcatggagcacatacactcacagatggaaaaaatctacatcttgctgctatgatttagctcagggttttatatttaatttttgttttgttttgcttttgtttttatacacctcaccacaaggtattttaaattctttaaatgtattcccgaatatagaaaatgtttcttgggctctcctgagagtggggtgcccaggctgaccacaggcacacacacattcttcccatagtacagtactttaaaattaatagcacatgcagaggaaaaactaaaccctttgacgtcactcttgaaatgaggaaacataaacagaaaaggctccactccagtaagctgccagagttgaagccgattggtctctgcttttccttgcctgtggcaactgacagcacctcccagcctagcaggccggcggctgctcacccagccagtcagttggtctgggcactgcagcaggctcggctctgtcccagcacttgtctgggagaaaagtggtgttactcacccagggagagtctctctttctaccttccttctttctcgatctccttgtgtgcttttgtgtttctttatttcttttccttttttttctttttttttttttgttacttaattatattcctaatcctggatgaagttgctggattctgcagcacaagtcttcatgaacaagcagcaccgctcagagatttcacggcattcaaaggtcacagaactgccactatggttaaatgtcttgtttaatggttgaggtatgtacaacaaatttaagcggcaagctcagttttcttgagagaatagagtcacagagagatggcaggatttttatttaaaatgaacctgtacatatatatgttttttgtctgtgattgttactacagcaaccagcttttgaatttccttcctttttctaggcgaactgactaaacattatcacttaccctgaattaaccgtttaagggcagcagggtttcattccaaccagtgtaatgagactccggcattttcactgcactttgagcccacactgaggtggtctttaaaaaaaaaaataaagaatgcaatattttttttctccaacataaatcttggagttgggtaattttcatttttggtgggacaggataggaaaatgctggtaaagggattggtaaggtttgtggaacagggaagaaggaaattagtttttttcttgagtttttcatgttggttgatagcagacttcaagatgaagaaattagtggcaagaagggaagaagctgatagtgagactgaaggtagaaaaaaatcaatagaagatgtccaaaaaatgagctctgaagaaaaatccttcatcaccttgttgcatttttcaaaaaatgttttggattcagaagtccaggagagatgcaagtactaagttacatgaccagaaatttagatattattatttataaaggaaagtaaaacttctttattaccactgcaaatttgctaattatcttttcctacaatagttgaaaatggagtcagatattcaattaggggcttaagtgattgagcctggggactaattaatcatttaaaaattctgttcttcatgtgctctagccagagtgactattgcaataagagtaaacctctttgcaccagagacaggcataggcattcatatacagtaaacacactaaatgctgcaggaagattggcaattcaatacagggctaatgttgttttcagtggcacattattatgtcttaaggaggatccctgctaaaaatcattcctatccaaagagtcggtttttgtaacagcaatttaagtaatatatggttaccatggatttccctattacccttctcaaagttatgcaatagcaaataagacaggattatttgaaatccttaccctgttccaaaatttctaaccgattttcttaaagtttctattctcaacattgagaacctgaaagctttaaaactgggtcatgttagcagtaatattaagcacgatttcaaacatgaggtgtatttcaaagggttaaaaaaattaactgcataagactggaatgtactaagttaagaactgcaaaaatattagctctgaaatgcagaggatgtgccgtgaatggacaattgcttttctgcagcgcctagtgggaaaacaaggactttgtgtgttgcaaacgcataactgcagctcctccatttcctctgctttatcttttattactggctggtgaaacaaagacaggtgtcagtagttacgtcttgattgacattttctccaataaaatgaagtcacttttgtctcaagtagaagcccacagttaactagttgcaactccaaaaactgtctctgccttgtaagaatttttacctgacactgtaagctgtctaatttcagaatgtactcactctcttgaacaacatgtgacaaaatcagtggtgactatatgtcagcaaattagctgggagaatttttttttttaattaagttatttagggcaagggtggaaaagtctaagatgtgtcagggacaggcattaatttagggaaaataattacacgagtgcatcatttaatgccttacacagggttcagcacaaagctactcactgtcagttctccataaaaacctagttaaaatgtttgcctagaatttactacctttcatatattgtaaattatttaaataattttggtcttttcatgtgtttttgaaaagcacttttggtgtcagtccagcctgaaatattatctaaaaatcaagtcaatgatacagagaaggacatttcaaacactgacactttattttcagccwaaggacatcttaaatgcaaaagtaaaatgaccaagtttcctcaaagtgggaatgtaccacctggaaaatgcctcagcctagtaattattcgtctgaagtctaacttgttgttagccaggcccaaatcacaggaggaagctgtttgttgactcacagaagatagtgttggaaggaatttattaagtggtaagctaatcccaaagaatactaaaagggctttgtttatattaaagagaagtgtcaaatttaaggatcagaacagactttgaaacatctaaatgtagaagctaagaggtagtctaagtagttgacctcacattgttggggtacataattgattggaaactctctatctacagaaattcttatctgaataatccactatcttatggattcagctctgtatcccctcaaaaatctacagctwagtaggtatctatgttctagggggtacatttgactgaggaagaaaggacttggcatttggaaatgtgaggtctctctcacagcacaaagaccatctctaatctctattgacacctcctcatggcggcagccccatttcccctaagaatgtactttggggagcacttccactgtccacaggagagtagctgtgggatcagcaccactggcttctaaagacatcctcagtggctctaggaatcccctctttgattcatgagatggtgcctactttatatattagcagtctttaatgtggtttacatgcaaacttgaagaagagaaggagaaaagggatgtagaaacccaaatcaactgaatacctattatgtaccaggcattgttagaaatttcagtacagagagtgaaatatgtcaaagttcttatgtgtggtcaaggcatttatactttctactttctcaagaatcatttaagtatctaaatgagttgatgtgtacttagagagtgatttcatgaagtgcactagaaagggcggtgaacagaggtagtgaaccaaggtggttcattcaggctctaatgagctgggtgactctgagccactcactcattcttgacctcagtttcctcaattgtaagagcaactggttgcgctgggttatctctaacatccattttagatcaaaatttttatagtattcttattctcaacctagaattttttaactccatttacatgtaaatgtagaagtgtcaaacctttattccaaaaatcattactacatgttttcaggatgtcaagggctgtgcctgtgaataagcaatgattcccacattaggaaacgtattctggttgagtatgaatatttaaacaaatgactggagtctgtacaaagaaatgaaaaaacaaaaggagaagtctgagaaggaggcagtgatggaaaactgcagaggaggcagctctatgcaatttggaatttaagaaaaaaataaattgtatttctatttaggtatttatttttatatgatgatctataatgtgattaattaagtgcattgttattattttggaaatcatgtatttgcaatggtgttctcaaaaattagaatgttaaagagagccaaaattttcccataggttgattcagctgctgtacaggcctgatttggtaaatcaaatccgtacattggcgtcctcttcatcattccttgaacttaaaactgtaggagttatggaaagctggagtctttagagagcactatgggcagccaaggtcccagcaggcatctgatacaagccaacaaggttcatagctgtgatggtcttgaacactggcgcaaggtggtgtcaacatggtaggaaattacctcagtgtcaggaaaactctcatggtggctcggaacttcaagattacttgtgggagtgaagacacatttcttcaactctggagcttccatttcttcatctttaaggctgttggatgccctttttctttccaaattctgtgatttaacctgacaaaattaacactgaatcattagcatgtgtttacttttacttttccacctctcccattccttatttccactactctctgtgtagtttgcctttactcagttgtccacatttacacaattttacctccaagataatctcattgccaaggaaaagcaaaacaaaacaaggacttgggtttgagaattcctccccagaaagactatcactcccctgagacagtcacctctcctcgctccatttctcttgtatcaggttgatgtgcccctctgtggctgtgacactcctagagaaagcaaagaggcatgctttgtgaaaattgtagctagaaactttaatattacaagacaaacgtctttttcctaaatgccaatcactgtcctggattttctatattacttcacttaatatcttctcaatattaattctgatttctttagagaataaatgaaaacctgttgataactaagttgagggaaccttcagaagaaagttttggtgaattgattgtccattgagtatctgctctgagaccttgccctgctggtacagggttgctgccccttactagtgatgggatttgatgcagttcaatcaccttaatcgagacatttctgggattctgcgtggctcagagcattccagctggtgtctgctctgagtgagagtttacatttaacacctcaagcatggaaaatagggagctggttttgtagttttggataaacctaaaaacaacgtaacagaaaacacacagacatctattaagcaatatataattcttgatactactgtataaatatcccaacattttaaaagcttaaatcctttcatgaatggtttacatatttatgtgtatacagtatagaagtatgaaaataatagccacagtcaatataccagtaaagaaactttgtcatgcatttgaagttccttcctttctgcccttcctccctcctctcttcctttcttccctccttcccttccttctttccttctgccctcttactccttttcycctccctccctccctccctyccttcctcccttccttccttccttttcattctccctcctttcctctctctctttctctttctttcttgaatctgttaaggaaagaagggaaaaatagattggtaatgaggttttgaggagttttccttgtgtaaagtttggagtaatacttacttttttttcctagtggttggtgaattcatatagtttttcattaaatttcctgctgatatttttttcttattaataccttctgtgttctacatagtcataattcacatataaataggaagtatataaaatattctttctacaagatgaaaattattcccattgctttagaagtgctcaaaaaaggattctgttcaaaaatgaagtttatacatgacttaaatatacttaatctctaagaatcttcttttgttctggcgtgggggtggggtccaggactagtatggtgtgaggagtatgtttccataggtccaggcatagacatggagaggctaccatatgcctggattggtcaaaatttgatacctgaaggtaccaaacggtcagtgttttacattctctttgactctagcaaatctttgtctaagaacatatagaattgtttatttttgcattgtttgtaacctaaacaatatcagaaacaacttgagcccaataataggtgaattattgaaaaattattgcaaaatcatacaatagaacaccatacagtcatgtaaaagaatgaagtacctctacatgcaaaaatctggaataatttttcagatgtattaagtggaggggggaagctacattaacagtggtataaatacatagacacattcatatatactttttaaaaatttctggaaatttgaattaaaaacttaacaaacaatgccttggagaacttggagtatgggataggaacaaggcttacttttcttgtatatactttagaattgttcaactttcccctccataaatgcattatatttataaagggaaaaagttactgacatttatttattgtgtgatattttaaagtgaccagaaaaatttgaaggtaaaagaagaaagagttctattttattttatgtttttcattttatttaatttaattactatttttttgtttgtttttgagacagagtcctgctctgttgcccagggtggagtgaagtggcacgatcttgtctcactgcaacctccacctcccagagtcaagcgattctcctgcctcaccctcccaagtagctgagattacaggcatgcaccaccacacctggctaatttttgtatttttagtagagatgggatttcaccatgttggccaggctcgtctcaaactcctgacctcaagtgatccacccgccttggcctcccaaagtgctggtattgcaggtgtaagccaccacgtccagcctgagttctgttttgctttaaaatttcttcattaatttctttctttgacccttactaaatttctcccatgtacctttgacatggctagggagcagagaattccctggaagtaagaatcctggaagccaggagatagggagcccatcattcttatttgagtaactttgggccaatcagccctctgggcaccagctttctcatgtataaaatgaggggcttggtcaagctcaaagttcctttgatctgggtctaagaaactttggcctgttacacgcccaattatttgagatctttctccataaacaataaacatattttaccatacatattttactggtttgaacatcttgactaaattttgttttagaattgatcagttcagtttaatttttcacattaactatacatgcaaaattagtatttattcaaaccgtgtttaaggaaatcacatatcatagacttttaaaggaaaattatactataatatcagttattcataaaacagtagaaaacattatattaagatgtacagcttgtgcagttatgcaagcaagtaatgcttcttctgtttggatatgatttatacatttcttggttttccaggagagaaaaaaaaaaaaaagaccttcatttccctttctcattatgccacttgccagctgggtccagttagatgaaagaactcagtcattcacaaaagtgtagaaagcattcttgtaaaaggagatgctgcagtaatacagaggtctaaagaatgccttgatttagaaaaggtcattaaatctaakaaaaaagttattttctatgtgacagaaatatagtgtgtttccatgttcttaagatgagtgttcatgcttttccaattaaataaaaacctaatttcaattgggtttttagcttcattcggaaaagtgtaggtattgctcattttccatatttagtagtttttattttctgtttttctagatcttcattattgtgtttggagtaaaaaataatctttaagttaaaataatacaaaaggaataaacataaaacaggaatttgtgtgatagcagtttggaatgacaaagactaacattctaaacttttccctataaatctcttttaattattaaaaatcactaagtattagaaatatagttcaatggcttataaataaaataattgagaaatattgttctctttttcattgaatatgttgccccaagtgcccatgtgtgggtgcatgagagaggcccttcttaaacttgacaaaatgcatgtaagagctttgtatgtagtagtaatacaaaaaaaaaatcaaaacattgagttggagaatacagcctatttaaaatatattgtctcctttaatgtaagtctttagaaaccaaataatcaaatacatctattggattaaatggcaataatgagtaataatttaaaattcaatttgcttattttgtgtgaaaggagaaaaggaaaagcaggaaaaaaaaatgaggattccattttttttccaggagcattgaacttgtaacctaaagccccgagttcaagttccagatgctaagaatgatactgttggcaagttatttaacatttttagatttcaggtgtctaaaatgtaaatgtaaacctttaggttccaaaatttctggctttcctatgtaagtagttactcagttcataatacaaatgtcctgtaactttctagaacattcctgttagatcgggatttgttatgcccactttaaaggcaaggaaattgagactcagataaattgcggctaatagttgaaatgcaacttcagctttttgctgacagtttttaattgtttttatatgcttaaaatccatccttaatcattctaagaatgagttaggaaacatttttaaaatacacaaaatataaaaatgtctgttttgaaaatgttaatctacccactatatttttatacaaaagttcaaatatacagaaaaacagtattatttcattttaaatggatttaaattgattaaatggattaatctgatactttaaacttcagaaattttgctctgagaggcagtagagtgcattgatcaacagtgcataatttggcgacattcagtatggttcatttattagctctgtgaccatgaagaagttacttaatctctctaggcctcgctctgcttatttgttagattaaggtgtttctaatatctgcttcttgagagaattcttgagagaatggaatgactttttatttgtaaaatgcttagaacagagtatgaaagagtaaaacttaatgttagtgtatcaactggtattatttgctttcaagttttagaaattatttcatggaattattttgtttacaatgttgttggtgctttaaacatttaagataaatcttgttttaaatttttttttttactttctgaattaaactatagcacacataacagaaaattatctaacatataattatgcaccattgaacccctacatagaagtcaagagagtcaagaaatagaacattattacatgtttggcacctgaggaaacccatcatgcctcttccattctttcatgcagtgttatatctgaagactagataggttgttgcctatcattgtattttgttcattttcattgttgcatgatgtttaattatctgaatacacggtatttaccattctactgtagaaagcattttaattgtatccagtttttaacattatgaataatgctggcctgagtattcacaggcctgtcttttggtgcacatgtacaggtatatctgttgaggttatacctaggaataaagttgctgggccacagggaatgtttatatccaaatttagtaaaaaattcaaaattgctcaaagtggttaaaataatttacgcccccaccaacaatacatgttcagttactctacttcctcactggtaacttatcttggttttaattttcacttccctgtttactaatggtctgagcaccttttcacatgtatattggccatgtaaatatcttttttgtcaagtctctgatcaagttattttgtatatttataggatattatatatacttatatatatataataaacatatttgatacctttgattgttatatatattacaaacattttttccattggtaaaatctcatgttttattcttctcaagattgtttttatcatttttgattctttacattttcataataattttagaattaacttaagattcttccctaaaacaaaatactgttgggatatagatcaatttgggaagactggcatcttttctgagtcttccaattcataaacataatgtatccttctatttatttaggtgtttgttaatttctgtcagtaatatcttctggctagcttttggtcattttacatattccttgctagacatattactgggcacttagtattttgatggtattccaactggcatctcttcaatttctatttttaactttttgttactgatacatagaaaaacaatcaacttctgtatatcaattaattatcagcaaccttgcaaaactcacaaattccaatacattatctatggattattttgcttttccatagaggtaatcagagcatccagaatactggtggtcaccgattttcctttttaatgctgataactttgttttattgtactggataggattttcagtatattgttgaaggggtaatcgtggcaatattatcttgtttccagtctcagaaagaaagctttcaacattctaccactaagtttgatattttctataacatttgaaagtttccttttattcctagtttgctaagcatttcttattaaatgttctttaaaatacttttcgtatgacttttcccttttattctgtttataggtgattgattttataatttcaaaactgaaatcctaggataaatgtaacttggtcatgttatgttatgctcattttcaatatcactcattactctgtttctgaattgctaataatttttaggattttgaaactatgttgatgaaaaccattaacctaaaattatccttttttgttatggccttatcaaggttccattgactttattaaattagttaggaaatattaccctagtaaaaatgttctgggacagttttgtaagtttatattattttttttcctcaaatatttgatagaaattgcacataagtccatctgggtctgaaatattttgtggacaagtttttagttacagttttaattccatttatttttatgggctattcagattttctattttcattgtcagttttagtaatttctcatggatttgttgttgttgttgattatttttcagtgtttcttctttttgaatatatacatttaaagaagcaaatttatttttcacagtttcagctgtctcccctaggttttaaaatttactgtttctattagcagttaattcaagacaatttcaattataatttgtttttcacctgtgaattatttagaagtatatttattaatttgcaaacaaattgggatgtcctagttctctttttgtctttgtttcctagtataattctactgtgcttacaagtcataccattaagatctttgaattttttgaaacttgaatgtataaccgaatatatagtcagcttttctaaacgtattacatgtgcttgaagtaaatgtattctgcaattgttaggtatagtgctctatagatgtcaattagaagatttattcatcatatcattgaaatcttttgtatctttattgattttctttgcttctattactgaaagaggtatatttaaaaacttcctcatgattgagaattattttcctttattttgccatcatttgcttatatattatattgaacaatgtaaaattgccatttttttagatcaaggttgaatatcagcaattttataaaatttaaactagtattttgatactgtgctgttatatgctgccttcacagtaggggcaatacttagttcttggggagccaaaacccttagacatcataatggtttgtgacctaaaaaggttcagcacataaacagatattcagtcaagttggcattaaaatttccttgactggggggagtgtgattagggaaagaaatatctataatggctccataagggaggaggatgataatggaaaaaaggttgagaattccttataaacaattttagaactgttgtaacttcctggcgaattgaaattttaccatagtaaaacatcccttccaatttttttttttttttttgccttcaattctccttgggctgatactaaaatctataaagctagctttccattgcttagtggttgcatgccttatcattttttattcttttagttttaaattgtctatatgtttatgttttaggtgtgtctgtttacaagcagcaaataagtaaattttcttttatcattcagtctgactatatttgccttttcagtgaatatttaatccttttataattaatggaagcagtgatatatttgggttcaaacatgctgacttactatgtacaatttatttattcttcttgttctatatttctttttctctcctcactttcctaattatgaattaagtatctttgtaattgcactgccccctttccgttagctttagcttgttacttttacattattttacattgttttactggtgactattgcggttacaggatgcatctatgacctaatacaagcataatgcatattagtacttttattcctttgtggcaaatttgagaacttcggaatgccttaactacttttgtatccctcctaaattatatgctattgttaggtatttaactttatataatgtaaatctttgaataattatatattattatggtttcttacaattacacatcttcttcattctttcctgcatctctaaggtcacatataggatttcctttagtgcagtgatgattttgtttagattttggttttgtatgaaatggctttattttacctttatttctgatgtgtacttttgctggtaataaaattatagattgtaatccccctcctccttactttaaaatattattgtattgtcttatcacttttattgtttctgttgataagtcagaaaatagtcttttaaaagcaatctgtccatttcctctgtttgtagccctattttcatgtttgattgcttgttttgccatgattacttaggtatggttttctctgcatttatcccaattagggcttgtatggtttcttaaatgtgtgtcgtgatattgtttaacaattttggaaaattttcattaattatctctttcaatattgcttctgccccattatctctagcctttctttttttattattattattatactttaagttctagggtacatgtgcacaatgtgcaggtttgttacgtatgtatacatgtgccatgttggtgtgccgcacccattaactcgtcatttacattaggtatatctcccaatgctatccctcccccctccccccaccccacaacaggccctggtgtgtgatgtccccctcctgcatccaagtgttctcattgttcaattcccacctgtgagtgagaacatgcaatgtttgtttttttgtccttgcagtagacgaacaatgatagactggattaagaaaatgtggcacatatacaccatggaatactatgcagccataaaaaatgatgagttcatgtcctttgtagggacatagatgaagctggaaaccatcattctctagctcttcttaatgggactccagttacatgtatgttcgagttttgaatgttcctactcccattacttaccttcaatctctttgttcttcattttgaagattttctttagaccaatatttttatttccctaagtctttcttcatctgtatctaatctgtcatttatcccataaaacaatttgttaagttatgatattcttcggtcttaaaatttttagggatttttggtcatttctagctttctgtcaaaattctcaatcttgcctctcatatccttaaacatattctgcaaatcattataaaacttttgttgcttttattttgatctcttgagtgtttatagctgttgtctgctgctgctgctggttgaatcaaagtggctggttttcatatacctggttatttttgatgaagcactaggcattgtgtgtgtgtgtgtgtgtgtgtgtgtgtgtgtatgtgtggagagagagagagagagacagagacagagaaattacttgaggcctagtgtgatgttatctgtctctagataggatctacatttgcttcagcagttatcagtggtaataacaatcttgtcttaatctgatttcacattgaattaatatatatgaggtgattgaaagtggttggcacttaataagaagtctgcagctattcatttttatctattattgttttcttcaaaagatagggaaagagagtaagggtagtgaggagtagtgaatagtgcatagtgaggaaaacacatatagtattaaaagactccaatatggactagaagtaaatattcaaaaatttttattactttgctgtattttatcttgtatttgaaacaaattgtatcttattttgttttcaatttagcagatttattttaatcattaactttaaaaaacaaaagtagaacacacattagaaaattccaactgttcagaagggcataaaatgaaaagtaaaaatcttcctcttcctctcaccaccaccattcacctcaatctctatctaaaattgtttagaattttttaatatattcataaaaatgcatgttttatttgtacccacatctacatgtactcacctacccttttgtacaattaagaaataaattttaaaatgagaagtatttatcaaaatcataaactaagtaaataataatatgttcaccttccatatttcattgtggccattataatattatgcgaacatttctttacaaaagcattacaatctcatcagagtaataacgttagtttgtaattgttacttgccagtagtactttaacaaagtatcattctgaggttgctaataggctagggagatcttaggtcaaagaactacttgttacagattctgcctttcatcagtagctcacattttccatcaaatatatttggcatactacactattgagctcctgatttatggctttcgtgcatagaagttagtgttttcttgtatagtcgctgatataaattagctaaaattagctcatagcaactttcttcattatctaaattgtttcacagtttacagttctgtacaagctaatgtctcagaatgaaaatgatagtgcatacgtgtcgtaaacacataaaagattatttccaggacactagccatgtcctgtggaaatagcaaataaattatttagatgattgcaaataatataaaccctagagtaagcttagctatgctacggtaaaattctggtctagttatgtaaaactaggtctttggtgttctgtatttatctgttgcctctggcggtttgtcagcttttcttgggtgcttgtgttttcctaatactttatgcaggtttttcctgtgtgggggatctttcgagcacaggtgaacttgaagttacagctaataaatgtaaaatatgctaagtccttagcctagagtccaatcattaataatttatgagcaatttgagcaatttacaagtaacttgaaagtatatgtgtgtagaagagaaatagtaaacagttttaaaactgtgtttgctataactttttcaataggacagattttctttataaaaagatacatatttctagtttttgtaatattatgcagtatttttgttccttttcaaaacagaaattagaaaattaaaatttttgagagagtcaatgttcaacaattttaataatatatgttactaaatgtatgctaaaacattaaattgaaaacatgttaatacatcgtaaggtttaaaaattttttttaacttttaaggtcaggggtacatgtgcaggatgtgcaggtttgttatgtagggaaacgtgtgtcatggggatttgctgtacagattatttcatcacccaartattaagcctactacccattagttattttcctgatccctctccttcctcccaccctctaccgtccagtaggccccagtgtgcactgttcccctcttaaatggtaagttttatgaaacgttactcttctccgttgataatattataccttacaggtaacagtagaagctaaggaaaagtgacttaatatttaagccgaaggactaagtacattttaatgtgttactccatgaattttcttaactgagaaaatatttttaactttggcatatttttaagtaataacaaagagttatcacaaactggagctgcagaagtagataatagcactaagatacagtttttaattgctactttctgtgaaaaggtgtatgagttgttctctttaatacagcaaacatttacagtgtttcttctttaaagtaatgcaaaaaggtaatctaaggaatccacaaataaatttttcaaagctcattttatgtgttgaattaaaaaaaatttataagtctgataaatttgacatgcatttaggttattcatacaatcttgagtaagcaagatgacatttattttctaactatgaagtgaatcccaaattatgtcatttatctccaaagaggtctcacaacatagcttttttttttttctaattaaattttcaggctaggataagttctttggcactaccaagatgagtttcaaattctacatggcagagggttctctgagtttttgtccttgtcttgggccattgttccacaggtagatgccagcatggccatatcaatcattcacctctggtcgagctaatggttaaatatttttactatcaccatcacccccactccagtgcctgtgttttatcaggatgatggtggaaacatcaattggggagataaacttttttttttttttgagacggagtctcgctctgtcacccagtctggctggggtgcagtggcactatcttggctcactgcaacctccgcctcctgagttcaagtgattctcctgcctcagcctcctaagtagctgagactacaggcaggtgtcaccatgcacaggtaatttttgtatttttagtagagacaggattttgccctgttggccaggctggtcttgaacttctgatctcaggtgatctgcctgcctgggcctcccaaaagtactgagattacaggtgtgagccaccgcgcccagccttggggagtacttgtgtaatgaacacagttctgatggtgcctgtgcactattcattaaaaatgattcttactcctgcttaactgaaattgaattttaggcacaatattttacattgtcttgtttagtatgtccgaaccttaagtacactggctcaattgttttttgactatgacagtctcagataaatcatcacatgattctgtgtttcctactgctgaaggctgtgtacatatgtgtgtgtataaatatacatatattatatcaagccattgaaatgatcatcttttggccaaaaaagtaaatatcagcaatttcatatggcccaatcgtgtgtgtgtatgtatacttgtacacatatgagggcataaaaccagatgactggtatatgatgttagtcttttaattaatagaatctaaaattataagtagtttccttagattttaggattggggtggatagagactgctttcgatggtgtgaaagtatctgtaatttgcacatgtgacaaactattaatcagccccaaattttagtataaatatatacatatatttagtacatatactattactgcatagtatatttatgaagtcttgagaaaaattctgattcctgcttaaatctctcaaataatctcagaaaatctctaatatatggataaaattgtccccatcttgaagaacaaactcagactctcattacttaattagcataaagtcagtacttttaggtgagagagcctagatttattcattcaaccatcaggtatttggggccctagtatggtctagggactggaaataagtagaaaaaacaaagttcccatccccatgaagcttgcattccagtcagagatgactgacagttactacatagactagtagttgtgacagttaatttcagagattgctaaatctacgaagaaagtaagacaaagtaatgagacaacaggttgctggctgtggagacttggctccatagccagaagagagcccaatggagtcttttctctactgaaatgattgagaaagagacagccaaacctggaaaaagagtgatcccggcagaggagagagcaagagcgaagtcctgagaagaaaacatgttttgatgtctgaaagacagaaagggcagtgcttttggagcaaaatgaggtgatgggatggaaggagatgagcaggcatgggaaggtgaggcacagggcatgcagatattcacagggcgtggtggaaattgtactcttctcacagtaaatgagaagccactgaaaccatgtagacagggaggagagaccaagtgattcatgctttaaaaggagcactctgactccagtgtggagaatgggttgtcagcctaggctagggacgacatcataagcagctggtgggtgttgtaggcaagatgggagatgacgatggcccggagtaagctgaaacactagagtggtggacagtgttcagatttgggtatttactataggaatataggaccaaatggtggattggatgaaaagaagaggcagcaatacacaatgctgtgattccagattctggagctgggctccttggtggcatgttctggctctgccccctatcagctttgtaaccttggtcaaatagcctcttctcagtttctgcattggtaaaactggtggagggtgctaatagtgcctaccttagaggattgccataaggattaaatgtgtgtgtgtgtgtgtgcacacaggcttagaactgagttcagtagtaagtactacccctatttatttaggtgatatgtacttgtgaaatgtacatttcacaagtacatatcacctaaataaactaaatttgagaacaattgattatagatttttggcctacatcactaggtggtaccattcactgaattagggaagatcgagggaggatcagtttggaggaggggagatgcaggaaataagagttgtgtttaggacacattcagcttgagaggcctatcagtgaaacagagatgaaaagtctggaattcagaagagagatgaaaactgaatttaaatttatcaatatatatgctatttaaagccttggaactggatgagctcacctaggaagacaatgtaaagaggaagagggtggagaatgaagactcccagaagcgtggggaggttgggaaaggaggaggagcaggaaatgattcaaatgcatccacatctggttttcccatagtgctgcctatattattggagccctgcccgaagagctcatgctacagaagcttctgtagacatgaaagcctctttagacattcttactggtaaggggctgaggcttccagtttggaccctgatgacaggaattttccatttatacttgagagtagcacaaagaagctgtggtaggaatctgctgctctctatttactctgagatgtttttagtgcaatcacagttatatgtggcccctaatgatagatcaattgttttaaattgtgtcattattatatattttactttacatgaagagatgggcatcttcaatttacaaagttgattagaactgaaaaagaatgtttccatggacactgtactattcattatcatttgattcccagtcagcccacaaaagcctgtgtaacccacaaggacgtgaaatcaaagtacaaagaccacatagatcccaaacagcagaagcaacagggcttacagaaatatttgcttagattccttaagataccagaaagacattttcttctcctcttatttgggctcagcaaagcaaggacagagagttgcctattgggtggggtgggaggagctagggaaggcacttctgtggccagttactcacatgggtagtcaatgactgtagaaaacataaatgttgaattgagaaaaagaattctggggaaagacaggaaactggaaatctactcttagctttgacagctacctgtgctatggcctgaaggaagtcactaactgttccgtgcctcagttttctttcattttatattggctacaataatcactttcaatgttgtcgtaaggataggtgtatacacacacacacacacacacacacatataatatacacattcatgtgtgaccatgtggatggtggaaagatctaagtaactattaactattgtttattattattgtcttgtagcctcatatcatctcttggtttttaattttaattaatgattcttaggaaactatgaatggcaggactttaataatgtggagcaataataacagaaatgagatttaaaagaaaacaacaaattcaagcaatgcgggagaaattttattcataacattgtgattaggtcacctagtttctcattagctcttccaatttttcctaacagatgcctcagtgagttgtcaaaaatgatctaattccagcctttttaaaggcttggtgcttgcagcaaagagttcagttgctttagcaagttatcttatgtaaatatggccagtagcatcctggtaatttgcctccagaaagtaatctagaatttcattataaactcttatttattctcacagcatcattcagtgtactaagcagggagaattcctgtttaagattttcataattttatcaatgacttaccaacattgctcaggcttttcttgtagagtatcatccacaatacactaacattgcaattgtcttttwaaaaatattttcaatttcacataagacactgcaaaaaaaatcatacagaaaagatatatttgagctttgcagtttgtatagcttctccaaagaatgcagtatgtcaaatgcaagtgttcacagtatattaaaaattggttaggaatcagtgtttcctttctatactgtcagattaatgctctttgcttcaagaccacacagaagaaaacccaacattgtggaccctccctacctaacaaagtctcacaaggtgaactcattctatgtttgaagtgagtctgttggataaagactatcaaggactatgtagacacattaactgaagtctattatggaaattttgtctgaaaatttacttttctgcccacttaatcaactttttgataagttaatatataataaaatgcattcagtatacatgtgaaccttggaaaacataaccttatttaatactactcatttatatagtagtgagtgtgtgtgaatgagtgaatgtgctttatttctcatttctccacatccaaatctttctcttatgttctgtttttgaaaacttcataatcagcagattaaaactatcttgaacttagggatgatttttctcagtttatacttcattctgtaaatagaaacgttctatgtaacgaataatttttgtatacatggacggtccatgtatacgattgctccatactatgaaggttcctgattttgaagctgggtgagtgagctgagagcgaaacaaatctagtgatctgtcattaagtggcaattgttgtttaactcccttcacttttctctaccacaagtttctaaatttctgctgtcaagaacacacctgaatttctaaaccattcacaaacacaaaatgacatgacagacacaaatatctatgaatgggggtaaagatgccttcccaatatcttcaagtgtctgctttgtctccaggttttgcaaactcaatatttgagtccacaaatatgcacaaaatttttttcactgaaataatacggtgtcttgtgagtagttttattttggagtttttggctaaattgtttttgaaggattattgaattatcttttatatagatctttaatatagtatgatgtagttctggtagttttatgaattctggaaaataatgggtgcttggagacaatagtagaatttactgaatatatgaggtaggcatatatgattgattttggagggcattgtttttatcttcattgtgattgcaatagcaacataaacatgttgtaagtagataggcaaataagaaaatgtaaatattgataatttttaacttataatcaatataaactttggtttatattcacagacatagacaatgtttttatattaaaaagtttaaaattttaattgcaaatatttcaaatataagaaaactatcagaaataatatgacagacatccatgtatccaccacacagatggccatctattcattaattcatttattcattcaacaaatatttattgggaactactaagctagatgttgttctaggcacctgcagattcagcagtaagcaaaatagatcataataaattcaatccatatgtaaaagatggtggttgctgatgattgctatagaaaaaagaagagcagagaaaatgctagggaatgtgggaggatgggcatgaaatttttaagaaggtgcttgggaggtctcactaagcagataacttctgagacttgaaggaattgagggagtaaaccatgcagatacctggggaaagaatgttcacagcagaggacacagcaagtgcaaatgcctggaggtgggaatgcatctgatgtcgtgagtctctctgttatctctctgtctgcttcattaatttctatccttggtctaatggttttctttcttctactgatttgtggcttactctgttgctgagttttcttcttactttctttctaatttatgccttgcaaactataaatttccctccaaatgcctttttagctgaacatcacaacctttgaaagagggtatattcactgtggtccatttctaaatattttataatgtctacaattttatttctactcagtaattatttgaagtggttactttagatttcttaagtgtgacaagtggaaaggagattgcggtcttttattattgatttccaaatttaatgcattgtattaagggaatgctgcttatgtaaaatgattcctagatatctttgaggtttgctttgtagcttgtcactaatttttattttaaaaaatccatgtagaaatgaacatattttctgtaattgttggaaacagtgattatatgtagtcatcagagcaaacttgttaactgtgttgtcaaaattgtccatttgcttacactgggaatagtctattcccttacttatttgccttctgggtcaatgactgtaataggtaaattaaaatttcctgctatgtttatagatttgtaaatttctccttgtaattctgtcaatttttgctttgtatactttgaagtttgcctggtagataaatgtaaattcagagggataatcttcctggtaattgttacttttatttctgctaagaagtctattccatttattaaaatattaataatattctaatattaaaagcttctattccagttctcttttggttacagttttcctgatagatcttttttatcctcttactttcaacatttctgtgagtgcatattcttggtgtgtctttttaaaacaatatataactgaatttagtttttaatgcaatcactttcttttaactgtcaagctaaatccatatatgtattaagaattatttatttattcacatctaactttgttttgctattcatcctttttttgttacttctttgcttttttctgctttcaactagatggattgaggttttaaatatattttctcttattggtttagagattagacatttcattttttgtggtttcagcagatacactcacatttttagcattttatactagaataaaaatataaataaatttatgtgtatttaatatccctatcataccctagaaaaatataagaaacttactgaaatcatcttaaatgagatcatgtccatccctagaactgttattgttatatatatctgagctctactttgttttgaaaccctgaactattatctttttaaatttttatagcaaatgcttatctaaatttcctcatgtgtttcccaatattgctcaacattccttcatgaattcatttttacttttcaggttcacattcaatcttgaagggtatgtaagtggtaaatattttcagtgtttagactaaaacgtatccttatttaacctttgttcttgaatgataatttaacaggatctagaattctctaggttttcgttattttttctgagcactttgaggacaatattcacttgccatttggtctctattgttgccaacaaaaattcttttgtgaggctaattggtgtgactttgtggtcatctgttatttctggttgcttttaaggttttctctctgtggtggttcaggtcttctgcaaaggacacaccaagacaaaattagaaacaagagatttggggaggaaagtggctgtgaaggacagagcagaacgggaaaggaatagatagagacagccttcagacctcagggcaggtgtgacccgataaaaggggagggagaagaaaggaatatggggtaggaaaaggctcaagtagcagtgcagccaggctcctggggacctgctaagtagaaatggctgtgagaagagtttggcattagcaggaaggcctcagctgtagtaccccaccatgcctagcacagaagtggagcagtctggggagagagtggcctccgcacacacctgtggatctgaggctgtcggctgtcagctaactgcacgcctggtagcagctcccctttaagaggagagctgagggccaccacacttgtctttcatgttctacagcttcactaaagtgtctagatttacttttatttttcctaccttataatcttgcatttcttctcctacatttcatatatttcatcataagctggtgaaatttcagccatgctttcttggaaaatggcatctcctaccttttctcactttcttgaacttatatagtcgatagatatgttcaatatcctcattccaggctgggcgtggtggctgaagcctgtaatcccagcactttgggaggctgaggcaggtgaatcacgaggtcaggagttcaagaccagcctggccaacatggtgagacccccgtctctactaaaaatacaaaaaattagctggtcatggtggtgggcacctgtaatcccacctactcaggaggctgaggcaggagaattgcttgaacctgggaggcggaggttgcagtgagctgagattgcgccactgcgctccagcctgggtgacagtgagagactctgtgtcaaaaaaaaaaaaaattcccatccatcattatttctaaaccaccctttcatatttgccatatatttatttcactatacttcattgtgaaaatgtccttagatttctcttccagttcagtattttattgaactgggtctaaaatacttttgcttcatatttgcgttttcatctttaattaccatatatctcatttctagaagatacatttgttctttaaaaaaaaatctaccgaattctatttcagtgtccattctttctctataattttgatcttttcctttatctccagtaatctgcaacctgcttgttttgtggattccttgacattgttccattaacttgtgttctgaaacttctgtctgctgactccttcttgatggatttcctttcttttttattttttatttttattatttacttctttttcatgtcatgttttgggattgcttccaaatagtttcccagaaattttgccattctagaaccagtttacacattcctttttttttttttttttcaccttagatatcctgtaccattcagatgtcagtttcagatttgggctttcaattttttatgtgggttgctatttgtttcctttttcccatcctgggatgacagaaagaaattggcttgtcacttccctggaatgatgaccttttatttctcctttccctgaggggcagcccagggtcatgctaatgcaaagctctaggttccagttccttcactttggcttctaattggacaataaaaccctaaccctataccagaggtctcagaagtcattaatatctttcttagatttggttcgctcagaagcagatcctgagactcaagggcattccatattctttgggaagtacacagacctccaggaaaacaaaacaaaacaaaaaaaaaaaaaaagggaggggcagggagacaaaggaaatcaatagactgtttttaagccagcaacgtcagtggatgattaaagtgggaaacgggaaagagtgtaaaacacgtgcttcagaattaagccacccagagggctgaaggagctcgtatatttatacaccctatctggggagtcattggttgagggttactagagcagaagcaggagatagtctttgacatctccaacgtgccacatgcaattagagcaggtttccagagttctggggaaaggaagccctaatttatagagaaggaaatcctggcagttccaagtcaaagggaataccctaaaaggcccaaggggtatggacagagaactttcatcatctgccgcaatatcctgttagttgccacgtttctctcatgaccataacactgaatttaagttacttctttgctatggttcttagaaattttattttctttgatatttgtttaataaatcatttacatttttattacatattttatcagtctttttttttaaaatagtgtgtttatagtgggaaagaggtctgcttacgtcagtgctcatgttgttagaaccaaactttcaaaatattttaatgtacactttaactttataaaataatactaaatatgccatcacaacttgccttaatattcaaaataactttgacaacttttccataaccataaatgtaggtccactttactttgtaaaatgtatttctccaaattaatatagatatttgtctacagatgtcgcwattacaaagaatgcaataaacattattttacctattctttcatacktatgcttgtatatctttggtataaattcctagtactagatggcagggatcaaaacttttagcacatttaaactttaactgatatttgtgaaatctgcctaaattgcttttagcattctttattctcacccacagcttgggagggtatcttcttttctatccttaccaaaaatctataaacatcagtcatttgattctttgatgatgtgatgagtcaatagtgatagatcacttaatttgttttatcttaattattagagaaggcaaaacattttatatattcctgacaattgatattcacatgtacgtatttttatgggcctgccccctttttttatttgatttgtaacagctttatattatgaacactagccctttgtcatatatcttgagtatattttttgaagtttatatttcattttttgaatttgtttattgtgactttttacccatgtaaaattttatgaaaccaatttcatccatttttgacttcatggtttctcatttttcaaatcacacatttaaaaagccttctataattattaattataaaaagattttatgcagttattggacgcctcccatgaattggatataccatggcatgaggggaaagggacagagatgaataagaagccttttattgcttcaaagagtatcatattaaatataaaatatttttttctctagaaggaatgaagtaaatagaccttttcccctctacaaacaaacaagggaacagataacaagtctctaaacttgtgtatcttttttaaaagaaaaactccaaccagtcaaaacatcaacaaatatagtaaataataatattcagaactgatcagcgagaaagccaggcctagaactcaaggtctgtttatatactgatactgtaagactggcaaaaacagtgccacttcattagccaaggcatactctgcaggacctacaaaaagtggttttttttttcttaagagtacttttaaaaatatttaaccaatactcgtctcagtagcatttgtagacaactgtaatgaccataatttgctaaatgttgatgcaagaaaaatactttttaaagacataatccctgtccttaaggaaatacagttggagaggcaaactatatatgaatgaaacagcctaagaatgatatgaagaccagacaaaacaatgtgggatagatcttgtgcttatggtcagagcttaggaaaagggtcctcagtgcccctgtggcaatcaacaagtattcatactaactccatgtagaacttcctcaagttgtaatcttatagattgtattgatgcttgctgatacaaagaactcttagacattgggaatgatataaatctaaataaaattatgtatgtacataattatgcaaaactataaatatctacccccaaattaaataaggacaacccccaagtcttgatgttttaaatgttaatgtagtagagcagaaaagtgagcaagccatgaaggcagatgctctggaaaaatcactcttgttttcatacgcatcgtaaaacatcaccccacaaaccacatcctgacattgctgacattcacccctcctatacatgctcagcctgagcctgtttggcttgagttgcctgacagtaaaacaggattcagagggaagatgaaagggagaaagcagtggactacagataatccactaaacagaaaatcaactcagggaagtctccgcttggggccatgtactttgggaacaggaatgttggtgtataacttgaggtctcatgagtttattcatccaacaaacacttatgaaataccgactacaagccaaacatcatatgtttagatgggtggagtcaagaggcactttttaagcagttagggaaggaaaatctcaggcaagggtacggtaagttgtatgtgtagaactaaggaaaacatcacagacatagtctgatggctgggaggaggcctcagattggcagtagaaaaactgaaagtaaaacaggattgaaagcaacgcttgaaagcaacaccatgaatataaagaagtaaatttgtcttcattcccctgtcctgggacttaagaaaaagagaatttggagctgatcttccactgggccctgaagttgagagaggcagaggaagttaaagccaagattgctatgcaaaagaaatctttcagcaaaggggatttcaaagtactgacctgaataatttccatttggggctgctgaagagaagcagttgtgttcacggggtgaagcaaggaggaaatgggaagttgtctggatgctttctttgcaatcaagataatactagagctcagtaagtgaggaaagaaaattataagtttgctaatagttctaatcccagagatgctgaagagaaaactctttttcttttctaggcaagagtcatctcagggtaaatctcagaccaggtatgaagttcgcacatttctctcagtcagtgtatttcagagcctgggaaatacagagaccccatggggagggtaggcaccatttgcttttattgcatttaagttttttggaacatgcaagtgccctatgctgttgtatgaggctacatgggagcatatctttgagactcagaaactgttggaatcacaatgatgtataaagaaacagtaaggggccaggcacggtggctcacagctgtaatcccatcactttgggaggctgaagtgggcggatcacaaggtcaagagatcgagaccatcctggccaacatggcaaaatcccgtctctactaaaaatacaaaaaaaaaaaaaaaaaatagctgggtgtggtggtgcatgcctgtagtcccagctactcaggaggctgaggcaggagaatcacttgaacctgggaggcagacgttgcaatgagctgagatcgtgccactgcactccagcctggtgacagagcaagactctgtctcaaaaaaaaagaaatagtaaggtcagtgttggagtctgcatgctaataggcaggtcccgcaatatattttttaataacaaacacctactgcaatgacctgttaatgtagagcagctgtaagcctgaagacttaagggaatagaagctaataaacccaggccaaagtgtactgtagataaggcaacttgtacagacatcagaattgaatccatttgaagtcactaacatctctctagattatttcctctctttctctacattacatgggattttattttagaagaactcaaaatactctagaagaaggcagttgaggttactgcattgtataactgaaataactgtacaattatatttgttacacattatttaaaaaaaaacagacttgaaaatgtgttggaaacaaacttgagaaatacctgtctacctcaacctcttccatcttcccacatgcgtgtttaatttgtagactgggttgaggtgtagtctttatttagtagaggtgaaattcttttgccatatttttcataatatgttttggcaccattcttcaatttagatttaaatttgcaagaagttattaggcttgggatgagaaggaaggctggcaggagcagctggcctgatttatctaagggaattactcaaagcctgttaggtataaaatttgtggtgaattttcctattggatatccacagcccaccaaattctcatttattaccatgtggtgtgacccccgctgagaacaaagacttcgattaaattattttctgtttccctgagttactgacagcgctaaaatatactatgaacctcatgtaaaaaaataaaaaagtcttcaactaagtaaaaattatttccaactttctctccctctgtgtttttcctgcttcctggctctcccctttgttgtttcccttcaatatcaaatcatattccacactgtttttctcagtttgaacattctcactttctccctttccattcatcaatctttctgccaccttccccttaagtatttcctcaatttaaaccttattcaataaatacatacacttcacagactgaacagatggattacaggactttttcccttgagatttccatgtatagcaattttcacttctcaaagaaaataaaggtgatgatgatagtgtctatgcagttttttaaagtaatttttgtgctgtgtgagctctgcaacttcagaaggcaggctccttaccacacttgacttgtaatttctattttgttaactatatctgttatgctgagaataacagattgtcttcccctatttgaacactttcaatgaccagtggagacctgaatatttcactagatggccggtagttttatggttcccattattataaagttttctattacaaagagctgaaatccatttctgtttttcaccattggtacaaaagagaacaaatataatctcttttttcataaggtagacattgaaacatcaaaacacaaatctcctctttttcagactacatatcctcaattactccaggcattcttcaggtatcagggtgtccaggtgccttgagttcatggtttctttttactaatacactccatttggtcaagttttctctttaaatcttgtcactgatcttgaggaatggcttagtcatacacaatttatgtccaccactaaagtactaatgtgtattctatatatggaaaatccccctaaagcctgttaaacatgcggctcaattggacatacactaggtgtcctaacagctctgtttaacaaggtgacactgagccctcatgagaaggccttcaagcctgcccagctcacatttgcttatgttttctgctgcttaaataataacagttcagcaaagttaagtgaggactgtctctcaatgtctaatatttattaacgagctatgttaattctcctaggccatcaagtcctaggaaaagaaagtaaatttctatgaaaagtaatttctaagtgtgtctgcaaaatccgatgatgtttattgcttaaaatatgagtctgcaatagacggtgctttagtcaacaagacaattacagtaaataaatgttgtcaatgagatcaacaagaaacctgctttattcaaagaactttcatcaagtgctcacatgtggctggcactgaactaggctgtgtcctctgtctttggtctacactctttgggctttcaatttgggtcaaaataaagagagacctcatatttccaggtcactgaatgtcctgcactgacatctaaagcatttgtttcagggcctcccttaccatgccgaagctctttcctgctggggtgcctcactctgatgtactcagatcaccagtgaaaggagctggcttctattaattatcaggttctgcccagccttgctgggttaaatggacatgactaaatttgcatggttgatttccccatcggcaaagtcatctgggtttcagctttgttttgcgtttggtaggaaggactcatttaatacactgaatatgactatattttataaatgtttcatgtaaaataatctctgaagcttagtatgtataaataaattcctgccatttgaattatagcagctcatatcccacacatctgcagagtttgcttgccagtactgtccatgtgggataaataaatatcgctatatatttaatgggtctatgttagcttcatattttgcttaaataatgggtgaaattaaatattccaaattcatttttttaaaagtagattctactagtaaccacttagtgtgtattgacttgtcagaattttcagaatttaaagcatgctccagtggcgcaatcagctagtgtgcagtacttggtatcacaatgtgcaaggtatgtaggttctttcttctagtcatcacatatgatcattacaattctattttgtgctcttttcaaccagtctttccggcagaattttcagaattttcctgattcgatatcacagaagtcctttctatggctttttgacttcatgtccttgaaatctctatcctggtcccagtactttcttaaggtcactagcatcctgtacaccaaatcccataacacttgctggtcttattctctattgactatggcatttaatagcattgacagtcagtagtatttatagaactctcttctcttgttcttggggacacctatatttctaattttattgattagtcaatagatatttattgaacactgggattgtatcatgtgtatctttcttcttgtctccttccactgctcttttcgtgatccctgaactcaaatccagtctttgtctttcactgtttttctcgaagctgtctgcctatgagtcaaattagtaaaattacaggaattttgagttagaagggactatagtgaccagttaacttagttagcattctacagatgaggatattacacccattaaattaaacgtctgctctaagatctcacagcatgtcagcggcagagcccacatcaactcatggaaaagccagggggatttccatgccgtcacttaacttgtgtagaacctgattcagggtcttctgaagccctgatccaaccctccactctcctggttttctagttctgccatcatatttctattcttctctatttcagagtctagattttagtaatatttgatatctctcaatttctcacttccccctactcttagagccaaatattcatgatgtttcataaagcctgttatcatgatgcctcataaagcctgtcatcatgatgccttgaaaatgtggggagggttttgttgtttgtttgtttgttttttgttgttgcttgtttgttgtttttttttttttttatctcactgccactaccgtggcccagggctgcatctgcataatggtgtgcacctttccagtgatctctcgggcatcatcagtccattctacactcaaatgtttgaaataccactcttcccacatcaacatgtcagaaaaccagtgctgatctccatttataaacagttctctttaaatctttgtaaatgttcagaaaaataagagagtcctttggagaagcaatgtctattgcaaatgaaaaatacacacattctgctattaagtgtaaccccattccaagaaattaagctttgaagaagaggaaaacaaacaaacaagcaaaagtaaagaggttactgaaagaaaagaactagctagctgctggaaagactggttgaaaagagcacaaaatagaattgtaatgatcatatgtgatgactagaagaaagaacctacataccttgcacattgtgatagcaagcaatgctgagaaaacatgtgagatggaaaagcaaagctgagtccaatcagttgtttctcataactgttaagacaagatgctctggcggactcctgttaattcacaggcatgcaggcacattttgatcatgtgtaaaaacttagtctataatagwggatccttactgctgtggagatttctgtcagctttgagcaaaacgtacaacttgactcaatttagtttgctgctagtttcttgcctaacctaatatcaacccccgtcacattttctgaaacatacaatggccttgcttcaatcaggacagtaaacagcagtagtcaaatggcagctgactgaagagtgaaaaatactaagataccgttgagtgcttttaaggacaccataaggtgtccttatattgtagttgtaatgaaacttttcctgagtgtagggttgtgaatcaatagcacctttatcatgcaggtgtgcaagaagccaaggacctctgcaggatgataacaacatgttacagcaatatttccttccctttatcatctttttcctaccttttttcccttaagraatatttgcaaatttttttatttcagtagttttttgggtataagtggtttttggttacatggataagttctttagtagtgatttctaagattttagtgcacctgtcacctgagcagcatacactgtactcaatatatagtcttttatccctcactcccctctcaacctaccctctgagtccccaaagttcaaacatcacacttatgtctttgtgtcctcatagcttagctcgcacttataagtgagattatatgatatttgcttttccattcctgagctacttcacttagaatagtggcctccagttccatccaagttgctgcagaagacattatttcatcctttatggcctagtagtattccatagtgtatatataytacattttctttatccactcattggttgatgggtacttaggttggttccatatgtttgcaattgcaaattgtgctgctgtaaacatgctcgtgcatgtgtcttttttgtataatgacttcttttcctttgggtagatacccagtagtgggatcgttggattgaatggtagttctactttgagttctttaaggatcctccctattgttttccatagtggttgtactaatttacattcccaccagcagtataaaagtgttcccttttcaccacatcacaccaacatctgttgttttttgtctttttaataatagtcttcttgcaggagtaaggtggtatctcattgtggttttcatttgcatttccctgatgatcagtgatgatgagcattttttcatatgtttgttggctgttcgtaaatctgttgagaaatgcctattcatgtcctttgcccactttttgatgggattatttgtttttcttcttgctgatttgtttgagttcctgtggcttctggatactagtcctttgttgaatccatagttaatatttgcaaagatttgctgagcatttatactgtgcaagaccttttgttagaggctggagatataacaatgagtcttgctttcagtactttataattgctctgcagattaactgtacagacttaaaataattttccctaacctgtaaccctaccagaaaaataattaagagaatatgaaaggatctgcttaaatcagaaaagtgaacgtatcagttagactaagtaatgatggtgaacccaatattgacaaagatactaaatatacacttaagtttgatatttatttaaatgttgtgtactgtattctgctttcaaaattattaagcaaagatttgtccttagtagttacccagtatttacagagaatatattaattaggggctttattttattgaaaaggcttaattggctatgcaaatctacaccctctcaattatctacatttggagcaagtttacttagttggtctaaataagcataatttgtggcagttaccttggtgttgtcaaatctaaacctttaaacaaaaaataaatctcatgtgaccttttctgaatgaattctcattgtttctagcagccacctcaatctttcagcccaatgtttagattcccctgtaatccaatcatgatttaccttttgacagtttactccctactactccccaattctttgttctactgcgcttactatttccctggacatatatttgtgattatttacatcatctttcatcttgctatgtcatctcttaattctctccaactatagtactattggcatttaacaaattcttactacctgtgaactactgcattgagtgcttttgcctatattatcccacgtaattgctatgatacctctatgacctcagtgagtttcgttttaaagacttttataaactgaggcttacagacactgagtaacctctttacaagaagaggactacttagtaaaaaagaggactaagtaacctgctcaaggtcacacaattagtgtgaccttcagttagttattgaacccagatctaacggcaaatctaggtacctaaccattatgttctgctgcttccaaggacttagagctatgctactggataattatctttgggacctcagataaagtaactgacatttctgagctccaataaagctgaaatacacacgtgtgtgtgtgtgtgcatgtataacaccttaaataggtgtgcatgtataacaccttagaataggttcttgttattttatttatacttattataggtataaaatataggtataaaataaacatcactgttctggactatttagaaatatagatccaagaagaacaactaatgtcgacagtaggtgtactagtttaaaaaataaatattataaaaaataagtagtataaaaaataaatattataggtataaaataaacatcactgttctggactatttagaaatatagatccaagaagaacaactaatgtcaacagtaggtgtagtagttttggttttctgtgtttataaatattttttctaattatataattctggtgtccagaagataaatgtgattaatataatctaccacaagcacatgcccttaaggaaaacaagcagaaataaaacaataagaaatactataaatacatctaaagttgtgtgatttctataagttacaagtgaattttactaaatatctagtctagatgattttcccagtgattcatccctaacttcagttttgagcagaaattcagttctaaagtttgcctaataatataaatggaatcttttactcagcaggttgatcttccaggggtcatgcccagttaatagattcttgaggacatctttaaattctcttaaattctaaaggaatcctgaggtttgaatacaatgacccaccaacagataccccaggcctatgttagagtataggtctaatgtgactcaggctctcactgaaccaccttcaacctgacctgggaagaccctggctctctagatccaccatgtccagctgtctccagctgaacaatttttttttttttgacagagtcttactccgtcacccaggcttctgacctcaagtgatccgcctgccttggcctcccaaagtgctgggattacaggtgtgagccaccgcacccgaatggtgctaccaattttttttttttttttttttttgagatggagtctcactctgtcatccaggagtgcaatgacgcaatctcggctcactgtaacctccacctcctgggttcaagtgattctcctgcctcagcctcctgagtagttgggattacaggcgcccaccaccaggcccagctaatttttgtatttttagtagagacggggttttgccttgttggtcaggctggtctcgaactcctgacctcaggttatccgcccacctcagcctcccaaagtgctgggattacaaacgtgagccaccgcacccagacggtgctaccatttttttttttttttttttttttgagatggagtctcactctgtcacccgggagtgcaaatgacgcgatctcagctcactgcaacctctgcctcctgggttcaagcgattctcctgcctcagactcctgagtagttgggattacaggcacccaccaccacgcccagctaatttttgtatttttagtagagacggggtttcaccatgttgatcaggctggtctcgaactcctgacctcaggttatccgcccacctcagcctcccaaagtactgggattacaggcatgagccaccacacccagatggtgctactttttatatcagtctcagtgtgtgaattgggcagggacatgagtgtaccaattgtttgatgtatataattattttctacttcgtatgatacatgattcacaataatttacaaactgataaaacaataacattttaaaaaatgaatttccattattagagatttctgaagaaacataatgttgggatatggtggacaagcgaagaatttccttacaaaattattctttactctctgattgttttaacaccgtaagtttatcagacaggttctagatatttcctatggtacttagagccacatgcagattgtttgtgcgttcaaactggtcaaagttgcggaccagagtgctgctattgatttgtttcactccggtgaatgtaaatcattcatgtttggcagcatttgtcctactggagataaaacataaggaatatgtgcacagcttcaaaggtgcagcttgactgtgatggtaacccagcacgcagtgggtatgactggcatttttgagaatacatcataaactctccaaggagtctgcaccatcttccctgagatcattatatatccaccaaaatgaggagaaggagaagaatgtggcaagagatcaaaagaggcagtcactataaactcacctattttgttgatgcaaggcaagttgcactaagtttaggaaagcaaaaagatactcttcgaggtccggggaggaaatgcagaaactgctaatgggaaaacgagcatggtccatataggactctgatattagagttgttttttttctaccgaggctgctctacccatgagtatccccatcttcaagaaactactaaaagttgaagtgtttattcacgtgttattttcgaacagttaactgtataaaagaaaggcatattttcttttcctgcatccataagccatgtgccaaaaaagctcttgtttaacatgcttcttaggattaaaagggtttctgctgcaaacaggtctgaattacatacgcatcttaaacatgcctcagctttaaagggacacattcttcaagtgaggctgcatttacaggcgcaatagatttttccctcggcataagccaaagagcagagacatactttaatatttctgacaagatctgaactataatattgttctgtttggaaaattaggcttcaaagcagaagccatacatttattttcaagatgagaacccaaagagtaacaaaaatgattagaaaaagaatctgaaagagtgagactcattaaaatgaaaatctttgtgttgatgactgcatataaaatcatagatcattagggctaaaggaagaatgtatttgccagatgttgaaatggcaagatagtttcatctctccctaccatctgttaagaattccatccacaggtctcattaataatccttgggaaaacaaggcaaccttcaggagcattgggaaaattatggatgcattataatgaagtcagagcaaaactgaggtgagaaattcaaacaccttctaaacgcggagctcctaaccagtggtccacgccagaatcatctgaacacagtgtttcaaaatgtgcattctcaggctccactgccagccattttcattcatttgggtgtggaatgaaacctaggcatatgaattttgaaaaagccttccaagtgattttgatgataattctggttaagaagagaaagcatgttctaccttgtcattatgtatctactacctttccagtagattgcaaactcttttgaaaggattctgtcatatttaccttgtgtcctctgctgtctgtagcatagctggactgtaagcttgaggaaggaagagagcatgctagttttgtttattatcataattactcctgcccacccctcccactccagtccacagctagaagagcacatggtctatagttggtacccaagaaattgaattaaaaaaatgaatactaggaatttaattatatccatatggatttgaattgattttcctcttttctgatattattgtttactatgtacccagtgagttctcaaatgcttattgagtgaacacactgaattttggaagttaaatatgagtcactttcaggggcttttgagtggtatttgtagaaataagtctcatgactttatattcctgccctctttctttgggcttctatgaaatatatctttggcttatcctagacttgctgagagcagcttaattatatcggctttcagaaacgtgagaatcaactaatccagactaacaaaacaagcagatacagttgatcctgtgacttcaagtaccttcccaagtggcattrttaataaatcttgactcacagtactagcataatgcattatttttatagctaatgcatcaaaaagttatttgatccatatgaccatatgatttctaaggtcctataatctgagttctattctgaggagatatttcctatactttctagtgaagcatatgaaaggaaatgaagcagttctagtcattaaataattacttccatcagtacatacatagtatcgggtaataggaatatattataatagctcacctcttctatattattcaaataccatttgctgataactggaaataagaaagaatgctaaaattgattgacatctaacatgagttgttacttattatgggtcagcatcgaagctcatatatagaagagacgatttgaaatgttcagctagccatcttcataggaattacaataagttgaatatttctcagtatctttagtaaagatgcctatgccttatttacagtgtatttgcaatggaccaagctgaagctgtataaatgagacatatgctttgtttccatgttcactgttgaacttatgctccagaaagtcttccttattctcttctacccataatcttgcctctttttgaatccacatggcattgattttagagctcatttgtgcacttttcttgttstgtcttcttttagatttctaccaaattgtaaatacctatagggataggagcctcttttttttaattatactttaagttctagggtacatgtgcacaacgtgcaggtttgttacatatgtatacatgtgccatgttggtgtgctgcacccattaactcgtcatttaacattaggtatatttcctaatgctgtccctcccccctccccccaccccacaacaggccccagtgtgtgatgttccccttcctgtgtccatgtgttctcattgttcgattcccacctatgaatgagaacatgcggtgtttgttttttgttccttgagatagtttgctgagaatgatggtttccagcttcatccatgtccctacaaaggacatgaactcatcattttttatggctgcatagtattccatggtgtatatgtgccacattttcttaatccagtctatcattgttggacacttgggttggttccaagtctttgctattgtgaatagcaggtgctggagaggatgtggagaaataggaacacttttacactgttggtgggactgtaaactagttcaaccattgtggaagtcagtgtggtgattcctcagggatctagaactagaaataccatttgacccagccatcccattactgggtatatacccaaaggactataaatcatgctgctataaaggagcctttcttaatcatcctgtgtctcctgctatgataagcacatagcaggtatctaattgtagactctctgaattgataatcacttatatagaaattaataatgacaatatcttcttaatcccaagaataattacaccatcgtcattgaagtgaaaagagaacatttaatttcaagttttgaagtcttttaaaaatagatattataagctgatttaaagtagatcttttaacctgtcaccaaaagcatttattccagttaaaaacttgatccgtttatatattcatgcataatttatattccacccacttccaaaaattaattgaataggccactaaggtgataggtgatgccagttaaggaaattactaaaatatcagtaacaaaacctaccataaaagttttattcccaaaatcatcttggtatttttaaatgtttctaggttaaaatgttaaccacatctatatgctttatttctgtaccaaatagagtttgggaaggcttatttattagacgttttaaactagttcctagtttattatgtgattctatctcaaacatagcattttatattatttttcttttaattgacactgttttgtaaatgttaagaactatagagtgaatttaaatrtatatttaaaaacctacgtgaaagatactttaactcccgccttcaagtgaattcaaataaggagaattccaaggagtggggaaattagccaaacacttttccgtctcaggaaagccataataacaagaattataacctgttcctatttttcttaataggtgatttggggtaaggactccaaggaaacaagagcgttctgttctaagasagaaacatgaggcaaatggagacaaaaggagagaggagaccccaaggacaatagcctcccacattctctccatccaaggcacacatgccaaattgcattattccaatgagctctgcacaattaacctgtccaaaggggttgcgtggctgatgtttaactttccacccagctacgttgaaatgtacagtacatcttgaacatgttatttaaattgaaaatgaaacatctggacacatcagtacgagacgggtcccactaaatatgggaacatgtttacccaggtgggttcaatcataatttctactccgtgaaataaaatttcaatctcgcctgcaaaaactaaaaattaattttagagttttctttaaggaaatttttctcacagaaagaatcatatttcaattttaaatattggataatttgatcaaatgcctttatattaaatgtgctaaaaagggtttaagataggattacaattagaatttattaataataaatttctataaatagagttatatataagcagtcaaatcagagaaggcaggcaaatcctgtttgtccaataaagataatcatgtgatgaaataaaaaaaaaaggagttagatacaacttttttgagatgtacattgcccattggcttttagaaggcacatgtaacaaaagaactttgtcattcataaagaaatccataagtaattgggcatccacgaataatgatagtgagcggcaaaagttaaggacttcattttcaaagtcaatgttgtttatcaaggcctggaaaataaacccctgtttatttctaacacgccaaatgaaatcactgccaagtgtgagatactgtgataacctggaacggggagagaaagatctgcttgtagactggaaagagacctggtgccctgacctctctctgatagctgccaacattgccgggtctacgagtaattcagtaaactagtacgctccttctcaacatccccaccaaaaaagtcctttttccaatgtaagttcagtgctggtcggcctgtaggagtttcagcaaagatgagaattaaatgtgcttgcaggcaaaaacatttcagaaatattggctaaaaagtagactcattgcaacctgggaatagaaataaggtctcatgaaaacacttaaaaggaccaagcagagctttctacttgtaaataaaggcttctgttgtgtagtacagacagggcttgccaagcctttagcttgagtgttcttggaggggcaaagggaaaaaaggcagaaagggaaaagaatacaaggaggatttgggcaataaaagagacagccttgtatttgtacttcctcctccaccaccactgattccatcacactccctagctcaccctaggctctcctgaaatctgccccaagggttccttcttctttagttgtaccaatcttcgtattttctgtgaatggtgtcttgagaatgcctcacaattttctatacatccttctctgcatttggtatattttgtgtgactagctgcaaactcaatgctatttacaagaagtttaactgtcaaacacatagaggacaattctggagaggttgagcctagaacatgccaaacaacaggtatatgaaaaagcggggagagaacagcctattctccttgtgctgatgaactcaatctagtgaaaagcacaagtagcaaggtggattagggctggaggtagagctaacatgtatgagccttggttcctatgaacttgttcatacacgaacaggttgaggactgggtctctgccagaaaagaaaagaacctcccttggttcctaagataactactccaacccatagttgcctaggattggcctgatcaatgccttcctaagcactctgtaacacctcataactttagcactaacacccacggccttgatctatttttctgcacccgttcctatctgaccaggctaatctgcttcaaaactttgctaccatttattgggtagccactgtatgcctgctcatgtgttaggtgttttacatatatttgctgtgatccttgcaacttatattgttgcaactgtaaagtgtatgttactgtccccattttacagatgaaaaaaaggagacgcagagaggttaaaaaaattagcctaagcatgcaaaaaatgatggtatagctgagaatcaaaccaaatcagtctggctcccaagtcaatgttcaacgcaccaaaccttagactacccaacagatcttcagtatgctttccaaagccttccacgattccactgctccttccttccagctccttccttccagctccatctctgaccctccttgtggaggcaatagttaaatacttgttgtccaccatcccccatctcttcagtgtgtttatttatgctctttcctctgsctgaaataccactctccaatcaagcttagcayctcctcctctttccagatgtggtttcctcaagaaagactctctgatacctctctcatacacaagcaccctaagccatcttcatcagatcactttcagtagtccactgccacaatgatcaactttaggtgtgttcccacctacacagtagccttccaaggtaagaaacctgtctttgttaactttcacatctccaaaaccaggcacaatgcttggcataagcacaaactctgagggtgcttgttgaatggaattcatctgaaacttcagaagtgccttcccattgtgtcagggtgtgtgtgtgtgtgtgtgtgtgggtatgtgtgtaggcggaggaaggagggacagtgtgtgtttaatcttctcaactaactttcacatttttttgagagtagggtcaatgtcttctactttcattagtgtgcttgtctttcaaagctccttgcctactgcagacagcagagtgaatggccctattttcatgtcatgttaaagacacccatgaaggtgaactgaactatacagaagagaaaggtagccagggagctgataacaacagagaaaaatgagaatttactcagcaggtggatctcaccaacttgcagaaggctttaagattctaacaaaattaaacaatataaggctagacaattaagaataaatattgaatggagacagcctaaaaagaaaagtaggtattaataggcatttgaaatgaaccacttacttcaatttaggcactaaatttagtaatgcttcctgacaaataaaacaaagtcagaagccattcagtaccatgacttaccagtattcgttcacagtggtttaaacatgtaagggctcattcctctcatggggatctaaagccagtggccaccagccctgattcggtagctggatcatgtcagggccagcatctctgcaagtctgttggtcttttccttgagcttcttgcgctgcaagacagctgctgctgttccagacatcacatccaggtttaaggcatgaagaagggaaggaggcttaataaaccatgtctgatccttatattaggaaaagcaaaagcctttatagaccacttctgatgttttactgattcgaactatgtcacatggtcactcatagctggaagagggttttaaaaacatggcttacttgcagctaggcacattgctgcccagatcaaaactggcattttgttcgcaaggaggaagaaagtaatatgtactagattaaaaactacactaattgcagattgtagttttcattgtctgctaaaagacttcatgtaaaccccagaagaaatttattacacactttaataactagttgatgaagtaataaatacatgtttggtcacctaactgaattctttggaaaaaacacaaactttttctttattttttataaaagtacctgtgaaaattttggaaaataaattataaaatataagaaaatagtgacctrtaatcatgtcccccagagacagaatattttgtttgaatgaagaatgcagttatatatgtcattatagaatatttagaaattactcagcacatataattaatatctcataattctaccacccatagaacatagagcaattttggtcattttgaaaagagaaaataacttttcacaaaattttaaattatatactttctttaaaaaatacagacattgaaccaaaattttctataaagcgtaaatagcatggccataaatttgtgtacaaaatttaatctgtctcctatcattggacatctaagttgcatgcattatgaagaaccctagcattaacattattatagataaatttagggacaaattattattctttcctagggaataaatgctagaagtaaaactctagtggcaaatgtattaaaccttttcaagatttttgatacatgttaccaaattacatatgatatggtttggctgtgtccccacccaaatctcaccttgaattgtaataatccccatgtgttgaggggggcgccaggtggagataattgaatcatgggggtggattcccccatgctgttctcatggtagtgaataagtctcctgagatctggtggttttataaatgggagttcccctgcacagttctctctcctgccatcatgtaagatgtgactttgctcctcattcaccttctgccatgattgtgaggcctccccagctatgtggaactgtgagtcaattaaacctctttcctttataaattacccagtctcaggtaagtctttattagcagcatgagaacagactaatacatcatgtcagaagagttctacaaygttcatcttaataataataagacggccatttttcctgaaacctgggtaatgtctatacatatgtatctgtgtgtatttatgtatacttacatgtatcttatccaatggcaaggttatatatgtctatatatagattattatgtatatataatatagatatagatatatatgagatctatatgtaaacttgcagttagataagttaaaaactggcattaaataattttgcttaaattagtttttctgtgattacttgtatgagtaaacatgttctaaagtggcttattaaaaatgtgtgtctttttccatattgcctgtttatatactcgtctgttttccattgagatagttatatttatttgtatgtgtagcttcctatataaatagtaattcttatttatgaaagaagtatacaaatataataatttatttttggatttctaattttgtttatggtagtcttggatttctctaattttaaatatagatctttttggaagcttttaaagaaacacccatgggtagtatattttcaaagtcattgcacatatgataaaatctttctattgtcttcacatatgccatggacggcaactgtctggatatatgattttttgttaacatcctttaatgtcaaaattctagttacttccttatataacttctggaattctgtgttgtatacaattctttgttaacacccttttaaacttcaaattctagttatttctctatctgacctcaagaaattaatgttgtaaacaaactgtctaaagttagtctgacatggttcctttgtagctaacttttcccccgtgtgttctggtttttttaaaaaaacattatcttttaaaaagggaaaacccctgagaggtagtttgttagcatgaagtcttctcttttttattaaaatttaatatctcgggggcacagtgagcatgtttaaccttagcatgtgaatctttttagtgcaaaaaatatttctttagctatgtcttggtcattgctccttaaataggtgtacttctttaggaatactggtaaactttaagtgggttttttatatgttcttttatatctgctatattttacatccttgtcctcaactctttgtcctttttagctacattcctaaagatttcccaatgttttctctaggtctttgatccagttttctatagtattaattctgaccttcattayttccaatgataattcagataagtctattgcacttacagttttctttcaattctaccctattttacccaattcttgcttggttttcatcctgattttttttttccatttctttcacgtctttctgctcctgtgtcatgaaaggcatgtctacttgctgcctatttcaggagccaaatattaaatatcttcttttagccatgacagtaatttattttcctatgtgtccttaggataatttccttattctgtatttttttttcaaaattctcacatataggatagactgacatactcagtatttccaattaacaggatatgtgattggcctcagagctctcacttatttcagtgttgatcgtggcagattctcctagccccctgtccagtgtctaggtagcattcaactggagtagttatgctagattggtgtgatatcttttattctcaatatctggttctttgatccataaatttgaatgctgttggcccttctaaaaattttaccaagtgttttccccaaagagttttgaatgccaccttggacttccacttatagaactgctagaaatgtgaccatcacagacgtttaacgaagaaattaaagtagcaaccgctgctaaggtttttgagctggctggccacagaggggatgaccttctacctataaagaattcttctctttaggaagaagcagaatgaagcaaagcagaaatagaaaaactctacattcatacttgggcttctcctatggatttaaatttacaaactagctaaataataagtaacaatgtatactcaggagcataataaatctaggcattctcctatatgattcatctattcactattgactatagtgtatatgggatcttggtgggggaaattgtaattactcatattttaataaagacagtggtactttattaaaatatttgaatttgaaaatgttttcaatagrcggaaagccacagcccagctcatagcagatgactgaatgagtacagacctttttttgcaagaataaacctgaaaggggtgggagctgagatggaattggggtactctcttcttcctgtctccaagaggtagcctctcagcgattggaagagcacattgagctgagaaagctctaggtggacaagtcaagctccaaattgacccggcagcacaccccagggagcagctgtrtgcagaagcactttatgagtttccaattgtgtccacaatctattcaattccagcgcactatgcttatttactgtacttacagcaattggtagttttactgtacacaaaattcctagttttcatggacagttgcctcagtgcttgagatttatataatgagagagaagtgtgcagacacaatgattattacacatcccgttgtcctgagctgagcaatgaaatagaaagcagaatgcctacattctaatccagccttgggccctgtctgaccttgggagtgttcctgaatctctaagtttcagcttccatatctggttgaacgatatcatctctaaagtcctttcagctgtaacaccctacgattctcttttcaaatagagaggacatccttcctcttaccggacactaagagggtttactttgcaaatgtggctctcagaattttatagttgttcatttgaacgtaaacagaaaatttgtttatgatgttcttctccatactgtagtttgggataagaagggtgcattttttcaatatgttcaactttcaaaaagacatgctggaggaagtcagccaatttctgcccacacaacttccaagtgacgtcaatggaagcagagcacacagatctctaggcaagttttggctcattatgtgaaggttttttttttttttctttttttaaagaacaactgcaaaaatgattgctctcaactcaaattacacaatttgttcttctttgtgccctgagtcagcaatagacataatgtggaaaataaagcaaaatctcctttttacacatcaaataaaagagtccatagttatctgaaacacagaatatttgagattttgagcastctctaagcaatatttcctcttgctgtggcctctgcttaatttcaatatagaaggttgatcaatgatcatcagatggacaactggaaaaatatatctactttttcttattttgatcctagatttgttcttcagtcctgcaattgatcttgtatatcattggcttattgcttaacccttggaagtattttaaaggacttacctgacaagcagatataactggtgttttgttagctcagcttttcacaaataagtcaaatagttctgttacyatgactagaagaagaaaaatagctaatagaaatgtagctgttagtatataatcggcacatcctggctcaattatcacagcaaccctggaaagttgatgttgttattctcctcattctactgattaggaaacaggatgagagaggttaaataattttcacaaagtcacagcactgagtaagtggtatttagattccaaaccaggcagtctggtttcagtatctgtattcctaaccacaatgctatctagataataatttattcttctaatcaaaaagcatttaatgatgcctaattattctaggctctgagtagagtcagttactaggtaatgtggaataatgacatgggaacaaagggcaaagataagggagggaattcagattttctttgcacctaaactggcccaaacactgtactcamcacctcacatctatttcgtctttgcaaaaactgtataagcaaaggttgtatcagtggcattttayggatgaagaaactgaattgtaaggaggttatcacttgctaaagattgcacagctggtaaggcttggtaaaggcttgagttctaacccatctgtgtgtttctaccacctacacttcctgtactccaatatgctgcttccaggagtatgtgcaagtgaaatactcagtttagtgtctgagctagaatgaggggcacacaaagtttctcctaatattggggaagctctaaaarttgtttaggggtaatgtcaaccaaaccaaatttctacatttcagagcttctcctatagtattctactttagtctgcattgcccaaactgtgctggaaggactgccttcaagttcagggccaaagaggtccatgaacaaattgggacataattccaatgaatagcacacacattagaattaaaatagcatcaaaacattaaattcctttttaaagtggtaataaatgagttcagtattttatgtacaaaatcttgtatttttagagaaattaatagaaaacttttgcatgaacttgcatagcttttcatgagcatgtacagaaatgaaaactggcatcctctatagggtgccctagaaggaccattctgtaaacattagaaggtgaaatatatgagaaatctgtaagaaagtacttttcatttttccaaagcaaaatgcaatatagatttagagttgctttatttttcccttttttatttgaatagaatgcttttcctaaaaaatattaccaactaagtaagaggcagtttggatttaaattgttctcctttcagagtttgttcccatcacatcaaatgtcttatttatattcaaataccacagggaatgggcaagaaattgtatgtttaaactggactttttcaaggcttttaaggccagaatatyttctttgccaaagactaaattattgcaaagtggggcaagcacctgaccttgtggcaagtcagaataagtaaatatctccacctggaattggaaaccaatgctcccaagaccccagagcatcatttattagcctgatggcagctttctgcttgttgctggctgagcctgattatacatatgaaaaatgggaatcacccagagattctctcaccctaacacagagcccactttgcttatgtacttgctcttgcaaattccattaccttccacgccaccacaaccccttgaaaacccagaaatacttatagacaacagattaccccagtccatcctttctccatttccaaatgggcattctgattacatttctaaccaactgtcaatcaagggggtctcaataaattctctttccaaccatctcatggtaatagtatgatattaactatattatatcaaacactrtgatgtaaaataactttgacatgtgtagggacatagtcttacttttartcatagcatcgacaaaattttaatgcatttcttaacttgactctccttcatggggatatacagggtctctgaagagatctgtgtatacctgatcagagactggccattcctatccatcctgcatgagtaacacaagatatgactcactgctgttcattaacctcatagagttcatttaccttctgcagaagtaaaattgatttgctctttgtaaagctgggtgacagaacttttaggattcctggaagtcacattcaggggtggttcatgggcatggaatctgtgcagttgcacagggtcccatactcagaaaggctcatgtttggttggtttaacgttttgctgtcaccatcttgaaatcattaataacttctgaacaaggggccttgcatttttattttgcagtagaatctgcaaattatgtggccactactgaccacattatagtatcagtgtagcaaatacagttgattgaaaataaaagaactaaaaaatcaaccaagtgccactaacatatttgagagttttttccaagtaagatgttgcatttagtaaattgacctgagttttattttattttttggtaaaatagtcccgttttttagactgatgtaattctcaatgtgttatgatgcatacatacatgcgtgtgtgtgtgtatgtgtgtgtgtgtgtgtgtgtgtgtgtgtgtgaatacatttttaatggttgataagaaaattgagcaggagggaagtgacaaaagagaaacactaaccagattccaaagtctttttacttagttgtggctaaatgcttaaaacatccaatacggtctcctttcactataatcatcacgttgcctctttcagagaattcacattcctgtcttatttttggattattgtaatttataaaaatattgcagatgtgcaatatgtcactaaagctgagcttgaacatggccgaacatcgtggaagcctagtacctgaatgccttcctaacagtcagccgagcacagcccgtcttgccatgtttctctttctttctctgtgtgggtgcgagggtgtggggagtgggccagcatgacgctaaacgcactacgcaaaagccagcatgaatcccaggcctttttctggacagaaaggactgattgtgtggcgagcagctggaatgcgtgccagtcacttttggagtggtggtcacaggcatcgttttgctggattgtttgaggagaagcaggacagaagggagctctcctgccctgtgctgcggtgaccctgtaattttcctcctcttctttgttcaaattataaagaagagtcccacatgttcggaaaacttcagcccggttttttcaattggacgctgctgtttcaaaagtacaaccttctctttctggttgcttggaagtgacggttcaggaagtgtgcccacaatgacatgagttagggaactccgcagagcaggcctatggtggagactcaggatattttagtcagggtctgtggataaggcccatgttaggacagtaaaaagcttgaaaaagaagcattttagagaacttattgtataaatggttaacgagaaagccagaatgatttgtgatatcttaaagtttattttaaaagtttcagattctttacaaaacaagcaaaatctttacccgttgaactacttatagatctactggctatgattttacaaagttagggaaactgcaagctctccctttgtcctactgtttgatatttagctattatcccatcagtcgaggtctcagtcttctgaacagtcatcattttacaccattcccaaatggatattctgataacagaacttacagctcttgcccacccaatctcacctaccaagaatagagattatagatgattataccatataagaggaagacgctagaaatgtcttccctattttgttatttttgttggattttattcttcaaattaaagtaagagagacttgaagttctggattatatataaattctctgcaagcacttgcttgactaaatggtatgaacgtacttatatagtgtcctgatgtaatgactcatacaaatacttttcatagcagaaacatttacatgtcttcttttgactcaaatgttaatgaggtttgttttttttttttttttttttttttttaatcctctaggcttttcccaggatgtcattgtggaaaggtggttaatgagaaatcgtttgagtctaaatgcatttttacctttcatattatatagttggtagggtaaccaaacttaaccagctaaattgacccctaattgcccacctacctattcttcccagctcatgaaaatctctgaaatgacatggcaaggtcagaggaaagcaactgatgaatgctggtccttggtgaactgcaaactctrttcctacatccaggaaatctctgctgaaatctctgctcagctctcatttggcctcctagctacagctttctgctgctgctttttataaaattcctggagaccctccctgcacatgcaggatttaggagtcagccaacaatttaagaagacttggtagagagattttgacattccttccacctggctcttctttgagactaccttccatttccaactcttctagcagccctaaactctgacctctgtttccttaaaccagtaaaattgtgcctttctacttggattctctcccctggcaccccaaagaattacagagcttagttttcacggatcaggcctcttccagtttctgcttgctttggttgctcagcggtgcttttagtcaattatttgtttatattttgtctagtttctatagttgttatcagaggagaattagtccaatacaagctactctgctatgctcaggcctgcaaatctcaaattactataattaataagagaatattagaaatgtgctggttaaaaattgaatgtacaacattaactgtttctatatgcctagaaaaagtagttagacaatgtaattttaatttacatttacagcttagtacaaggatataaagtacagaataatattcctaaaaatacatgtaatactcttatagataaaattataaaacttattgaataaacagttttgaaaaactttgaagaaaaccttaataaagacagatatatcctgctcttggatagacttgttataaagaagatattcattcctcctatagggaggaaatgggcaaaagattgaaaagacatgtcatatcaaaggaaatagaagatggcccctaaacatttgggaagatgctgtaactgaaaatctcaggaatgcaaaattaagttcttaggagatattatttcatatttaccaaattggcagaaatttgaaagttagataatattttgtggagtattatgaagaaacaagaaggtttgtcaactgcttttttttttttttcttgagacggagttttgctcttgtcgcccaggctgaactgcagtggtgtgatcttggctcactgcaacctacacctcctgggttcaagcaattctcctgcctcaacctcctgagctgctgggattacaggcatgtgccaccacgcccgactaattttgtattttttttttaggagagaccggggtttctccatatcggtcaggctggtctcgtatcccaacctcaggtgatcctcccactttggcctcctaaagagctgggattacaggcgtgagacaccgcacccggcctatcatctgcttttaggagtgtaaattggtccaatttccttagaaactattgtcatcacctattttacaattcagtaagtttactcctagatatttacctaaagaaacatttacatgtatctgtataaaaatatttataagaatatgttaaaaaaaacaaaaatgaaacactggaagcaactgaaatgtctaccaagaggggaaaggataagtacattgtattatattcacacattagagtacaataccacaggcaaaatgaataaaatagagctatatctcaaaatggaggaaacttgaaaatctaagtttgaaagaaggaagcacaagtatccaatttgttcccatttgcaaaaagttcaggcaacatacaataatatgctgcttggggaatacctatgtaggtgggtctagtgagaaagaaaagaaagagaataagataaatttctgaatggtcaaaaaaacaccagcatcaagtagaaaagtctgttatagtatgaacgaaatcacagagaatttaccacaagtttacctggtatctccagtacctagaaatatttgcctttttcaattattataaactaatctatgcatgatcaagataagtggattttgttagttaaagcattaagttatcaaagtgaactttggatcttatgttagttatgacaatatttgagaattcagttatgttccttaacttttaatataaatgactttgtgttttgaattgttgtggggcatgtaaaattgttgttaaattactgtgaaattttaaaaagaaaaaaaaattcggagtggtcatttcctctggatagatgaagaggaatgcgagtgtgtagagaaacagaagggatctcagaggtgtggtgctgtcatatcttctttcgtgccctgaagatgggaacatgggtactctctgatcattctttaaattgtgcattaatagttatatattcttcctataatcccagcactatgggaggccgaggtggacgtatcacttgaggccaagagtttgagaccagcctggccaatgtggcgaaactccaaaactacaaaaattagctgggagtggtggtgtgcgcctataatcccagcttctccagaggctgaggcacgagaattgcttgaactgggaatgtggaggttgcagtgagccgagatcatgccactgcactccagcctgggccacagaatgagaccctgtctccacaaataaataaataataaataaataaataaatattctctttgtatgatagttcataataatcatatatgttatttttatatttttaattttattttatatttcaccaagtagaatttttaactgctttctggagttgctgcgggaagatcaaagtgtctacgcaaaagtggcctggtgatagggtggggcccagagcccagtgctggtggagacaaaagtgcaaggtacagcattgcaaggtcagcagccgtagactcggatcctsggcaaacgcaggtgtgatcttgggactagctctaggctgaagagctcacatctaattctccagcactatgagccagctagtcttgtaatggcgccctctactgcttacatttgcaagagactgttcctgttgcttgctacctaaaatcctgacaggtgtattgcttttgtagtgtctgtgggaataggtgaggatatccaataaggacacttgaaatatgagtttgaaatttaggaatgatgtctgacatgcgatatagctgttaccaatatacagtcatttgtgaacacagctaagttcaccagggagggtgtgaaactcaaagagtatgaacctcaaagcttacccactacaacatccaagggggatccaactcctcacttaccaatatctgtgcttagatggtgttgggacaatcttggtatccacaggtcccactcctctagaagccagtatcacagtcagcactttagaactgtcagtaacaccgaggttatacaagtaactactcactaattgtttgttttttgttttgttttgtttttcacttttaaagactttcttttttacagaagttttaggttcacagcaaaatttggaggaagatatattccccataagccacttgcccccacacaggcatagcctcctccattatccacatcccccaccaaagtttgctacagttgatgcatctacaatgacacatcattatcatcctaagtccatagagtcccttagggttcacttttggtgttgtacattctatgagtttggaaaaatgtataatgatatcaatccttctttatagtgccatatggagtattttcactgccctaaaaatcttctgtgttccagccactcatccctcccacaaccccggctccacccactaccttcaccaccccctgcccccgcatctaacccctggcaatttttaaactttttttattgcattatctcgacacagccaaggagattattttatgagaatattaatgaaaatttccccaagagtaaccccatattcttagaaaatatctgaccatcattctgcatgattaacctacattctggtctcagaagcatgactaagaaggagtttaaaaaacagattggtggggcagtaattatgcagttgataacacaaggctctaccctgtgtacataaatctttcacaggaggaaaaatatttaaaatgtaagaattaaaaagcaaaaacatttggctataaaaagggattcagtaattacaatgaacatctcattaaacatagtctttatttacaagaaggctgggagagctctaattaactcataagctgtccctatgaatcattagctgtggcaggaaaattctaggtgatccattaaatctccacacccacagctgttcagggaaaaatataagcaaaccctaactgcccttattttggatggttggtgaattttcttcagtgaccaactggatgaccttggccaccacacatcatatatttcttctccccaggggaaactgaagtcctctttttctataaccaaggataggattttctcaacactcaacaaatagtttgtccatctttgaacaaacttttaaaccaacgtgatataaacaatttacaaaagtttatggtagactttagatgcaaatccttgagttgacccagaaacattctgctgttttattatgtcagtttcctaagtctgtgtttgaatatgatttttcaccatgctatctatgtgtttttgtgtttgctgtgtatgagaagacatggtctaattattaggggccaggcactgtgaacctatgcagaaaaccacaaaagtccaaatctgcactatccaatatggtaactacaagtctcttgtagattttgagctcttgctgtgaagctctgaattgagatgtactacaagacttcaaagagctagtacaaaaaaagtaaaatatctcatgaaaaattgtataatatttttgactactagaaatatttagctgctagaaatttttaaatttcatatatgtgccttgcatttgtagtatacataatatttatattgaatggcaggacaagtggccactgtgagcccaaagtacacatggaatatttttgaaaagaagccaggagttctagagctatagaatttcctatctggaagagatttccaaaagtaaatagtgtaaaagtgcttatatttgtccaacatagccctcactttccaccacacacacgttaacacatgtaaatgtccatgcatgcaacactgtgaccagcataagcgaagagttgctatacattaagagtttggcatcactggaagaatctcctacctagtacagttctctctctgtatccctgggttccacatcagcagattcaaccatggcaaaatgaaaatattagaaaaaaatgaaaaatacaacaataaaaaaatacaaatttaaaactcaatagagtataacaactatttacatacatagcgtagcatttactttttattaggtattataagtaatctaaagatgatttaaagtatccaggaggatgtgcatagattatatgcaaatactatrccattttatattagggacttgagcatctgcagattatggtatctgcaggggttctggaacaaatcctccatggataccaagggactatatttctaaatgttggggatttaaaggaagaatatacctgaaagaagaaactgagagaacaagcaggagagatcactggctgaatgaatggaaaagtgaaggacattccagaaaaggaaaataaaatgagcaacagctgagaggaaaaaataaacatgggtctttaggagaatagtgacagttgggctattagtaacaataattaatatctgaaaatagcttttaatttacatagatttcatcacaggcattatttcatttcatcatgatagatatctatttttatcattcccattttacagataaagaatgaggcccaaatttaaggagcttgcccaagatcacacagtcggtagtgccagaatttaggggatcaaccatcctgtctgccctgggctggggtttccagcactcaggactttcagtgctagaaatgagaacatcctgggcaaagcagggaacttgctcactctacccttgaacccatgtcttctgactctaaatcccattctctttgcattgataataatgacaaacatctattgaatactttaggtgtaccacgaactttgtaataagaacttcacataattatctttttaatctacaaaacaactttataaattgagtattgattttgcacttcctcctcctaccaccccacatagtccagatataaaaaaattaagtctcccagatcattgataacttacccaatgtcacacagctggtaatgtctggattttaactcaggccattccagtccagggcctgtgctgctaaccaccatgaaagatgcccagcctggtgctgccacctcacctgcttgctaaggcccagggttcctgctggaccttttgacccactcctttattttttcatcatgttagtatgaaaacatagcttgactggaatccagcgtccactactgcggtcactctttagtgcataacacctatgcctcctggctttgatcttgccagtcttccatttgaaatgacctctcatattaacatcctaccaatgcctgtcccaccttttagtaggtaccttgattcaaaaagagttcttaaaaagtaaaagaaaaaaagtttccttttcatttaacatgtactggcaagagttgccagataatttgtctttaaaattaaaacaattatgctttctttaataaaaccctagttttttgttatcacctttgatgtaatttttaaaaagctgttctttgaaagaatatgcattatttttatatggcagaactttacaccatttgaagcaccagaacagatataaaatgttacttcatgttatcattcccagtatgagaatgatgagcttgtcattttcctaagaccgtaaattcctgagtaaaaacaactatgccactttttttctgtaacccacacatcactgacatagtgattgacatatgttttccagaaatgaattgagtggagtatagcgttgagtgagtgtgagatctcactggcctcactggcacagggttgaagccagaggattttgagtttcttattgtctgtggctttaagccttgtcacttcttcctcctcatgcctcaaccttccacaggcatgtattctaaacagtgttgatatgtagttgccacttcagaaagagaaactgatgttggatatttaaattatttaccttttcattgacatataatttatatacattaacatttgtccttttaaattccttgagttttgacaagcatatacaactgcatatagaacacaagcagaatctagaacatttctatcactttagaaagttccctgtgctcattttttgtcgacccctgccccaccccacttcccagcactgacgtgaactgctttctgtccctatagatctgccttcccaagtcatggaatcatacagcagatagctttttggactggcttatttccctttttataatgcttttttttttttttttttttttttttgagacggagtctcgctctgtcgcccaggctggagtgcagtggcgcgatctcggctcactgcaagctccgcctcccgggttcacgccattctccgcctcagcctcccgagagctgggactacaggcgcccctaccacgcccgctaattttttgtatttttagtagagacggggtttcaccgtgttagccaggatggtctcgatctcctgacctcgtgatccgcccgcctcggcctcccaaagtgctgggattacaggcgtgagccaccgcgcccggctataatgcttttaagactcattcctggcctggcgtggtggctcacgcctgtaatcccagcactttgggaggccgaggtgggcagatcacgaggtcaggagttcgagaccagcctgaccaacatggtgaaagctcatctctactaaaagtacaacaattagccaggtgtggtggcaggtgcctttaatcccagctacttgggaggctaaagcaggagaatcacttgaacgcaggaggtggaggttgcagtgagccaatattgtactactgcactccagcctgggctacagagcgagactccattaaaaaaaaaaaaaggatttattcctattgttgcattcatcagtattctttttcattgctgattattattctaatgtgtgtataccaaaatttaactgcctattccccagttgacggacatttggagttttgtctgtcacatataaagtggccaaaacagcacgtaggtcttcgtgtggatgtatgttttcacttctcttgaataaattcttcggagtggaattgctgggtcagagggtgggtgtatgtttacctttatataaaactgccaaattgtttttcaaactccttgtaagactttgcattcttgccagcaacatatgacacttccagataatccacatctttgccagtatttgatgttgtcaatctttttaattttagctattcctgtaggcaagtctaataggtgtatctcattgtgggtttaatttgcattttcttgcaaatacctttaatagaccttttggggggtataattcgtatactgtacaatgttctcatgtgtcaaagttggtttagttttggcaagtgcgcaccccttatgtaacacacaccacgtccaggtatagacccatgccaggcccccggaaatcgcyctatgctctgtccagtcaatttcctccatcacaaccaaccactgtcaacgattttttccaccatagattagtttcacctgttgaagaacttcrtccatgtagaattatacggaatgtgcgtctgtctgtgggctggctccttttctcagcctgatatagtctgatggtcatctgagctgcagtctggtactgctgtgcattacctttctttgctaaggagcttccctttggatggatgaaccacaatttgtttagccattctcctgttgataggcacttagttgttctcagtttttgtctactatgaataaagctactataaacatttttgtgcaaggatttttgtgaaggcatgttttatttctcttgaataagtagctggggcagaactacacagtcataaagtaggtaaattttatctttataaaaggtcaccaagctgtttttcccagtgactttcccattttgcatttccacccacaatgcataagagtttcagttgctccacgtgctgccacagtttcttctgttttgttgttgttgttgttgtgttaagtttagccattctaatgggtgtgtggtggttttaatttatatttttctgatgagtaatcatgtgcttattgcccatttgtatttattcctttgtgaagtgtatctactcaagtcttttgccctttttttcttttcttttcttttctttcttttttttttttttttttgagatggagttttgctctgttgcccaggtcgcagtgcaatggtgcaatctcggctcactgcaccctccgcctcctgggttcaagtgattctcctgcctcagcctcccgagtagctgggaatacaggtgaccgccaccaygcctggctaatttttgtatttttagtagagatggggtttcaccatgttggccaggatggtctcgatctcttgatcccatgatccacctgcctcagcctcccaaagtgctgggattacaggcgttagccaccgcacccagcctgttttgcccttttttattgggttatctgtttattactaactgtagttaattgactggcttgtagttttaaaaaatatattctacatacaatttcattgtcagatatatattcagaatgttttcttcctatccatggcttgagagaagtataatatatcttcatggtttataatatatttttaatataatttataatacatatttaatgtaattcatatcttataaagtatctgatgaacggatgttttaatttggcagttgaatttatcaaaaaatacttatagttcatcctttctgtgttctatgtaagaaatctttgcttaacccaaggttgcaaagataatctatgtttccttctttgtagttttcacttaatttaggtctacaatacataaaattttgtgtgtgtgcatggtaaagtaatactacattattacgatgattgcagctttatagcaggttgtaaaatcaaacagtttccaacattaggtttcctttcaagatggttttggctattgtaagtcctttgcatttccatgtgcatcttaaaattaatttgtagatttttacaaaaagtctgcagggatttttttcaaccttttcttattctttgtttgcataggttatttttttttccaaattttccacgtcacttatttttttcttctgcagcgtcacgtctgctgttaagccctacccaatgaatttttaacgtaggatattatattttttaattctaaaagtttcatgtggttgtgttttacagtttccagttttctactaagatttgttatctgtttacccattatatttctttggaatccttaaatgtgctgttaatagctattttaaaggcttcatctgctaatttcaacattgtcatttcaagtctgcctctattgatttgttgttgttttttttttattgttgttgttgttagttaaatttttcatttcctttgcacatccagtaaaattttttgatatgctggataccgtgaatcctaactggagaatctggattttgttgtcttcctttaataattgttggattttgccctggtaggaagttaatttacttatgaatcagttgcttcctttaaggcctgtgaataagctttgccaggacatagtctgcagggctaaagtggcctccctcttaaagtatggtgattggagatctcagctgcatgcccaaggtgtcggtgagcccgctctcctttggttggccagaactcttgtgactcccagctctttgtggccctggcatcttcatttcactcacagctccccaatagagctacattgttgtaccttgtagtttttccctggacatgaacgaggaggttartatttgtccaagtcttaaaagaacctttatgcagatttctggtctttcttctctatgcagtttctagttctcttctctctgggtggctggttcaaaattctagcctcaaactcaaagtgtgttcctcctcaggtcagcaagatccctgggttctgctttggctcctcctccctgtgcctagacagagagctggggcaactggagggctcttatcatggtattcctttctcctaggaaccataattctgctctgaatgttttccaacatctgaaacagttgcttcaaacattttgttcagttttgtaatagtttatggctggatgaattcatcattactgattattttgtcrtggctgggaatggcagctacccatatcattatttatgaatctaaaaaaaataagtatactaggcctaagacattttctttatctttcacatctggtgtcatctctgaaaccagaattccagttttgtttctgtaccactactagaatatgtgcagctatgaagcagagtgaaagtatttgcaaaagacagcgtatcccctcctgtaagatgaaagtccattaaataaattaaataaataaattttaaataaattaaaaaatatttggaatttcaattttatttaaagcaagtttacttttttattataaaagatagctcctgtgggtgacttatgccacacaggtgtttaaggtggaaatacaatatcttatggcattttaaggcattccatttatgcgtggacagggattactatcagatttctctcatgtttgaaatatagtatctaacattttataatgaacaaagtgtttccgatcagattatcactataagttggctagtatgttttcacatgggaattgttttgtgttgtgtttatttcctctgcggtattatgggaaatttttaaagctaactgccttatgtattcattttaaaaactccccaaattattattcctaataaagggaaatatgaaagtatcaaaatattattatatcactttttcagttcaactgagtatgggagttactctcccgggtaaatgtgtgttcagcttgtggaaagaatcataaatgtcttctcaaaacaaaagaactcctctggctataataggcagagagaacaagccaagccaatctttccacttgtgctaccgaacgcctccttttttgaaagttttcagtttcaatggaaaaataagggcagcagataatgaaccctttattcattttgacctaacaagaggccttttaggaggcttacctagggaaccagtcttccagatgttaccaacgtgactctgtggcttattatgacttcttgaagaactttgctaagaaaaaagaaatatytaagatactgccacccaataaaatgttatgaaaaatttctacacttaatcatgtcctcactgtgaatcgctctattagtccctacaaccacatatagattttctctcaacatgacagtagtacatccctactgtgactacataatcctcattagattacttgtgtcatatttattacataggtggtctttaggcaaagcatactatattttctttttcctagtgtttcaatatgaactgcatgggcagaagcagcacaaaatagaagagagtttaaattctgatcctgccatttactaaccaaatgactttgagcaaattatttaacctttctatgattgactttatatgttaaagggttgttaggatagtatctgatccacgaaggagttgcgaaaattaaaggagttaatacaggacagaacagtgcccctcacattgtaagcactgaagaaactctgcctcatctgttgtttttattattattatcattactaccactactgtttagagaactctttaaaattagctcatttagccttcacaagaaatctttaaagtaaatattgctatccttattttataaataagaaaaccaaacttaaacctaggtctcctgaccctaaaaggttatattcttgtcttaagtatcctagataatgttgaaacattcagattttttaaaaagtgatcatgagccttcactaattttagcttagtcattttctttaataattttataagaatatttgtcgtgtcatccaaaaatttcattggcaaaagagaattcaagatcataatgcatttctataaatagaaaatgtgcctatatctgcttcatatcatttccaattagaatagagaacacatagattatagaatgagaaaaagtttaaatatttaacacctaggttggcatatagcatgtcaagtcctccccatgcttctttttccatctaaatacatgtatcctaaatttctgatctcttagtcttttgagaagttatttctttgatcctagttttcaacatctaggtatacatgaccctccccatcaatgtgggcagtttgcttttcaaaccatttgcagctccacctcctaaaagaccagtctctctggactatttttgtgtcacccatatgatagtgaatgtttttccattcctagagcaaagtctccatgagtctaacgatgtttcagaaaaagagtcacctaaatgccagtaattacatcaagttatcaacccacagaaaaataaccacagcatatgaagttctcttggaatctttttaagaatcaacttagcctgagtctgtgatttaggttcctttccacgwcttttaagagctaagcacaacctaagtagaggaaaagtctttgaagtacaagctggttgaccatttcctgcgcagagtatccaatcccattgaaaatgtcttggaattgtccctagcttcatcagtaagtgctgggggatgacgtcactgcgggatttcaaccgaactttatgttctgataaacaatgtggtgctggtagtggccactggtgaattctttttctcttgggaggtgccagcaaagttccttataaattttcaagctttgttaaaagaataatagagggtaagacagaaagagcttgggggtggtcaggccccgaggaggatcgcctattaaagtcagtgagtgtagacgacaatattttggtttagtgccacacttctttgagtataaaataagaaaataactgtcgtttcttggataacaggctatttccaacttaccatcacttgtctcgtgtgtcagtcttcatcctaaccatgtggcagcatgcagatgacaagggttatcttgaatttaatccttttcttagatggacagatatattcaggaggctgtagagttcaaaagtggtggtaaaagcccttccagtggcaacaataacgatgaaagaacccaacaggcagttttgtaagctttaccctgaacaaaagccaagagaacattgcttgtaaccaaacaaggaataaaaataatrctagagtttctacagaaatcagtgcatggaaattccctgcttattaagctgtttccattatgagatgttcccctatattaaaattttcatagcataatatatccatcatctggacattctgaagatttttttttcaaggaaaactacttcagtaattctttataaaaacaggtttccattttctttaagaaacaaggctgatttgccaatgaaaataaataaatagaatatatctcctaatttttattctaataccttcacagaaaattaaaccaggtaccaaaaagtcatagctattgggtaggttgtgagtgtatcaaatttggacgaatattatcagatcctaaattaatacaatcagagtctctttctaccctgttctccacatccctttctactataaaaaaataccccttatactttcatcccaacctcctatccttcccaaaagcatccccaaaacaatgaaaaataaaacttactggagtagactgagaacaagcagtttagaactctctccctcattcaattcaatgtacctgaaatgagcattagtattagaactcaattcatgagggttatttttactgtagttatatgaaataaatcttggggatttaccttagagattgcataaggtcaatcttgcatccaagtttttactaacattgtttattctaactcctgtttccttttaccctcctgtaaactgccacctcaagatctctcaagcctttatttcctcacatacaactctgggtaaggtaagagaaaacacaagcccagagtggcattttatatgagtcagtaaggtacacccatgtatcaaatggcatgggaaccagggaatcattttgagttactaggttcagtagtgaaactctgtagttttcttggcccttacaaaaccaggtcacagctgcctggcttcctaatttggtttgatgtactgtgaattcccaagggggtgagtcactctcttattcatatggaagtacaggagccattccaaaacaaaaaccagtctgggtttatttatgattttatatgccctttactgccccactatacagatgatccagagttgactttcagctgttaattaccatattggagaggagatacatggcatttttcatcttttgagttacaagacttctttaatgtgaatattccctaagtgcttgcttgcttctgcttttggaatgctttactgaggctggatatatattatgaaacaatgaatgcaaaatcaatcacacatggagaaaatcaaagtagtaaaattaacaacataccttaagaaacagtctatgttaagtcagtgtaatagcatcattatacattactcttgttacctattaagtgctcaagaaaaccataaataccttgctttatagacttgatgaggcagaaaaacctttcctgtgggtcatcaaattaagatgcagtatgactttacgatttgttccatcttagaatttggctgtgttctatctttctgatttcccagagccgtccacttcaggatgtttgggcttctgccagtggccgtggcacagatgcttttaataaagggatccaaccaccttctggaaaacctccctgcttcactagaactttcaagagatatcaatcctgttttattagtgtttatttaaaaagaagaagaagagaaagaagctgaagtagccaacacgatctatgtagtctactttatgtcccttcttttgtcacacaaaatagaatatttctcttgaaaaaggctcatacaattccgtagctatatactgagtgcctactgtgtggcaaactctgcactaggcatggagacaccaagaagwtgcatgacttgccttagagctattacacagacgcagtattactttgtaaaaatatctgataactaaaattaatctgtaaggtatatagagatctttgtataaatatcacatttcatagaatattaaaaatatgtaaaattgacactaagtgatttgtattatatatgaaatgtttagtatatgattagtaaagcttcataaacaatgggaaactgatgggtcattcaaaaaatggtataggcaraactgactttttagaaaaaagtaggttataccaatctcagataaaacataaaaaagtagatgaatagctgtttgtattaagaacaatataaaatagaaagaaatgaacacatatagtggtcttaccacacagaaggagtttcaaggtataaaagtcatgaatgagagagcaaatgtcaaacttgacaacataaaaatgtagaaattatacatggaaattttataaaattaaaacacaagtgacaaacttgataatatacttgtaaaatatgacaatgaattaatatcctttataatcaaagaaactgtatgaaacaattactattaccaaccagttgttaccaagagtagaaaaataacaactgagatggttagcagtacacagtaaaagaaattcagagaaatgatggacacaaacatatattaaacttcactagtaatctaagaaatctaatgaaagcaataataaatacattcttgcttatcaagttgacaaatttttttaaatgtaaaaacaattagtgataggaaggtgcacaggcaatctcattcaattccggccaaaatttgaataaattttctagacmtgtgttttacagaaagtatttagaaaaaaactaaagttattattctttcattcaataattcttattccagaaaaatttcctaacctaaaaaacatgtaaaaatacattcatcacaatgctccttatgacctaaaaaattggaaacaatttaattgttctgatgtagagaaatagatatagtctatccaaaggatattgtaccatatggtagagctttgagggtggccccacattctgctccctctagattctctctgttccagctccatcctagcttcctcaatttccccagaatgccataacctgccctgtgtataggtgagcagtctgagagcctgaaaagcaaggtgaygtgtccgaagtcataccatctacttggtgtatctgaaaccaaactcaggtcttctggtagcaggaccagaaattgttctaccacataatgcttgcttagaacagtgaatttcaaactctgagtagtggaatctctctctctctctttttttttttttttttttttttttgkgggatgtcacctctaagtatttttgtttttctttttttttttttgagtggcagaatcttatgcacaatttccaataaatgaaagagatcaaagtattatagtactatatagtttttaatgtaaaagtatatttacttacaaagtcaatcagtgagtarcataggaaaatacaaggaaaatttattaagtgtttgtcatatagtagaagtggttaggttgagtgggtaggttggtttttaaaataccaacaacaaaaaaagatgctgttctaaaaacacaaacatttgaaggctgggtgatggatatagttttatatcaacgtcagcacacactgtatttctatatttgggtgtttttttttttttttgtaaaatggggaaaatcttgtttcatatgaataagtagctgaaaatgatgaacatttttaatagtttatatgccaacctgtctcaagatattattcaattaaactgaaacagaagctgaaagaaaagaagtagaaaatttaatatttaaaaaataaatcattaaaaatacccaacaaacattatgttccctaactgccaagggttcaacttggaaagagtcagtaacagggtcctcaggcagtttagatcttgagtgaacactggggaatgttataacattataagatgttcaacttgtcagttgaaatccctcacattatccaaaaagggcatacctcactctctatctcagctagatagtcactttagctttcagtcaaatttatttcattgctgacacattatttaaaattttaagtttgactacaatgtgatcttacattgcaaaactgagcttcttctgtttactacaaaaaatcagcaagacatgcaaactagtgaaatcagttttttgagaactatttcactagatgaaattcagtgaaaacgaatttttgccagtaccttgccacaaaacacccaagggacttcagcatgaaaaaaaaattctgaaatgaatactgcgcatattgtttaaayaattcttaaaagacaacaaaaaagcaaaagccctggttgaataacatttacarttagaatgatcttaacgccttgcttgaaagatcttaacagcttatgctctcctatgccacccaaatagcttttcaaaaatagtgtttctgaaaggcactagcctgactattttttccctgatattcattttacacaaactacataattttttttaaaaaatgttttgcccttttgttcgtttgtgtgttgaaaattgtaggtgagaagcagtggatttccctcacccatcgctaggttcatggctgaggccactataatagaagacagattaacaaaagaaaagaatataaattggttatataagttttacatgacactgtagacttctttaggaaatgaagcctgaataatgaggcatgcttctgttttttcttttttttgggggggggggggggaggggggatggagtttcactctgtcgcccaggctgcagtgcagtggcgcaatctcggctcactgcaagctccgcctcctgggttcacgccattctcctgcctcagcctcccgagcagctgggactacaggcacccgccaccacgcccagctaatttttttgtatttttggtagagacagggtttcaccgtgttagccaggatggtctcaatctcctgacctcgtgatctgcccwccttggcctcccaaagtgctgggattacakgcgtgagccaccatgcccggcaaacctctgtattttttatgaaaggcttgaggaagagtgggcggtcacaaggaaatatgattagaggacaaagggtgtggtctaatggtactgaactgcgggtggggggggcttagcaaaacctgtgtgttcacattcttcttggtatctctgtgtctttggctcctataccccgggtatagggagagcacttttcaaagagsgtcatatgacctgcttccggtgaagatcagaaaatccctcctaggttttatgacctccttcaggagagaagagcrggggtagagggtggtggtcagaaaggccttcctgtttctactgctttctcaaatgtcacgatgtaccacattttggggtggcatgtcctgaaccccatccaaaccaatctaacgacttctactgtgyggcaagtgcttaataaattttccttatcttttcctgcataaacctactgaacaaagaagaaaaatcagcagtagtgatactctcaaaatgttgactcataaagattccgcataatctttatgaattctttgaattaatgtrgctgcttgaattaatgaagtatgttgaattcatgttcttattaaatattcttaggttatagcaccataattctaattgtttcttcaatagcagcctattcatctaacatacttgttagcatatagtttaatgagctttttctggagaaaatgcgtttcttcttcacaaacaatacattttgtcattgcttccatttttttctgtaacatgtatgctaaattaatctgataaccttatttttatgctccctatgctttgttttaaaatcatttaactttatgtctgggttctctattctgtcccattggtctatgtgtctgtttttgtaccagtaccatgttgattggttactgtagccttgtagtatagtttgaagttcaggtagtgtgaggcctccagctttgttctttttttcttaggattacttgggtgactcaggctcttttttgcttctctatgacttttagaatagtttcttttaattctatgaaaaatgatgttggtagtttgataggaatagcattgaatctataaactctttgggcagtatggccattttaatgatattgattcttcctgtccgtgggtatggaatgtttttccatttgtttgtctcttctctgatttctttcggaagcattttataattctcattgaagagatttttcaccttcttagttagctatattcctaggaattttattctttttgtggctattgtaaatgataatacctgaaactataaaaactgtagaagaacacctagaaaataccattctggcattacattggcctcagcaaagaatttatgactaagtccccaaaagcaatgacaacaaaagcaaaaattgacaggtgggacctaattaaactaaagagtttttgcacagcaaaataaactatgaacagagtaaactaacaacctacaaaatgggagaatatattcccaaattatgcacccaacaaaggtctagtacccagaatctgtaaggaacttaaacaacaaacaagaaaccaataatcccattaaaaattgggcatcagtcatgagcagacacttctcaaaagaagacatacatgcagccagcaaatatatgaaaaaatgctcatcatcagtaatcattagagaaatgcaaatcaaaatcaccatgagataccatctcacaccagtcagaatgcccattgttattaaaaagttaaaaaaacaacagatgttggcaaggttgcagagaaaagagagcacttacacactgctggtgggaatgtaaattagtttagctactgtggaaagcaatgtgacagttcttcaaagagctaaaagcagaactaccatttgacccagcaatctcactactgggtatctacacaaaggaaaataaatctttctaccaaaaaggcacatacactcatatgttcattgcaacactattcacaatagcaaagatacagaatcaacctagatgtccatcaatggcagactgaataaagaaaatgtgattatatatatatatatatatttatttatatatatatttatttatatatatatatttatttatatatatatatttatatatatatatttatttatatatatacacacacacacacatacacacacacacccctatatatacatatatacacacacatacacatacatacatatacaccatggaatactacttagccataaaaaggggcaaaatcatgtcctttacagtaacatgaacaaagctaaaggccattatcctaagtgaactaacacagaaacagaaaaccaaataccacatgttctcaattataagtgggagctaaacatttaatatgcatggacacaaagatgggaacaataataaacastggggactgcttgaagtgggagggtgggagaggcagtgtgggttgaaaaacaacctatcaggtactatgctcactacctgggtaacaggatcattagtacaccaaacctcagcatcatgcaaattacccatgtaacaaacctgcacgtgtaccctctgaacctaaaataaataacagaaagtatagacctactatgcaaaattttcacagcctaaaatacagtaagaactgggttatttttatacctaataacactcaatgcaattaccaagtgctatgtggaaggcccttctgcatgctacttttgttttgcacagtgttggtgtggtaaataacggtgaaagaatccagtatatcaagtcattgtttttgttcaatacatggtaaaattttctttccaagttttcagttttaaaagtgacttgtttctaatttcagagtcttgttacatcatattttttttttacaaaaatgattcaagaatayttaaaacttacaatgagcgtacgggacatgcaaaataaaacaaacaagcgcttattatttcctgtaagagttttatctataactatgctgtctaaacatggtatggagcacttgaaatgtagcttgttagaattgagttttgctataagtataaaatatactgcagatttcaaagacttagtccaaaaaagtaaaatacttcatttttaaattaatgctaaaatgataatatcttagatatcttaggttacatgaaatatgttactaaattaacttcactggggttgtttgttttagttttttcctgttttcttttcctttttataatgcagctactagaaaacttaaaagtacatatgtgacttgctttatatttctaatggacaacactgaaaagaagttagaggccttccctgatttgatactaggaaattccatctgtgtgattgatgcctcaacagatggtgctacgagggcgtttagaagaggcatttgacagaacagtggaggttcatgaaggcctccaggaggaccaggtgataccagagctgtaacctgaagggcagataaggggaagctcctaagagaagtgcaggggctcagaggtaaggaggaataatgggcactagaaagtagctcggtaaacctagagcagtgtgtgactagggagcaagagccagagctgaaggccttgtgtgccagactaggaattctgggttattttgagggaaaagagtagtcaggtgtattagtctgttttcacactgctgataaagacatacccgagactgggcaaattacaaaagaaagaggtttaatgacttacaattccatatggctggggaggcctcacaatcatggtagaaggcaagaaggagcaagtcacctcttacatggatggcagcaggcaaagagagagcttgtgtggggaaactctgccttataaagccatyagatctcatgagacttactatcatgagaacagcacaggaaagacctggccccatgattcagttatctcccactgggtccttcccacaacagaagggaattatgggagctacaaaatgagatttgggtggggacacagagccaaactatatcaccatggaaggttgtggagcagggatgtgactgactcaggcagtagtagatcactctggctgctatgtgacaattagaatggagtgaggcaatactaggaaaagagggtccctggggcagctgtgcagaaatctaagcataggatgagaatgcagtgaggactgagggcccatggtagaataaggaaagccaaatggatttgagaagtagaagtaaaaggactcggcaatgcattcagttgtttggagtttggagggaagtggaggaggcaggcaatgagagaaaggattaaatcaagtgagaccctaggatgctgggttgtgcagctgagctggaaaataagaataatcaacaatgctataaaaattattttcgagatattcagcttccgtatatcttaatggtacatgggtgaccaagactacaatatactttcatgatttgccataagatttctgaggctacttggagttctmtgtgtcattgaaagtttgcataatagttcatttttcaaaagtatcttttgccagagccctttgactttattattctgataatcaaaatagtttccttatgaagaagtattcttgccaactaacctaaccacatatttgaaacatcagatgttaataggttggctgatattttatcttttgtgaaatttgccttaccttaaaggttttccactttaaaggtcacaaaagaggtttgctttcctttttagaaagtaaaaaccacatacaggttcaaattcgaagataaagactagtaatgatttcctataactaacacatatgcccaatgagtagttaaagatactcaagaccagatcttgattttaaacctttacatgaatccattccataattttactcctttattcctcaatttcacctaagtgatctctgtaaaataatattctttgattatccaatgcgagtgatagcacatgaattatgtatgatctgtttgtatagatgacattgagaatgttatttaataacaagatcatgtttttgaaaataaaaattacccttgggatttagatgcagaaatgtttcactaacaaagggctctgaaagaatgttggcatcagttaaagtgaaggtatgaatggtggcaggccaagaaaacaactgaatattagtttcttgattccaaaggtttaatattttcatttataataaatgagtaacaatgataaaaattttttcccagaaataaaaacaatggaatatattatgggaagtgttacaagggaatgtctcctctcttaacaacttgaaaataaatgagagatttttcaacatgaagaacataattccacaatgatagcacggtgcacaatacatcattttttggaacattttgaggctttaagactttaggtttaatacccttggcaatatacatgtgtgtacatgtgtatggggaatggtaatctgtgtacaaacatgcacacaaacagaaatgtacattgaactaaaaatctttgtacaatgaggtggcgggagtggggagcaagatttttaaaacttttttgttaccgcgcacacacacacgcgcgcgcacacacacacacacacacacacacacacataggtatatacactattccaaaagcagagccgaatatattaatataaataaagtagacctggattcaggccctaaggacctcgtggcttaatagacaaagaaaaaaatgtaaagtagaaagtggcttaaaaaatttataggaaattcaggaaagaagaatgttaacttaggctcaaaaacaatcaggaaagtgtcataaaagattgccatttcagatataaaaaaatagaaagaatgaatcagccctactatttgatagcacaacagggtgactataatcaataattacycaactatacatttttaaataacttaaagagtgtaattggattgtttgcaactcaatagataaatgcttgaggggatgaatacccctttctcatgatgtgcttatttcacatggcatgccggtatccaaacatttcatacaccccatagatgtatacacctactatttacccacacaaattaaaaataagtttaaaaaaaaatcaccatttcagctagaccttgaataataggaataatctgaacatatggagaaggggaggcaaacattgaagttttaaaaaatggagaaagagatagataaatatatagatgcacacattcatgaaatcgtactattgagccaggagctttcctgatcatatctaaccccaggacaacctgtgaggcagaaagttttcttcacattccagaaacaaggaagcaggttcagaaagtctcctatggtcaccggactgggaagtgccatgcaggagctgttggatccaaagcccacgttctctggctccacttgtttacacttgcttaatgatttggagacatgagcttgtaggacaaagggaagagcaaagcttccctttgattggagagcaagatagcacaatatccaaagtggaaagtcaggtttttccttcttcatctgttttacctgacgagggccagaatttaagggtctattagtcatagatggcatggagtatgcactccctgtgttctgggcgctgtgctgaaaaccttctgtgtgttatctcatttgatctcttaggggctctgtctccatggtttttggtgaaagcacagagggttagaataaggtcatttccaaggtcaaagagctaggatacagtggagttgggattcaaactcactgttactagactccacacaagaacctggggtcctaatcactaaacatagtgcactacaaagcacagttatgtaacatatgtcatatgtatctgtgtataaatatgcatgtatacatatatatgtgtttactttgtgtgtacacacacatacctgcacaagatacaccccttaaaaatttcatacctatcagtgatctccaagtatgcttgtgttgacatgtttgagtttaatacaatttgtttaactagtgatcatgttacttggtgatattttcttcatttggccatgaattaaagagcatttactgggcacctgctttaagccaaacattctgtagacagcaggattcaaagctaagatataactcttgcccttaaatragctggtaggtttaataaaattggtctatatgtgttgcattattttgaaagttatttgctattattgtgttcaatttattttttggtttgctaagaatacatagagataacagttataaattacaaggttaaaaaattcgaataagcaaaaatctcctagtttgctaactatcagttaaatgataatcattgttaaatgatgaatatatgtcatattgcaatgtcagtttcacaggcagatttactaggaagctaatgaagtatgatcttcaagatttctcaatttcattgacacattctaagactccattcttatttttgtgaccattcatttgtattccttttcttaagagtcctccctttatattttataaattttaggatctaagaggaccaaatatgcccctggtcagtctttaataatttaaaggcaacccaatgatttgggattgatttcacagtccacaaaaaataaagaactatttctttcctatacctctgttggtactcacctctatttggtatttgcattttagttactccaatagatacccatactagagcgtaagtactaataaaaattaaaactcatgtcaatgattatctctccttataaagaagcctacagagggtcttgaagcaataaagtaatttgaatgaaaactacaaaccatgaataacatgacacctactacttcaaataatccccaagtgacctttatataatttttcttcttggacatttgaaacactttggtagtttaactccttaaccctgtactaatgagatagaatataggtattccctccatttacaggatacgtactctgaccaaggagatttaaaacaaattttatttatttatttaattttggtaatatttgtcagtgaaaaaagctgctgtttaaaatatatatatattcgggcccagtgcagtggctcacgcctgtaatcccagcactttkggaggccaaggcaggcggatcacctgaggtcaggagttcgagaccagtctggccaacgtggtgaaactctgtctctactaaaaaaaatacaaatattagctgggcatggtggtgggtgcctgtaataccagctacttgggaggctgaggcaggagaattgcttgaacccaggaggtggaggttgcagttagctgagattgcaccattgcactccagcctggagacaagagtgaaactctgtctcaaaaaaaaaaatatatatatatatattttttaaatatatatatatatttattatatatatattttaaatatatatatttattatatatatatttaataaataaatatatatatttatttaaataaatatatataaaaatatatataaatatttatttaaatatatatttaaatatatataaatatttatttaaatatatatttaaatatataatatatatttatatataatatatatatttctctatatattttatatagagatgaagtatatatttatatataaataaatatataatatatatttctctatatattttatatagagatgaagtatatatttatatataaataaatatataatatatatttctctatatattttatatagagagagatgaagtatatatttatatataaataaatatatgagacagagaattttatatatatatatttatttatatatatatatatatatatatatattttcatgattcttgctctccaggaaaaacatctttcaaaaacattgaaagatatttcaacactgaaagaatggagaaatctttgccttcaggtttgactccacctaaagcatctgtaatagattcactgcatggcctcagatgctaacttcttagtggagtaatggcatcaaaacttgtaatctgaactaatttaagtataactttattcacatattcttctctttaaggattttcatctcacggattttaattgcagtaataaatggattcagtgtatttttgccccagattatgtactcattctttcagctaagcaatatttattgagaatctatgatgtgatggatattgatcctagtgctggaagcagcaatgaatgaactatacagaaagcctctaccttcaggaagtgagggagaaccttgaagaggtgtctttcaaatattgatcttgccaaagtctgttgtggagtttagtaaactgtaccaaagcagtgtatgactgttagcaaaatacacataatttcattttcacttgcagcttataaaacctgtcagtcatttctccaaaatattggattttctagctctagcttgggatttccattgattgccagtagaatttaaggaaatttcctttctgaggccaaatgcatgtctcagcgctgtccatgtggaaatggtcaatacaatttgaccartaatagttttttgattgtctatgggaacatctggatctttgacctcacaagtagttaaacaacawgcccttctccctatgcaaaagtgtttgttcgtttgtggctcagaggctctgcgtttgcatgttgggcttcatgttctggaagtcattttctctagcagtgaggttatttaattccaaggactggtttgaatttctttttaaactacaagtgtataggattacatttaattgttggtttatgtacaggagcattgctacactgagctgcaaggagcacattataaagtactcgtttgtcctgagtaaatattcattcagttacaggctggatgagagcccatgcatctctgaatcatgatgtctggagatctggacatcagataggcaaatatctggagatattgctgatattatctattaaccttttgctatctgtagggtcttataaagtagcttgacaattgcagtgtaaatcaggaaaacgaatgcctaaagcttggacacatcgaccagatggctggagtttaacaagtgtgagtacatatttgttggcaacacacagtcagacaaaaaggcgcttgtcctggcagctcacagtgtcgtctgtccaggggcggcagcaacacagactgaggccttgctgcacattgtatcaggctcaggggcaggaacatagggtccttttctgggtcaaatctccctctgaaggtgagagtcaagtcaaggaatgattttcttgaagtgcagcatgctcttccagcagtttstgagagggagatgtccctaaaagggkgaagagagggcatttgttccaggaccctggttcctccaccttccaggatccagaggcctgactgttcatcaccactttcagtgcattctcaacgctcactctctgcatgattcagaaggccacattcttcataatacagtcatgctagacttggaattttgacaagccatgttctcatttctgtgatctatgcttcataaagaccatatggagtatactaaatctaaagaaatctatctgattgtgaacacactgtgtgagacactactaagaagggagtcagagtgaggagggcctctggtggcattttccaacttggctgattgacacaactaaaagtgttagacataattgggagtatgtcattagacactcactaacaaggtggtaccccacttagcagaaccctttttccacctaagggtcctgttcagtgtggtgaggagcgacattggtcagcaaacgtggctgctgcgtgtggtactcatgttacagaaacttcctaaacccttttgggatctctctattgccttgaacagatggcctgtgagctgcggggccttcttccagatccacggcctgcagcatctaggcttgtgcccaatcactaaatggagtcctgcagggcccttcctgatctggcccctgccaacttccccagccttgcgtctctccactctccagttctcctggttatctgaatcccattcccttctagccattcttcatttccttcatttcctcaattgcctttagagttttgcatcmacagtttctcattcttagagcaaacaccctcccagcttatcttgcacctccaaccttcactgaagacttgtttaatactagtttctctctcccctacttaatcagaatacattattcagaaagttttccacaacccatcaggatgtagccagtttggctgatcacctagaagggacccctttttcccaaatctaggttggttcttcccgcttcctcaatgccaaggataagggcacatcagacagagtcactgcctccatcctgccccaatgacctctgctctgtagacctctggtcctgcaggctaacctctgaaggaccagggctctccatcatgggaggagcaaaatcttcccctcataaaaccccatgatttacatggtagaactgtgctttgtatcttgtacacactaccaccaaatgaccctattctgcttctaccttcttccttccgcaaaaccagatacacagcaggccccattatggttttagggtatataagatggtttctcatatattacatttctgtagaggagtgagcattgttactccctgtactctacaatgagttttgaaaggaaaagtcaactctgactaagatcacacagctgttgaggaataggtttgggatttgaaccccgatatactcagttctttccattatgtccaccaatctgttttcttttcttttttgttctatattgcctcctgttttctccaacacaaagtgtctatggacttcaccttttaaaaatgactrtatataagtgaaatgtgtttggctttagttgtttgccttcacagctatctttttgaaaacaaagtgtggctaggtgtaaacccttgggattctgagacaataagtaaaagatgaaatagcattgcaaacttctgacatttttgaactgtgtatcaagatttgtggcatatgtatttgagtctgctacaggaaaattcccagagcacataccasaattattcccaaagtaccttgaactgagatgcctagtcagttcctataactgggtgcaccagagatcgcactgtactccatgccataagccttcacaggtacaggtttttctaaaatggagcttgtgcagaggctatagtcgttttgcacaatgaaagaggctgtcttcaatgtgcatttcgatgtgtgctatgggaatcaggactaaccacgacccatggagacaatgctgcatgacttggagagtgcaacgtaagacgcaatgactctgagcctgcaccacgccatctgacctcaggatctccctgcagggatacgaggagatcttagccatatagcctttctattgccctctactgtctagggataaaatgacagaaaacacagttctgcattttggaagtttgcttaataactaaaaaaataaaaataaaaattactcttgggctgaaagcaggttttccaagttttggttcataataagtagtttttaaacatttaaaaatargggtatgtaataaaatgctgagagactctctggagaccgctgctgctggcactgctctaatagaaagcatacgccattgagctaacattctgttctttgactgaagaagaaaacaaagctgttaaaagctggtaagctcattttccaatagcaatagcattaatatctttcaagtcactcctaaccatacctaattagaggtttataagggatggctcttctggaagggtcacctcaggttacgtagcccacagatttgctgttgattgttggcaacaatggatttgtgtagattttctgctcagctcgaggtgattatcttttttcttttttttcttttgctggygtgtctcttattttgactggctgaggttgggctggacgatgaggccctgatttgaaagcagtgccaggttgttgctggagatctgcactgacagattgttgaaaacttattagtctctgacgttttaacagcctgcaatgggatagaaatctgctctttcactggaaaagcttaaaaaggaaaacatgagctcgagctgaaatcagccccagttccaaatctgccgtcctctggcaccggagtgctgagggctgccacagtgtgtagagattgaggcctgactatgccacccacatggtagacaggactctgcataaaatgatgtggccctgggccactgtcacgtaggagaccctgaaaatgtatcttctgggagctggggtgttctcaacactgggtgctaatggcttcagcagtaggagaaatcagcctcactgaggtttcagctgggtggctggggggattcttttggtcatagccattctataagataattcaagaaaaaggactaagaaacacttcagcttggtatcctctttggggtaacttctacctcaaatgggcaaaatgatggcagccggtatcactggtgagagacatctggagccaattaagagctctaatacagagatagctatattgtaattatttgatacaatgctaragtaattcattaagcatcctggttcttcgaaagcaaaccaagcctctccagtccagtccataaagatttttttttaaatcactattgaccccaatttttctccaatcccctctgtgacgaccactttgattaagctctctgctttcacccccagcagttttgctcccatccttggcagctgctttcaagatcttaaccaaggttctggactttgcccagacagctacctatgcctagaggagtcctctcttttaccagataactctttcctatgctccagactcaggcctgcagtcatgtctttcaaagccttctccagtaaccccagtcaggggtgggtacccagcattgaaagtgcccatagccttctatgttctgacttcagagtaggctacaaacttcttaaggaaaagacctggcctgaatctcatttcattttgtatccacactcatgatacactgttagcacagagtaggcactcagtaatgtcttgctgactgttcacttattcattcactcacttgatagacattaatggagatccaaacttccaggcactgtcagggagttcagtttcttaacaggagatatctttttatgctctacagacctaaactactttctctccaggcctatcttctagggatctgtctttgattagtaccattcagttcttggttggggaaaagtgtgagatgagaagtgacccagatgtttggaaatgtcatctcaatgtcaggtttcrcccttcatcagcccattgcagctgcacatcatgcagctgcatctatggcagtgcttactggtgtatatgcagaaatgtcctggaaaaataatctcttctcatgctaccccagaaaacttcagaatagcccacagaattacggtaaggaattattcattcattcatttaattaacattgggagygcccattatgcattagtcattgtcctagacatttagggattcagtggtaagcaaataaaatagatgcaatcccaatagatatatcagcatacaggcatttgccttgtttacctaaaacctcatttgggaaattcatgtattatatggcaaacttgcagattcgaagtaaatagaaaggaagtgagggtgggggtgaaagcagcctgtgcttaagctatgcctactccagattccctttgccactcttgggacggacaagatgtaytttactttccactaaacttcaaaaacttccccatagactgatcatggttagcactttttcagctcaagaaacttaggtttgatttttttttccccaaaaaatgactctagtcatatgtcaggggttctttttgttctggttgattttgttttaacatgctatctagcacagtcatggagtgggtgagtttttctgcatttctgcaatagcattcagtgtttagttcccagcttcatgggtatcaagaggcaattgcaccaataaatttctaaaccctggatcactgccacagtgctgtgttcttgaagtcaacaactcagtgatgcttcctagttttccactttcccaattgtggcccactggcctagtaaactcccagcttggtgagtcaatttcacagtgtggttttgagtgtcatttctggaggtctagcctatagcctaatcctccaataatttcataaacatctaattccctttattaaattcctttctgctaaaaaacaattataaatgtgagaagaaaataataaccatagcctattaatttctttctgataacatttaacattacctacttgcagaaaactgttatcttctcagctgacactcaggcaaacctccaagcatcaaggatttctgtctttggttttatttgtttgctaatgtttccactgttctgaagatatcaagacacattctctaaaaagattagttgctggaggtctgctgagagaataataaattcaagttatagtaactactcaggaaaataaaaagatatatgaaagcttatctgaagcagaaaaaacattaactggtttaagaaagctggaagtgctgtcgattgaacaatgagaacaaaaacgtgagcttttcactgtttttaataactcctattgaatgtgatgtgggactattatcagtattttaatattgtcaattggatataatttttctttaaggaaaagaggttcatttaatacttaagggtgattttaaaaatgactcctaacatcaatttttttataactaaacgtatggtgaaagtgatgataaaattcagtttacttaagagaaatatattttgtgcacattttgctagaacatattatttagttcatggaaattatattattttaatttaaaaattgtcttaatgtaaggataggtgcagtaatttttattatgtttaaatggcaaattaaaattatatatatctattgtgtacagcatgatgctttgagatatgtgtacattgtggaatggctaaatcaagctaatcaacatatgccttacctcacatacttaatgttttgtggtgagaatacctaaaatctactctcttagcaatttgcaaatatacaatacattgtcattactatagttgccgtgttgtacaatagatttcctgaacttatccctcctgtgtaaaattttgtaatattttaccaatatttcttcaatttcaccctctaacctcacaacatcccaagctcctggtaamtattgttctaccctctgcttctacaaattcaatttttttgaattcaacatagaagtgagatcatacagtatttgtctttctgtacctggcttatttcatttaacataatgtcctccagattcatccatcttatcacaaaagacaggatttccttcttttttcaagagttaataatattccattgtgtgtgtgtgtgtatctatatcacattttctttagccattcaactgttgatgaacactcagttggccccacgccttggctattgtgaataatagatgcagtattttatagcattcatctttcccttcctgaataaaagtccaattttagatttaatgtggaaaattcttaataaattagcaaccaacttgtgaaatgttgtgacttttaaaattagaagaatttcttcattttcaatcctaaaaactaatatgggaattaaaatagaattttactggatcagttaaatttgttaatttttatttttgttttacaatcttatcgacaataatttaaatcagtacattcttgtgcataatgaagtaaaaactaagcttccaatgatactgtgatgtagattatattaccctgttttacagataagaaggcagatttgcaaaactaaatgcccatgatagtacagtgataagaagaggcagcgacaggatttgaattttgatcagtctgatccaaagccygtgctctactagatggcaattcttgcaaacagccagtggttagtgggtgagagaaggggataaaagtaaagatagtctatttggccaaggcaatgagcaggtcaaaagtagccaatattygagaatctatatatctcagtcaaacatccagtaagctgtcaacatttattctatccatcattggagaagagtattccatagtgagtggtactgcctgtgcctcaattttctactctgctaaaagagtacaatgcgagtgtgaaaagtagaggcacagcacttagtacaaggcttagcccataatgtgggcacaaatgttagcaagtccacagatatttagtctacctaatccacaaagatttatgaaggccctggtatgaacaaggcagcaggattacaataatgaggcatgttaggaacactaacaatggacatagtttgactctttatggtctctgagggcaacaatggacattacacacatgaattcatatcctctgtgctrtggaaggagatcatgtgccagcaggatccctctgttgctagcagagatccagccccttggatgagttcttcaataactatgccctattatctgaaggcagtgttggctgggagagatgggcacaaacaaggcaagttggtctcratatttcaggcacagaagacaagacaaagatagaatccctaaggagagattggatcctgagaattaggcagaatcctggtgagcagcaccaggtacaaagtcagggtcacctggcagcagggtrcttgcatggggactcccagcaagcttgactagagcatagaaggaggagggttgcagcacccgataatccagcagggcacaagacgttcccccaggacagatcctgcagttttctgaaacgtagaccctgtggcttagcccagttaatctcgtaaactgggtcatcaccctgggttgcacagcaagcaggagcctggcagcgaaggctggataaacactggcatcaacaggaaaaagcactagaaagaaactggtttttttcaagccctgagaacaatcagattccctcaggtattgctttcaaatctgttaccatcatcaggtaactttacaaaacagggcaattaaagagctagttaaaggcgcctcagcaatttcccagacctccagggaggtgaagacaaggaagaggaccacctcattgtcattggaagggccaccacacctgttcttgctatttggtgatgagcttgtctagccagtgaacccaggcaggccatgactgttaaggaatgcatgcttcacaggagtttcaaaaactcctcctgaatttgtttatggccaagaaagagagcaagaccccagctcctgtgcccatattcacaccaatgtgcctgttgagtggcacatataaggctgcccttgggctatgatagcaaagagaagttatgcaacctcaacccatcaacccctgcccctagaggccctgcaaggaaagtagaaaagctcttccttcacaacacatgtctggactttttccrtagcaaatggcaggggagcaccctagggtcctggagttatttccttgtaggactcagaatgtgaattgatagagcttcctagcactttgttttgcctagaagtttagaacrtttaggaaacctctgatccttcatttaaaaatattaacactttcasktyaaaaamtatcactttaaaatacaggtaatgcagaaaatgcatcccagtaatttgaaaaggtttaatgtcttccaaaacaacgaaataggaacaaatastatgatcagactccatgggtcgttaatcctcacatttgcttctctgacctgacttggtggcatacattggcatccccatgttacttatgaagaaatgaagcatgaagagattaggtgaaatgataaatatgacacgaggtgagcagagtagctgggaagaaagctcaagatctaggatctccattgagaactcaatgctcttttgcacccttaatctgtatccaacctccttcctccatggtccagcctcttgactcacaaaagcagctttctttcttttcatatcactgaaccaactgtccatctcctccacataatgtaggccatcttaaaaaaaaatggattgatttgaatgtaacagcatcatcctttctcctctcaacttgcccctctttgtaccagaggatgtcataatcaggtgtgaagaacatgaattctcacatccaggaattttttccccttaaatttctttgtcttatataatgtatagttacaacaaagattgatgggaatggaattaaccaagttgtgaactgtaaaagaaagaggaaaatgagtgaatgtagctcatcttcggtctccttaagggcaaaggaaatatgtagtgagaacaagttattgatgaagacagtccagtctgctaccaaatggcctctcaaggaagacaggtgcagagatgtattgtacaaagggccatttttatattcagagttgtgaatatgaggacaattcttatttcaaaatatttgaaatgaaggaaaacattcagagaataatttaagggacacaccattatagaaaaaattgatagccccagtgtgccctccaacatttcatttctcaacatttcttccccctaccctaaatttgatgcttcattattcattgcatgttttttgctttttctataaattaatgtatccataaataatatgtactattttcagatattttcaacttcataaaatatggacaattgtttttggcttaacattatacttttatgttttaaacattatatatgtcttatatgattggcatattatatattttatattatttgaatattccagatttttaatattatgtatttcatatatacatattatatatatatgttttacagtatatgtagctctaattcattttaactgttgtgtagtattccacttatgaataatacttatttgtctgttttgtaccaagacattaaagttgtatatgaaatttctctacttataaatctagaagacaacttgctatgtcatagggtatgaacatttcatctttgctggattttgcaaataattttctaaagcaattgtatcattttatattccatcccgcaatgtgtgagagtatccatttctctacagtcttgaaaacacttgttattgccagacttctaaattttgtgaaattgatgagttgaaaataaacctcattttatctttaatttgcttgcttctgatcacagctacggttaaatatgttttctatgtttattgaccattcagatttttcctcgtctatgaattgcttgctcatgtactttatccatttttctattagatttgttatgttctcactgatttgaaagatttatgtatacattcaagtactaacgctttgtcaatatactcatcatacaactgtggcctgttcttaaataactgattgtatctctgcaggaatttgccttgcacaaaagttttaacaagcaagttaaaactaagatatagataagaaagttgatatttccgtaagtctgtgagttcaggaaaagcattaggaatgccagtttttcattatttatctacttgtttttccttccaagttcagagagataaagtataggccacctagctttatgtttgatagtatctgtgctttgcagagtgggtagtgtagaataatatgggagatgaataaggaccaattttgagaataattagccgcagattattgggcctaatagattgcatatcttccactgaaatagaaactgtttcaaaccaaatgcatctctagtcgtgacttcacatgggagcacatagaatctgctctatgcaggggcataaggcatgcagaaacaatctattccaacttatccctcaaatattttactaccaggcaagtctctgctcatgacataagtccctagactcaggtaaccaatgaaaacaaaagtagaataatgttatggtaatgtcaggtcacatggatatattgtcttgggaatcttgatatgaaatcttaaaataaccttggctatctttctatttcagaggtgtggcgaaatcttgtttgagaaccccgatcagaatgccaaatgtgtttgcatgctgggtaagaaggcttctcattttaaatatattaagcatgttgatgtcatgtggagttatcattctgttgcctttttggctgtctctcattctgttttgaagaggctgataggttcttttgtggttatgcagacagctataacacatttatatgtgtaacacttgatgatgagaaaaggttctgattttcttaattgtcagccagtcaaggaccatgcttctgagtctttcaaaaattttcttggatcatcagcataacatagaattaggtggtttgtattcaggcagctatgatgaaaaggtaagaaccatgttgtaattcctaaaccaaagatggatgataagatagacaagtaaattattaagtccttacatcacagtacaaaacccttacttagaatttctggaagaaatgtatatttgaactactgtaatctgaagtcagcacaactattatcgacacagcatttgtaacaaaataacaacattgtaatgaataatcatttgttcttgtaggatgatatatcatcaatgcctttgacaaactcttttaatatatactgttaggtaatgaagttggtattattttcctcattttataggttagaaacaattatagagaatataagtgatgcacttaacctcaaagtgagaaatggtccaaatcatgatatgaaagtttctaaacagtaaaattttaggtctagtgtttagatcttatttaagccactaaactatgtccaataaagttgcaattcattatagtaatagaagtaaacagtagcatggataaataaaaataatttctaaattttattttcaccaaatttttacctttgtagattctaaccttgaactatattaataagcaaagaaaaaaattattcattttagcattttctatttactctgcccacttcatatattgacagtctagattattggtgaaaagcagacagcaagttaaatagaggcaggcaaagatcttggtaatttataattcaaaataatcatgtaacaaataatcaaaggtggtacacgacttaagaaacaaacaaaaaccagacatcatatttttctagccttctaatctttcttaaattctttactgatttttaaatctctctttgcagttctatgtttttattttaattaagatggtggctatatagtaatacrttcattgaaaaatgaacgttttactagaagcacatgaacgaagaatatagcattgcatccatacacccatttcaaatatccaatattccttccccttgaaagtgtgaaatgaaaatgtctccaaagttctaatatttcaggtactagatagatagatagatagatagatagatagatagatagatagaatagatagayagacagacagacagacagacagacagacaaaacaggtacagatggaagcagaaaaaaaatcctttgttaagccatgtgtcccarttttggatttgggaaactgttttaccatcacatcaaataatctattcaacaattaactcatttaattttccacaataacaagatgaggttggtgctattgttatcttcattttataaataaggaaattgagggaaatggttgaatactgcaggtaccttactaccactgaaatattatttgattgtagctttcacctggtctagtaacttgaatcaatgtttaactcatgataattttaagcacatgaatgcatcatctattttgactgaatgtttctgtgtcctgtcttccatgtaagttgattgattagtttatagctagaacagtaagagactttctactactgcctatagatttgaattcacttaaagtaagatcaattatctttccatctcttctagattatgtggtatggtttatatagctgccagaaaacaatcctgaccgccaaatatgtctctaaygaatctgccagattgcacaaaattctaaaattagaaatgcatttatataaatcagttttatgttgctaccactgtcataatarttacagttaattgagcacttaatatgtggcaggtgaaatccatcccaaacaccttacataattagatcatttattctaagtaaattaagagaagctctatcttycaaaatatagatatctctagcaatagaagagttttaattaagctgatactggttattaaccttgtagatttcattagtttgttagatttccctttttttcgtaattcagaactaaataataaaaggamctgtgagaatggaagtttttattagtttcaggacacataggaataacaagtatacattttacctttaagatagacagtaaataattaatgactattcaaagataatattatgcttagtgagtttgagttgctcacatagtgaaaattgtgcccttgaggagcttatatttaagacggcttagattttttaagagaattgctgcaacttttaattcagacacttatgaagtcctttgaaatcttagatggaagaataccaaaataaaatcattatggatatcaatacacatggatcaaccccaccattaacatrcatccacctgaagcccaaggactgccacttcacagcaaaatgatcctagatgataaaagaaagaagtaaagtttaatggtttattcacttaaaataaacaagagaaatcaaattatgagcacgtaagtccctaaaactgagaccacatcttgtatttcttcaagaaagaatatctatattaacacaaaaagcacctcttcaccactgtctaaggtattaattagtttgttgctatcttcaaaaggaatctcagataatgttcttatgatttcctaaagcattttttgagaaaactttacatctcacacaagraagtataaggagtctctgatattgtaaaggactattgtgttttataagcmctgccaaccataaatgtagtttttatttttgtaggtaattttataacatttttatgaataaatcaaaatttctaaatgagaaaaccaaatatatggggccacctcaatattcagatccctgatggggaccaacctgagacatcctcatctttaactggtcaagcccttggctcactcccctggaaacctccctctctacccactcacactccaggtttgggtgcctgctggatcctagctgtgtactggtttcagcacagttggggtggaatctggagaagggtcactagccagggactccatttgcatttccttctcttccattggcgagtccccakatcattctgaaaagtactgtttttatgctttgtgttgtctacctcacgacttccatgaatatgccattcttatggaaaattacacttctgactcattccgttaaatgagacataagtgtaaaattcacctcgagttactctggtgcgccggattcaatgcagctttaaatggaaccaaactactgtcatgtatgagtcttgcagggaattatttctggcttcaagagaatagctcatgttggatatgaaggtaaatacaggtgtactgcagagctgactacacggagtgttaactatttattccttacaattgttcagagagagcaaatgtggatgatcaagttaaacaccaaattgtaatatatgttgctttcttttttccttcaggcttagggaaatgtgtgtagagcttctgcctccctgtcctcccctctccaccttcctttttataaatttagccataagatttcactcaagttcaaattggcctcagaagtttatataattatatcaatggatatacaactgtatagcaacacttttaccttcttcaggtctcatgaacagatactaaaagaaagaggaagtggaagagacattatctctcaytgtataattaatgcatgaagtatggcaagttacaaaacagagtttacttttcaaaagcataatgaaaactgttgggcaaaaagagcccagaatatttaaagaaattatgtaaaatgatcaatgttgattcacttctcagttcatttgtgaaccttgctctgtgaaacgataaatcatgggaaaagaaactttcaagaagaaattgctgatcagatttagtgcttctttgtatctcctatttttcttattattagaatgggattttttcaaattataagccttaatttttaatttatgatattttgttggctcaatttctccatcctctttatcaaggtttaatttttttaatttgaaattttcattggccctgtttttgtctcatgtatgatttctttcatgctgatgagtatcatgactattagaatgtacaataagcactttcttacctgccataacttagaagggagtattcatattagtcagttttctggttgaaaattattataaatgatttaaatgattgctaatcttcagaacaacagaacaccagaaaatcaatattttattaacactcaacataggcatagagggacttgctttgtagcactagctctgaaaaaattaactgtgtactcacagaagttgcttcatctctctaggattcaattcatagttttcctgcaaagtggaaataaaaacatctgtccttcctagcccaggggtttttctggtgagagaatgagatgttctatgaggagaagcctgttatgatgtctgccctaaatattrtgtatgcatcaataagttgatgcataaatgataaataattgaaaatgtaaaaattgataataagcaaatataaataagctaataaaaattattactgatgataccaatggtgtttagaaaagcaatcgaaaagctaaaacatatgaatataaggacaattttttaaatattaaatacattcttcaaaattgcatggtgcctccagggtagaacgagaccttcatctaattttaattaatcggatgtgcatcaagcacctacaaggtcgtgtgcttagcattgagaatccaaagaccagtggggcatagagtctgcccttagagggtttattgttcagcaagagattgaggtcctgaagcccaatgtatgcaacaccaactcgactgataaaggctacagaagaaataaagataaactacactggacttcmaaacatggatagagtgcatatagcagggatgtgaagactcatctatctagatatgaaagttgagaacgtggcagcactctagatggatgcaagaccactctcaaaagctcagagataaactggggagtgtttctggggcagtgtttcaggccacgaggtagatgaaagaataaattgaaaagaaacttgagacctgattacagagagctttactgtcatcattggccctaaaaaggacagaagtaccagataaaagagagttctggtctcttttatttagttagagagtcttttcgatttagttatagcatatcagagaatactctataagctcctaggtactgggtagtattaagtacagccattcatcagctacttgtgaaattaaataattttaaaccaatgcatatttaacccaatgcgtatctgacgacctgaattctggtttgattttttttaaaaacatgttaattctatttttcctcttcatatcaaatattatagtattttattaagcaacaagataatattttcatctgtgacagtagagaaaaatgtttttttcacttttttggaactttgtcagctaataaagttgggagttattttatatctatattttgctcttatcacttgcttcagcttttggtttttgcatgtggacacttatgagacctatatactgtttcttaaaaaaataatacacaatctgttttaaggcaaaataagatttggtatcaaagtaggccactgtggtgttggtagaaagaacagggcattgaaagacctggtaccagctaataactgtgtgagcagaggcatgtcatttaggggttgtagacctgtttactcttctctaaaactgaataataagcaataataacaatattattgtctaccttattagggctgttgaggattacgtgacaataaatattaaaacattcagtgaacttttagaagtactataaatataagttattatttttattaatactcaattttttctaagtccttgcacttcattttatattagtagtatttttatagcaaactgacagtattgtagattttaaatattaaaygatctcaatttggttcaagtgaatagatattttcaagtgcatgttggcaatttagtaatgaacatccttataggttatgaaagaaatattattgtaaagattattttgcgtgcacttgacttaacaagtaaagactgtgttgaaagacagacgttttcaagttgctcgattttgatttattaaggttagaatgcctcaggaatttgaattaattttaacttacactttcaaagctcttcattgctgtcacttggattcatcaattcactctctctatatgcgtgctcagacaacaaaattgctgaatgatattttcttactctgcccaaagagggtaaattgaacctggatattctcaagggaggatggtggaagcatcattccccatcactcacccaaggccctgtcttgtttcacttttcattgcacttatcactaaaggacatattttctatttgtccatcgctgttccccagccttgccctgcaacacacccatacacgcagaatgtgattatcacagaagtaaggactccgtttcattcactgttgagtatccagcatctggaacatctagctgcccagcccctaagaggaactcactatttgctgaatggatacgtgctgatgtgtttgtgagaacagcagtcatccggagtgcatctctcgagtgtgtcaaagatcggttggcctagtatttaaaactctctgctaacatagccaaggccaagggtcagctcctacattaactaactggtggcttcccaagcacactactccaggttacaagataagaaaaagtggttcccttcaaataggcaatgaggaactatcctaagaggaagattaacatgcattcattgagcactgctgtatgcccaaccctctgctaggagtactctgaaagttgatataataatgagcaaggtagaatccctattgccacagagtatattcttgggcagatggagcattgtgctgagaatacaggaagaggcccattattttgtcttctgtttatgggaatatacagaaaattttttcaccttgagggttatggtttaaaaggcattccacattatcctactgccttttaaaattttggaagtcaatattgctttgtgtaagaaaaacaagtttcctagcttgaaggttgctttctgtggaaggttgcagcatttccacagcaacagaacacctcatttttgaatgcagctggaagccagggctcagatgagagctacctgcagaataacracacaagcgaagtccaaactatcagaactgaagttgtcaagcccaaaagtgatagaagtgtcagtcttgtattgagttagcttcattttctgtctaaagctagaaaaagggaattcaatgagacctatcagccttacacaaagctacacttcagaaaacatgttcaatcaacaaacacttcatagatacacattgtgtgccagagtagggatgcaaagatattgaaattctatcctcagcaagctcccaatctagtgacacagggacgaccacacaaacaatgacaacatagcatgataaaccacaatcaggagagcccaggtcttacgggaaggggaaggggaagggtggagtggcatcaggaaagaccttgtgcaagacatggtaaggagctgagtgtcaaagagaagctccagacagccctggagcttgcactgaggacagcccattgggaaaggtgttgttggtatttctaagagcaacaggtaccggcagcttaatgtgaccaattaaaaactgtaagaaagtctttatgcctggaaaatagagtaagaggaatgagataagacaatcgaatgtggacaggaaggcaggagagattatgaagagccttataataggacaaataaccattgaaagatgtttaagcagaggagctacaaggggagatacacactttagacagatcatctgtttagagtggagaatgcacaggaggaggatattgctgaagaaagactagtttagggaacagtggtatctatcaggtgagaaaggatgagtcctacctgaattgagacagtgtcagagagaacagaaggtgcaaaatacaggaaacttttcaagagggtgatagaactctacaatgggttgagtgtatgaagtgttattaaacagatcgagatactgccctgtcccgcaaagaagagtccaagagaattgaatttgcatggggtggggagaagttaaattttagacacagtaaatctgagatgcccaaggaactttccactgcagcacagctcagaaggagggctctgcaagtcagtggcggtggcgacataacagaaatgagatcacccagggaaaggtgaggagtgagatgaggttgtgctttggaatgcccagaagcatccccaaaagggttgggcaggttcaaaaggagcctatggaagcctaactaggtaggagactaaaatagagtgggcagaaagataaaggaaaaggagaggattgtaccttagccatcttagcctaactaggtaggagactaaaatagagtgggcagaaagataaaggaaaaggagagaatggtatcttagccaccttagccaagaggagagagtttcaaaaggtggggcataatacaaatgtaaaatactgtagaggtcaaatgagataaagcctaaaaagtgttgcttggacttagcaacctgaaggtaacaacagcaagagcatcagcagcagaaggtgggrtgaggtgggtagtgtggagccaggccacagggagctgagggcactcctctgtcaagaaattggtctgagagggctgagtgcagtggctcatgcctgtaatctcagcactttgggaggccaaggcaggcagatcacttgagcccaagaattcaaaaccagcctgggaaacatagcaagactccatctctacaaaaaatacaaaacttagccttgaggtgatggcaggtgcctayagtctcagctactcaggaggctgaggtgggaagatccattgagcccaggaggtcaaggctgcagtgaaccatgatggcaccactgcacactccagtctgggtgacagagcaagaccctctcaaaaagaaaagaaaagaaagacagaaagagcaagagagaaaggaaagaaagagaaaggaagaaagaaagaaagaagaaaagaaagaaagcaaagaaataaagacggaaggaaggaaggaaaggaaggaaggaacgaaaagaaaagtcagaaaggctggtggaggatatgacagtacctctcaaagtctgccgtcaggaagggtttcttaggataggaaggatttgagaatgttttgatggtgagaggaaagaggagaagaactggctgaagttttatgaagagaaatggagtagttgtgagccttaaacctgcgattgtgagaagatggtccccgtgggcgaggaagcatggagatagagacaggtgtgcctgggtccggccaggcagagctggaagagtttccatctgattgcttcccttctttttaagaaggaaatatggtgttctgatgagcttaaggagaggagcaggtgaatgcaagcatacagaactaggttaattcaaaactaatgttacaagaaatataaaaaaactgaatagaggtgtttaaaaaaatgtggagcagttttgaggacccagctgagttggacactgtaaatatccaggcctattctttaaaattaaaaaatacagaaaagacaaactatgtgttcttaacactcatttcaaaagagtaactgtcccatgctcataaagacccttccctttattctccttaactgcttcccggtcctttccctatggccagccaaggtaatctgcaaggggatgccttgaacccaattcacaaatccctctccctggtattgtacatgtgaagttgcttctccacttccccagtgagcctgcacattccgggtaataggtctctgatttaattttctagcaccctgtgttggcctagaattccaagaaaacacaaaaaataattcctgatgaaggtagacaaaatgtctaaggttatatattcacccctaacattctcccaccacccatggtgactctagaaggttattttttgacctgtcttggcctaaaaggggatgcctctacatccacctcccactttgtgaaggagaccaaaggtgctaagccatttgagctctgggagtacaaatgtcccctgagctgggcccacccctgtccaatcacatcaaaactgcctcttccagccagaacagtggttcacgcctataatcccagcactttgggaggccgaggtgggcggataccctgagctcaggagttcaagaccagcctggccaacatggcaaaaccccatctctactaaaatacaaaaaactagccaggtgtggtggcacgtgcctgtaatcccagctactcaggaggttgagacacgaaaatcacttgagcccaggagacagaggttgcagtgagcctagatcgcgccactgcactccagcctgggtgacagagcaagactctgtctcartaagagttaagaaaactgcctcttcctcatcctctctaattctggttcattttccgcttctataaattggattcaaaacttcttgctttcaagatgagtccatctaggaatctttgtatacatcaaactgtactttttaaaatgttccagagacaatgtcatttttaattttgaccccaaaacaatgttaggctttctattggaaggagtatagattatagttatatttcattgtaaattcatattttttaaacaaattattaatataggtttatgagatctcaacctgccaatctcaaaccacctcataaatatatgaggttttctaatattcataaattataaatattcacaaaatatagaaattttcagaatgagacaaattacgtgtattacaaaggatgcacaagaacaaatgttgaagtattaaataaataaatacttgttctcattatatcaattgctatctttgaactgtagcatttctttttcatatctaattgccaaaatatattttgttttcttaccaggagatccattctaaagaagtagctagctgatggtatagaaagctcagttttcataaacccaacattttcccctctcactgaataatgcatgtttttgtgactctagcatgaacrctatcaagcttactgattatttcttactataaaaaccttaaaggcaaatctaaggatatttacaaatgaaaaccaaatgtgtagaatttttttgcctacttcaaggtacccaaccacataggagcctaatttgatttgtagtcaacattttttacattttctgacttgtaatttaaggagatagttaacatgaaatcttgtacattgccattttagctttacctaaattctgggattctgggagctctagttctttgtgacacaatagaaaaattgaagacatcattctaaacaaggacctgacattctgaaatataagaaaatagtgccagaaatgctaataggatatagaattccatgaagttggtgaatagcaccatcctcattttttcaatgataatcatatactacaaatctgagagtttgggaatatgaatagtaaatataagaaaagagttactatgtcaagctgctttctaaaatttatgtcgaaatgtaaatttcagaaaaaggcattttaatattttctcttcttttagaaaatcaagtatttaaaaaagaaattgaacatcttggaagtatatattgaactcaaaaatacattttccttgtttctgaggaaaaaaattagsatcatattcctgaattactgcattgtttatagaatgggtttgttaataattaattacaccaggcagtctacggaaaggtaccttattttgtctgctatttcactctttgtgtcaggaaaaatcttccctcatgaatcatgtttacaagatggttgactaatgaaatgccaagaggactctgggtaacagtatatgaatgactatgatcatgttttgtataatttaacagacatttggaatatcacagagtcttttcttaaaaaaaaaaagtttacatttttggaggcagagtctcagtttgttrcccaggctgaagtgcagtggtgtgatcagagctcgctgcctcctggaattcctgggcttaagcaatcctttcacctgaccctctcaagtacctgggactacaggtgtgcaccaccacccctggctaatttttaaattttttgtacagatggggtttcaccatcttgcccaggttggtctttaactcctgggctcaagtgattctctcaccttgaccttcataacagagtcttaagcaaatctctgaatatctgaaggggcttagttctttcaaatattgctttcatgggactttaaggttgcagttcaagtaagaggtagatgataayttcttctcccagactggtctacttcctaggattctagaattttgacggacaggtctccaacatgtgaccatacaaatttgtgtaaatttctaggacataacaataaataaaggattttttcccttgtagcaactgtaccattgaaaatggagaagtgtttgactaataacaaaacatgtgactgccatgtttattttgtttactttcctatggaaaagtttcttagaagatcagtttcaaatgttagcatctttaagagagaaaattttcaattactgtatttaacattagtaagtatgaaccaacaatgtgcatacacatgtgtaagcttatatttaycagtagcctgatgtgcctcaacaattgaaatggtagtttatatacttactggcacctctaattctcctgctattcatttatttagctattggtttattttgatttaaagtggggtttttaactwtttaattgaaatacagcttaaattctgagaaatgtctagtttttaagtgcagctcaatgaatttttacaaagttaacgtatctgtacaaaaccacatggatsaaaacagatagtttccctcgtaccgcctcctagacattacctcccaaagattccattctgatgcactgaattctatcaccattccctaattttgaaatttatatagatgaaattaaagagtatattctttgtccagtctgccttctttcactcaacactgtctatgagattcatgcatgctgttgcatatagatgtagttcattcttatttgtttcttttgctatagaacagaagtcagcaagtcacagctcttgggctaaacctgacctgtcacctgtttgattagaacacagccatgtccattcatttacatattgcctatggcagttttcatgctacaaaatggtagagtttggtcatgatagagaccatctgatccccaatacctaacatatttgctatgtgtcccttcacagaaagagattgccgattaccactatagtgtctaaatattcttatacatgtctttttgtgcaaaaaattacacacattctttcaagtatctacctataattgcaaattgcaattgttgggtcatagagtgtatatgtgtgtgtgtgtgtgtgtgtgtgtatgtgtgtgtgtgtgtgtgtgtgtgtgtgtgtgtagttcagctttattctgccaaaaagttttccaaactggctataccaatttatcctcctaccagctgtgtacaaaagtcccacaaataatttaacactcaatgattaacttaagtaaaagttagaatgcataattcatcatttgactcaataaaaacagtttatgtaatagcctgtaatgaagatcatgattatcatttaagtaaacaaatcatcaggtgttaccatcaggttgatgatggtagtaataaaatgagtaaattttatttgctgattatccatgagcattaaagagttgatgaagtttgttgcataaactgaattaatagttattctttgttgaacacttgaaaataaatgtcccacaaatgatcctagtaagtgcttactcacccacagggaactataaacaaaaccctggttcataaataaaaactgttttctgtcgacctaattaattttcattttttctttctcaacaaaatatacaactaactatattttacagatctaaagttataatatgaaaagttatgattaagggagtgagggctgaataggaggaacacagaagatgtgtatggcagttaaaatattctgtatgatactgtaatggtagatacatttgtctatagaacatgcaacatcaagagtgaactgtgatgtaaactgtggatttgggatgataatgatgtgtcaatgaaggttcatcaattataacaaatggaccactctgatgggggaggttgacaatgggaaagtttgtgatgtgtggtatgtggggtatatgggaaattgctttaccttcctctcaattttgccctaaaaaaaccaaagacttaaaagacttaaaaaataatagttaaggcatcatatttggaaaaatcgatagtttagtcctttactatgaaatcatatagcctaacacttctaaacttaaccttcatgtgttgttttcatggactttatacatacttgctctaggaatgaaacagcagtgttttcaattggccttttttatcagtttctctcagtattgggtatgtgcaggtggggagggtcacctttagctagtatcagaattgagttgaatgcgagaattataaatttcgtataaaaaaattcaagaagcgtttttgctaccaggtggtaaaatcatgcatattttttatttccctttttttgtctctttatattttccaagtgttcaataaaatgtggtcattcatttttctaataaaagagattttaggttatttctctgatttctaagagtacaaagggtgtttcttattgtttgtttgcattactaaaacctacatctcccaagtataaaggttttgataactgactcccatggtggaatatgcataaatagagaggtggttgtgacttcaactgtgccttaaggtaaccactacaccagttgctgcatcttagagttgagtcagggcttttattaaacctctctcacaaagtcacctgaccccaaacaaatggaattcctgagatcagccatccttttgcagagggcatgtgacccaaaaatccagtaccttgtatcatagatcaacatgccacccattgacatccagcccatgacatagcacagaagttgcaaaacaataggaaagtcaagtaactgaggtttgtggttctgcggcaaatggaagccttccagaaccaacacactaagagtctgttgcagtagggatgggtgagagctcattgcacaaatgatatcaagtaatgtggaacaaaacactgtggaactttctgaggttctcaaaatcgaaacatgtaacacagccacactagtacacatgcatgcacgtgcacatatacacatrgagacacagcytgcctctgcctcagagacaycctcaagatgttatcaatacatgtttcaattatgccaggggaatttgcagttttcattaagctaagagacaaacaaaaggcaattgcacatttccaagttcaagatctctattttcttcctttcttctcaaattggacccaaaargcatagttttgtctgagggaataaaggtacagttattttgtgcaaccagttagtttactttcactgttcagagaagaaacggagagaaatgctatataactctgagtgtcctaatgtctgcctcaaatatatgaagatcctgctgatacaaaactctataaagaactacaaatacagtgtgattttccaaagatgaatggttatgtatatgtgcatgtgtgtatagaaccttaagtggtaagaaaaattttaatttgatttgattcgtcgtattttgtcctgcattttacagcttttctaccatcaacatgtattactttcataatagaaaaaataaacatgagaaagaaataacctgttggtaactttttttaaaaaaacatggaaaggaaaggtgattggcaatctcatccttagaacacttccctcctcggggaattctttttatacttgatttgtctttagagtgacttttttctatttttaatgaagggggctacctctgcttctgttttttctctaaaaggggataaaaagaaatgggggaaaaagctgagagcagtgtgcagctgaggtccagtgagctctaaagaggccctgaaaggttgttcagggacagcatcctgttgtagaactttcccgaggacaaagagacaggcaagtctttgttcaggctctatcatctagttcattgttctctcattgaaaaattaaaatgtgttgtgaccacttgtttttaacataaaaagctttttctgggttttttttttcttttattttttttgagacggagtcttgctctgttgcccaagctggagtcagtggtgcaatctcggctcattgcgacctccrccacgagggttcaagtgagtctcctgcctcagcctcctgagtagctgggactacaggtgcacaccaccacacccggctaatttttatattttcagtagagacaggcgtttcaccatattggccaggctggtctcgaactcctgacctcaggtgatctgcctgcctcagcctcctgaagtgctgggattagaggcataagccaccatgcccgtccctctgggttcatttttaaagtaaatcatcatactggagggaaaatcagtggcttcccaaaagtatatagtgtctttaattgtacccataatcattgtgactccaaagagcagtgtcaagtaacagtcatatactaggatttctaatgtacaattataaagtaatgataaggaaaaagttgatttgtataatattttgcttatactctgagcctggataatctagagcgtatataatattctatagctatatgatctgataatgatggatttgtccagtaaaagtagataatgagttccaaccaaataggtgcactcttctaggcaccagaaaaacagtagtgaataaaacagacaaaacttctgtcccaggagcttagattctagtaggatgtgggggtgcagtaaatggacagtaaacagtataaaaaattaaattagatattgcaggctgggtgcagtggcacagtggctcatgcctgtaatcccagcactttgggagcctgaggtgggtggatcacctgagctcaggagtttgagaccagcctggccaacatggcaaaaccccatctctactaaaaatgcaaaattagctgggtgtggtggcgtgcgcctataatcccagctacttgggaggctgaggcaggagaatcacttgaacctgggaggtggaggttgcagtgagctgagattttgcagttgcactccagcctgggcaaaaagagtaaaactccatctcataaataaataaatgaataaatgaataagacattgcattgttttagaacatgatggactataaaataaataaagcagaagtatctgtgagaaatggagtaacagtggtagaggcggaggtgagggtgctgatttgagaaggtgaacaaggatctgcttgttcaggagcagcaggatctgctcaggatctgcagcaactgtcctaggtagaaggcacagcacctgccaaaggcctggagcaggagtgagcctggagaacccaaggaacagaaaggaacaagtgtggctaaagctgagtatgttaatctgttctcaagctgctgataaagacatacccaagactgggtaatttataaagaaaaagaggtttgatgggcccacagttccacatggctggggaggcctcacaatcatggcagaaggcaaaaggcacatcttacatggtagcaggcaagagagaacttgtgcagggaaactcccctttataaaaccatcagatcttatgagacttattcactattatgagaacagcatgggaaccgaacctcatgattcggttacctcccactgggtccctcccatgacacatgggaattktgggagctacagttcaaaatgagatttgagtgaagacacagccaaaccatatcaccaaggaatgaggattaggagacaagaggtcatgggaggcagaattgaggagtcctcatgaggactgtagatttattctgcatgagatgaggagccagaggaaatttttgaacactagtgtcatggaatctgacttcctttttaaaatactggatatcttaggttgattttgaaaattaacaaaataaggaaaaagtgcctgcagtatattgccattgtccttaaacaagcactgaaaggatatgtttagggtaataacaataaagagatttaaagccatatgttatatatgctccagataagtaatatggtaattaatgttcatctaacatagaaagttcaactagagaacataccactttaaaggagttaggacttagaaaggaaaagtgattggcaatctcgtccttagaaaactcccctccttggggaattcttgccgtacttgatttgtctttagagtggcttttttctagttttaatgaagggggctacctccgcttctgtttttctctctttgactctctacctttcttaaagaatagcttggtatcatagttaatggcttactcaggaaactagttttactaaaaaacaaaggaaagagaagcctctcctttttccatgatctttaaggtaggtgtttacaaatgctagcagagttaagcaggctccagagtctctttatgacagagcagggactctgcattctcagaaagttgtcyactgacaacattagtggtgccattgacctaggctagaatgagtagcgctccctagggttgcgatgtggcagccctgggcatgagagattggttcatcacagacatcaggctttggcctctctgatgccctttttgtctgagaaccatggactgacccaaataccctctctttgatttattcagtcagaaagtgagaataccagcatttctctactcccatcccctttaattttacctccaaggaaaaatttgtgtgaatttttaaagaaaggcacatctatacagaatttataaggtaactcggtgaaaaggagacccaaaacacaaaatataattgtccactcagtttggccagcaattattgagcatctactgtaatcctagaactatgcttggtagtaaggataggaagaaatgagtgtggccccatctcccgtgttctgttttctagcattatacagtcagccccctctgctctgcaagagaatgaaacaggactggccctttccctgcagtggcattgttttacaaactcatggatattcaggtacacacatcagcctggaacctgggcctcctctatgagttgtttcatgcttatcctggtcaaagcattgataggcccagaaaagtctataatgggtagattcaattgacagtctggagacttgattttatgtcctggctccttccccagattgtacaccataatctctctctgtctcaaattccccatccttcaaacatgtccaacaacccgctatgtaaccccaactttaactgcattgcttatgagtttgaatgaaataacaatatgagtaaaggacacaggaaaaaaaatcaactgtctatgccaatatcaggcttgtaaagggtatggtcactttctatcaagaaaccttggtagttgagtgaaccacatttttctttagtgtgcctttagtgaaaaatgactaattgaatagaattgctagcaccagaacttcagctttcaaaatactaagctatcgctgtgaaggagacagtcctgaaatctgtgaccttggatcaggcacaacaacctatctgctctcaggcaccaaaagcagacttgccaagcaaatattcctggagtcaatttcctgatgaattctttagggtctatgtccataactgtccttcataagaatgagggatgcttaattttgtaggatactaaatggtttggcttatctgctttctccaaaatacatgctgaaactgtaggaaagctcatggccgaatgaatactcgtataaggagaagactaargaggtcatgggcaagagcacataatagatatccacaaggggccagcgccacttgggcaggacctgaaggccaaccaagactgtgaatccccaagccaaggtagctgagaacagagaaagtcaatgactcctgtagaagcattctcttcatctctttggaagccttggcaagggtactgtggctattgaagaaaggtttgctttttggcaacactgaaacagatttaaattcatattgaaacaaatgacgcaagcatctctagttaaaatagctttgttgggagaactggctagccatatgcagaaaattcaaactgaaccccttccttataccttatgcaaaaattaactcaagatagattaaagacttaaatgtaaaactgaaaatgataaaaaccctagaagaaagtctaggcaataccattcaggacataggcacgggcaaagatttcatgatgaaaatgtcaaaagcaattgcaacagaagcaaaaattgaccaatgggacctaattaaatgaaagagcttctccacagcaaagaaactatcatcagagtgaacaggcaacctacagaatgagagaaaatttttgcaatctatccatctgacaattctaacatctagaatctacaaggaacttaaacaaatttgcaagaaaaaaaattaagaaagtgggcaaatgacatgaacagacacttctcaaaagaagatatttatgcagccaacaaacaaatgaaaaatagcttgacatcactgatcattatagtaatgcaaatcaaaaccacaatgagctaccatctcagaacagcgattattaaaaagtcaggaaacaacagatgctggtgaggctgtggagaaataggaatgtatttacactgttggtgggaatgtaaattagttcagccattgaggaagacagtgtggtgattcctcaaagacctagaaccagaaataccatatttgacccagcaatcccattactgggtatataaccaaaagaatataaatcattctattataaaaacacatgcacacataaattcattgcagcaccattcacaatagcaaagatgaaatcaacccaaatgtcaatcaatgatagccaggataaagaaaatgtggtacatatacaccatggaatactatgcagccataaaacggaatgagatcatgtcctttgcagggacatggatggagctgggagccattatacccagcaaactaatgcaggaacagaaaaccaaacactgaatgttctcacttataaatggcagctgaacaatgagaatacatggacacatygaggggaacaacacacattggggcctgtggtggatggtgtggagtgggggtgttgggtggaagggagatcatcaggataaacagctaatgtatgctggacttaatacctaaatgatgggttgataggtgcagcaaaccaccatggtacacgtttacctatgtaacaaacctgcacatcctgcacctgtatcctggaacttaaaataaataaaaatttaaaaaataataaaatagctttgtaatatacatttcacatattaaaatatgcatttttctagggatagctttgaaagaaacttctctataatgaggaatgaatcagagcttgttagcatgaaatcatatttcagggtcttccttggctcattagagagcaaaaggtctcatagatcaagagaaaaaaacaagcaaaggggagaggattccctatttattaatggtgctgggagaactggctagccatatacagaaaactgaaactggaccccttccttacaacttatacaaaaattaactcaagrtgggttaaggacttaaatgtaaatcccaaaactataaaaaccctagaagagaatctaggcaataccattcaggacataggtacaggcaaagatttcatgatgaaaacatcaaaagccaaaattgacaaatgggacctaattaaagagcttctgcacagcaaaagaaactatcatcagygtctgagtcatttttaatgtactgtataatggaaaaggaccccatggctattcagagatgaaggaaggaaatgagatgataggaaagagaaaataacccaggtggggaaatgatgaagatggtgttgaactagtgaagtgccatgctatagccaacagttgacaagagtgttttactagagaaaatagtgactgagtcagtgcaaaaaaagtgacctttctcatatcaaaaatccagcaatttattgtttctgtaaatatttattgagtatctagtacgtgccagccattcttctttacctgcgtggaaatagcagtgatgaaaataaacaaaatcccttgggtctcataaagtttacacttcattggtagagataaataaagtcaggcaaacacatacttaaatcatttcaggtcgtgatacagactatggagaaaagaaaagcaggataaggggacagggagtgacatggtggtggcaggtgggtagcttttgtggagaggctggtctaagaaggcattccaggcagagagggcaacaggtggaacaagaggaaggccagagtgtggaatgggatgaacaagaggagaagcagtaggaggagatgagttcaaagaccccagtggggcaaaattatgtggggtctaggccagtgcttctgaaactttaacatgcatgcaaatcacctgggcatattgctaaaatgctgattttgattcaggaagtcgaaatggggcctaagattaggtctatttaacaagttcccactgatgctgataatgccagtccccggtatacattgtgaagagccagttcctaatccataatggagagtttagatttcattctattatatgtgcagtgttctgaacaaggagtggcataacttatatttttagagatcacatttgcttttgtatggaaaatagattctacgtgggcactgggaaagaactacgacattcgtcagggctggaaattagtggtttggcctagggagactgtagtggggcagcgagacgtttggatccaggcaatattttgaaggtagagctgataatatttgccaatgaattggaggtagtaaacagaagaaaagagggaagcgtgcatccttggcttaagcaactgaataatggtgatgtcatcagctgagatgggaagaggagggtaagggatagtggatggcatggcagcagagcaggtgggggtatggattgagttgtgtcctgccaagattcccattctgaagtcctattcccccgtacctcagaatgtgatcttttctagagctagccgtctttacagaggtaatcaagttaaagtgagataattagaatggaccctaatgcagtatgactgatatccttataaacaggggaaatttggatacacagacacacatatagacatcttcacgcaaacatgaaggcagtcatcgacaagccaaagagaaaggcctgaaacagatgcttctctgaaggaaccctcagaaggaaccaaccctaccaatatcttgatcttagacttctagccttcccgaactgtgagaaaataaatgtatgttgtttaagccacttagtttatggtgctttgttacagcagccctagcgtcctaatatagtagcgggaaagagagattgctcttttaggcagaccccgtcagagaaggagtcaattttaatgatcaggggaaggagctttccagaaagagagagcagcatgtgagcatgtgtgaaagctgtgatataggaacagatggtgtagaataaaaattttattttgaacccaaaaagtagtgacattactgaattggagtgttaaaataaaaaattcattggactagaattcaaaagacattggtatgagttctaactctgccacttactcattgcatatggttaagcaagtgtcttaaactctttgaccctcagtttcctcactggagataaactacccacggcacctatccaccaggctgctgtgaagtccagataaaatagaaatacatgtgaaagtaccttacaaagtatgaaaccttatgtaaatttagttgtggcagctgttttctcattgttgctgcagctggtgttattgttccagccataatagataataatgtgcataacgctatagtaaacagggatgtgccgggcacggtggctcatgcctgtaatcccagcactttgggaggcagaggcaggcagatcacctgaggttgggagttcaagaccagccttaccaacatggagctaccccatctctactgaaaatacacaattagctgggtgtggtggtgcccacctgtaatcccagctgcttgggaggctgaggcaggagaattgcttgaacctgggaggcagaggttgcagtgagccaagattgcaccattacactccagcctgggcaactagagctaaactgttctcaaaaaaaaaaaaaaaaaaaaaaaaaamcccaaaaaacagggatgtgtctgctccagacatgcaactcatgggtcatgagctttgatgttacaagaatgcttgagagtctgttttggctactgtcaagtcatccatcttattttttagaagctaaaaaatccaagttcatgtgattttaattataaccatacttttatttaaagtgggaaggaacagaagattgtggtagcataaatcataagtcatctaatctcatttaggttatatgaaaacaagatggaaacctttgaagttagtgtgtttatttgctaatctacctccctcttcctgctgcacacatcacactgtggttctcagaattgttcagatgggaagtatttttttgcagaaatttttattttaaaaataataacttcagtgtctgctctaaatcaatattccgttggtcagaaacgaaccatcttagctaccactgttgcatcaaattttgcagctcatggaaataagccaagaggtttttatgaccattgataatggactaaaagaaaacccaagacagatagatgacagctgcaatgttcttggcacagctaaggtgggttgggagtgggtgtgaggagagaacaattcagaaatactttttaaaaaacaatctttcacccccacaatgtttgggggcttgtttatatgtatcattttgtatttttgtaacatattctattttaattttacctcattgtggtaagaccacttaacaggagatctgcccttttaacaaatgtttgagtgtatatacagcattattgactactggtgcaatgttttayagcagatatctagagctcattcatcttgcataactgaaactttaagccagttgatgagtgattcctgattttcccttccccgtacaccatggaaaccaccggtattctactatttgattctatgaatttgactagtttagataccgcatataaatggagtcatacagtatttgtctttctgtgactggcttatttcacttagcataatgtcctccaggttcttccatgttgtcacaaattgcagaatttccttttgaaggcagaatagtattccattgtatgcgtctaccatattttatttttccattcatctgttgatggatcttaggttgtttccatatcttggctatttgaatagtgctgcaatgaacatagaggtgctaatatctcttcgaggtcctgacttctgttcttttaaataaatacttagtaatggggttgcaggatagtattatagttctatttttaatgttttgagtaacctccatactgttttccatagcacctcaccattgtgccttcccatcaatagtacacaagggttccagtttctccacatcctcaccaacatttgttgtcttttttctcataagagccatcctgacaggtataaggtgatcactcattgtggtattgatttgtgttttcctaataattagtgacactgagcatttaaacaaaatttatttgttggccatttttatatgttttagagtttaatctatttcatattgtcctcttttctgtaataaattatgttttgttagaagatgcccatttgaayggtaacactttagttggccagtagagagttatttccagactgagtcaccatcagctgcatgtgctgccttgctattcatgcccccactcataagagcaggaagacaattcagtctccatgtactaggggtcctctgttcctctgctgatattcagactttataaactgaagaatgacatgaatcaatgaacaagactaaaccattcctaacatcttggtaatgcagtgttcaaaagatgttcttttcagatgcctagagcaaggctaaycaactgttatacactaactagtaactgatcatctataacaatagataacatagactggacactgttatgtgattcccatacattattttgttaaatctcaaaataaccctgtaatattttaagtgctatcaatatcctctcattccaattaaccaaatctctctgtgtgtctatatacatatatatatatcttataaatgtgtgtatgtgtgtgtgtatatatatatawgtacatatataaaattcaatcctctctacaaaatactacacttttcttattttcatcatatgggtgttatgttccctgaaacactgaccttgagaaataatcagccaattacagtagaaaattttaatgatttatattcaaagattgaagtcttactagatgtagcaatttctggtgaaagaaaagaaagtaaatgatttcttcccaaatggctcaaacagaaaaaacttggaagtagttagtgttgcatgtgcaattctctgactctcttttccaggctgatcatttcttggcagcatgcctgattatatctaggcagttacaccccagaaggtatattctcatagtcaggaatatgtgacagacacctctygtactttaagtcaagatattatagctatctttacagctacacaatcatcatgatcttgcaaatctggagtcctcctggtgtcaccttttctgatccaaaggttcaaaatcgcttcaattctgtcagcatgtcaagtgcttacagtttctgagatggtgctggtggtttctaagggtgaatttgcaagtctccaaaactcctctctggagcttcttctggagatcacacactcaaatgcctccaggagccaaaagggtgaggtgcaagagtgagtgaagccaactgggttcartacaagagacagtgatggtgctgaggcccctggagagtatgtgcccccaactagagcagcagctgctgctctgccactgccacaaaatgtcatgagggaatgcaggctctgtgtggccaactccagtcgttttttttttgttttgttttttgtttttcaagaaaacctggaaattcagatgtctgtgtaaaatatactgattgataaatgttggcaactaatacagatttctttcttttaaatacaatgcagcaagttcaccaggccactactttgcaacttacactttaggggttctcagtggggaagaaagtgccaaaatattctcctgcacttccctcagcagcttttcctctctgacctctcacaaccagaaggatatcataagcagtacttcccttccactaggaaggatatgagctttgaggaaagtgaggagcaggtccttcaaagaaaatcttgggctcccaaatccagccctttccctactgcctttggacagaggagtatgtaactcaagatcatcatagacaagaatgtgtgcatatttgggtttctccaaggaactacagccttgtagagcactgcagggcctctggctgaaataaggaagttgggaaagtaaagaaaaggattctattttcaatgttctgggcttaagagaacagcaaaacttccaaattaaaacaacttaagacattttgggtagattctcaatgagatttaagactaaaaattatatatttggcagctataaaaatagaagtgatatactcactcccccaatggggataccttaggtgccatatttggtgtcacagtcaggactgggacagttggtaaattaacgtggactagaaccacccacagcagtgagaccttacagtgagctggagaggatgtctccaaccaggccatggagttggagacaaatcctccaaccagaatgcaggatttggaaccttggaaactcctaggtgattctttacagaaaagcaaagtctagcctcagggaacccagaaatggtggcgttccagtatccagacctgcagccgataccacagaaacctgtgtagagtgggaccatgaaaacagcccacttactagatcccagataatcaaactagttacaaatgagtttggcaaactcttagaaggcagggaactatgtaatcccttagaaaaattctkatcaaatgtttcagatgaatcccttctgaacttttacactctattcctcaagcagcattctccacagttcaacttttgctttcctgggccacttgaggaaggagcaggaacagagagagcagcaaaggtcctctggtcatcacaataagttctcagcccccataaaggccctcaagggtcaattgtactgtttccccaatggcgctgctgggagctgcttgattccacacctctacctggggaagggctgcagtgataatacacctgtttacagggcagagcgggagtaagtaaaacagacctcaaagaagatgaaggacagctttccattttttcttccttaggtctttagaattcatttgttatacctctctctaaatgattccataaactacatcttgaccacttaaaaagtaaaatggggaagacagcttaagccatcttttaaatcatagcaaatgccaagaaatgtctcagaggccctgtgatatccctttgcttagagctattttcattattattgttatttgccttggcagtcaaattctttacaagcagtctgatctgcraatagtatgataataactttggggatgtcagccttgacattttattggtttgggcttcctgctggttcacctaggctatttcactttctaaaaccacacactttctatcccattcattatctagaggtccccacatccaggcagcagagaatgggcattgatgtctttacctagtgtaggacctctatacatctgtccagatatggggaaatagaaatccatcctctgaattctgtgtattctgagagagcttgaagtcagtttgtctgactagcaatatcctggtcaacacagggagggaggaartgagatgagaccagccaagcagaagcattggccctttatagcaagaagccaacaatctatatcatctggtccaaagaggtagaatcctcccgcttcaggttaagacaacagtaatggccaaccataggagtagatgggcaggggcttctgagaggctgagggcgctaatgatgtctacacgatcatagatctagggatccagacctgatcatggaggatgggtggagatatggttcacctccagagaaatgggattgaaaacatttgatgakgggccaggatcattttgccatcagcttggattcagattcggtcccagctccacccatgaaacttgaatagactccagggccgaaagcagaaaactactcaaacagtctgctttctcttggcattaaggacactgcctccaaggcatgctgaccttgagggttatgatctccctcaagtcaccaaagagaaagtacaagtggagtagcttccatacccttgtcaaaggaggagatggatcttttaacctacagacctcactttcattgggccaaggtggggaccgagaccaatttattatccctaagagctgcctaggccaagaacaggagcaataaagaggctgaggtaggaaaggagaaaatgagagaaagggggtgggttattattaaaaacattggctaattcagatgaccatcttcaaagtgtccctgacttaaagtgaaattgcatgggcctagcataaaagctattaggtgggggcaaaagtaattgtggtttttgccatgaaagtaatggcaaaaccgcaattacttttgcaccagcctaataactccaacagattgagaacaatactataattcatgagttaagaagtatatacatgtgtatactgtaatatacacataatgagtatattataatttatgtctacctgggctaaagcaggcaaacctgtacggtaatgcatcacttaactgtgcggatacattctgagaaatgcatcactagcctatttcatcatagtgtaaacatcaaagagcacacttacacaaacctggatggtatagcctactacgcacccaggctatgtgctctagcctattgctcgtaggctacaaacctgtacagtatattactctgctgaatactgtaggcaattgtaatatagtggacagaatttgtgtatctaaacatagaaaaggtacagtaaaaacatgatacaaaagattttaaaatgttacacatttctagggcacttaccgtaaatggagcttgcaggactggaaattgctgtggatgagtgagtgagtgagtgagtgagtggtgagtgaatatgaagaccgagaatgttactgtacacttctgtagtctttataaacactgtacacttaggctacactaacttgataagaaattatttcttcaagaataaattaaccgtagcttacaataatttttttactttatgaacttattactcttttataatttttttactcttataatacttttttactcmtttataataacacttagctgaaaacacaaacatacgactgtacaaaaaaattctttatacccttattttataagcttttttctattttcaatttttttaacttttgaaacttgtgttaaaaaccgagacacattgattttgtatcctgagactttgctgaagttgcttatcagcttaaggagattttgggctgagacaatggggttttctagatatacaatcatgtcgtctgcaaacagggacaatttgacttcctcttttcctgattgaataccctttatttccttctcctgcctaattgccctggccagaacttccaacactatgttgaataggagtggtgagagagggcatccgtgtcttgtgccagatttcaagggaatgcttccagtttttgcccattcagtatgatattggctgtgggtctgtcatagacagctcttattattttgaaatatgtctcatcaatacctaatttattgagagtttttagtatgaagcgttgttgaattttgtcaaaggccttttctgcatctattgagataatcatgtggtttttgtctttggttctgtttatatgctagattacatttattgatttgtgtatattgaaccagccttgcatcccagggatgaagcccacttgatcatggtggataagctttttgatgtgctgctggattcggtttgccagtattttattgaggatttttgcatcaatgttcatcaaggatattggtctaaaattcccttttgtggttgtgtctctgcccggctttggtatcaggatgatgctggcctcataaaatgagttagggaggattccctctttttctattgattggaatagtttcagaaggaatggtaccagttcctccttgtacctctggtagaattcggctgtgaatccatctggtcctggactctttttggttggtaagctattgattattgccacaatttcagatcctgttattggtctattcagagattcaacttcttcctggattagtcttgggagagtgtatgtgtaaaaatcacaagtattcttatacaccaacaacagacaaacagagagccaaatcatgagtgaactcccgttcacaattgcttcaaagagaataaaatacctaggaatccaacttacaagggatgtgaaggacctcttcaaggagaactacaaaccagtgctcaaggaaataaaagaggatacaaatggaagaacattctatactcatgggtaggaagaatcaatatcgtgaaaatggccatactgcccaaggtaatttatagattcaatgccatccccatcaagctaccaatgactttcttcacagaatttgaaaaaactactttaaagttcatatggaaccaaaaaagagcccacatygccaagtcaatcctaagccaaaagaacaaagctgaaggcatcatgctacctaacttcaaactatactacaaggctacagtaaccaaaacagcatggtactggtaccaaaacagagatatagatcaatggaacagaacagagccctcagaaataacgctgcatatctacaactatctgatctttgacaaacctgagaaaaacaagcaatgaggaaaggattccctatttaataaatggtgctgggaaaactggctagccatatgtaggaagctgaaactggatcccttccttacaccttatacaaaaatcaattcaagatggattaaagacttaaatgttagacctaaaaccataaaaaccctagaagaaaacctaggcattaccattcaggacacaggcatgggcaagaacttcatgtctaaaacaccaaaagcaatggcaacaaaagccaaaattgacaaatgggatctaattaaactaaagagcttctgcacagcaaaagaaactaccatcagagtgaacaggcaacctacaaaatgggagaaaattttcacaacctactcatctgacaaagggctaatatccagcatctacaatgaactcaaacaaatttacaagaaacaaccccatcaaagagtgggcgaaggacatgaacagacacttctcaaaagacgacatttatgcagccaaaaaacacatgaaaaaatgctcaccatcactggccatcagagaaatgcaaatcaaaaccacaatgagataccatctcacaccagttagaatggcaatcattaaaaagtcaggaaacaacaggtgctggagaggatgtggagaaataggaacacttttacactgttggtgggactgtaaactagttcaaccattgtggaagtcagtgtggcgattcctcagggatctagaactagaaataccatttgacccagccatcccattactgggtatatacccaaaggactataaatcatgctgctatgaagacacatgcacacgtatgtttattgcggcattattcacaatagcaaagacttggaaccaacccaaatgtccaacaatgatagactggattaagaaaatgtggcacatatacaccatggaatactatgcagccataaaaaatgatgagttcatgtcctttgtggggacatggatgaaagtggaaatcatcattctcagtaaactatcgcaagaacaaaaaaccaaacaccgaatattctcactcataggtgggaattgaacaatgagaacacatggacacaggaaggggaacatcacactgtggggactgttgtggggtggggggaggggggagggatagcactgggagatatacctaatgctagatgacgagttagagggtgcagcgcaccagcatggcacatgtacacatatgtaactaacctgtacattgtgcagcacatgtaccctaaaacttaaagtataataataataataataaaaacagactattaaacagactactggtattttggtttcttttgttatctaacaaaaacatcaaataaaattactacttttcaatttcaaaaaaaaaaaaccgagacacaaatgcacacagtgatgttgatcatcttgaccctgggtaggcctagggtcaagatgatcaatatcactgtcttccacctccacatttttcccacaggaaggtcttcaggggcaataacacacatggggctgccatctcctactataacaatgccttcttctggatacctcctgaaggacctgcctgaggatgttttacaattaactcttttttttttttcagaagtaggagtatactctaaaataaagtataatatggtaaatacatacaccaataacatagttgtttattctcattatcaaatatcatgtgctgtacaaaattgtacatgctatactttcatatgcctggcagagaagtaggtttgtttacaccagcatcaccataaacagtgcgatgcactgtgctayaatggttacaatgactatgaagtcactagacgataggaacttttcagctctattataatcctatgggaccatcattgtacatgcagtttgtcattgacccacacggtcttacacagcacatgactatacttatcctgaccccccctctttctaggtccatgtcatactcttgccacccatgtttgttaagaactcttagtttcatgtatcaagcatattgccaaattggcttaagcataaggaggggatgtattataaggacctaccgctttgtagaactcaggtttagtaaatctcttgctgagacttggaagggaactggaagtaagaacaagagcctgtttctgcttctctgaacatctgctttatttttttctctcggcccagacaggctttctctgactctcaggttcacatgttagctctctctctctctctttctgctactttcttctctctgtctcaacttccaaacacagggagagaatctgtctggcccagcttggatctggtgcgcatcccttgttcaatcaggaactgctaaggaaggggcagtctatgtattacatcatgacccagaggaatcttagtgacctgtgtttcttaaactttgacatgcatatacatcacctggtcatctgctttaaatataaaatctgatgaagtctgggatgaagcccaagattctacattgttaataagcccccagttgatactactgctactggtctatgaatcacatgtagcaaagttctagaagatgggttgtggcaattcccagagatcatgaagccattttttttctgtgccaaatgcaacacgtggcctttttatgccatacttctggctcctggatactcatcacaccctgtcacagagtgaggtttcttcaaatgtgcttgtcttctctgagtggaccctcatgtcctctaaaggcttctcccttagactcttctaaccaccaacctcagaagaactcccagtctctgttttgtcctcatctagttttcatggaaaaaagtgatctgatgagcaccattaatggtagtctaatccatgagtattcaatcaaaagtatttatgaaatattgatgtatttccttttttatttacaaaaataaaaatgccatatggctaaagaaatgaatctctaatgagggaatttcaatcattgtggtaggtagacaaaaaatttaagacacacacagtgctacccarttgtgctttggggtctggagaaaccgtggatactggttgccacactgactgacttgttgttgactcagcagtgggctgagttcacccctaccatgggctgaactgacttcagaaccaagggcagtgaccaaagagacctgtccatgtcctagctaaaatcattcaggtaatatatgtgaaattaatcgtctacattcaaaattacattttgttgtgtgtaatatcagttgagtattttcataaagaaaactacctacattagataaacactcagccaacagaggagtacagatgggcagtatcgagtacttgaatccttagtgttgtgcagggtataagaagtgtcccaattattacatttgtcttaaagcctataaaggttttttaaaattcaattgaaataagttggttatagcactaaagtttcctaaataggaactgtctttttgtgtctcatacgtgagcatttattgaaaatactcccccagtatcctataggcatttctctaagccttcccaagaaagtgattctctgcagtctatgtaagaaggattcattgatttctgaagacaaaaatgtattgatcttctatataaacacccagaatccatttgaaaatgctacaagattttgttgcctcttgtacccagtggcacgaaaggaagatgatagctgcttccagcaaggccctatgtttactcaggtttcttcatttcccatatgtgtgtgtttgcacaccaagctgggagcatgtattcccatcattagtaacctcttacaaaatagacttcctcaatttactgcaaattctgaaggaataaaaatgaagcaaataaatgtggtccatctttcttcaggacctgatgctcctgcagtgtgtatctggcaattctttcatccacctattagaccagctggaatggggaaagaggaatgctttgaataagaatacaacagttgcaggaagatttttcatcagccagagctgttgataaaacagtcagcttgaggttaggagtgacgcatattggagtctctgcctaagacatcgaagttattcatcggaagacctgaaagtaaatcatagtctcccaattgttttgtttttttgtttgttttttttgtttgtttttaagctagtgtcattcaggcaatagcatgcatccaggctaatgctaacctagaatttgccagctcataattctactaataatttttcaaagtattgccatctaatctcagagagatagacattttcaatttgagtagttaattcctctagttacagaaattgcttgccaaatgtgcatattaatttaccaattaaaggagtcacctggatgatggccagcaatgtctcacgtggcacatgatggctctcctacacacccaatccaggtctattccaggaaaaatacctaattttgtgtagaaaataagacttagactggggtttaatatgagaaaaatgagaagaaaaaagacaatttcttactgcagtggttgcaaacctggatcctggaatcacatatgaacttgaattgtgatgataaaacttccttacttgtgttgtttgagtttgtcacccacaacatagaaatggttgctgtgaggtacactgagatcaggtgggggacgtgtatacagagtctgcacacgggaagagctcagagcttagagctgttgctacacttttctgatcccacctgcccagctctactcaatcttcaccagccctgaggaaaagagaacagaaacaaacaaaaaaaatgcaagcaaaggctacatgggagagagaatgggaagaactgtgaagaactttctagaactgttggcataccctcagaaataatggaatgaagttaaagtcttcttttcacttgctcttttgcaactaggctgacccagtctgagcaccagactttacactttatgtttgcatttctctctttgtgactattctcgtaagaaaaggactgtcatgctgctgtgttttccaaaagttcaggggtaaatgccactgagggaaaaaaaaccctccatatagctgtttccttattcaaccatgactgtcctgtagtgccatctgccctcacagctgagctgaacagagctcttgggagctccacaggcccctgggatgcagctttctgaggttggataggacaaggcaactagaggtttccagactattctagaaatgttgtttctttggaggtccaaagttttccatcattttttctacatgagtagaataatgaaaatgagtgtgaagaggaggctgaggaggagcaaaaagataagtccaagcattatttttctcatctgcaaagggaacaatttctttggacatagactccactttgacaaagctgctgcatccaaattctatactgtgaacaacttcctgtcatctagccacatttctggcatacacacaaaaggtgacagatattcatagtttggaatgcccaaaagtatttctgtcctttagaaggatttggaatgtaggaaaaacagagcaagttactgttcagttagttcaagcctggcttaattccaagcatttcaaattcagagcatctagaactttcttcgacgtactaccaagtacagagcttagagaagcatgcactttgatagtcccaaccagggtggccgtatacagtgccactgagaccttgacaacgtgttttctgtctccagatccctacagccaggtgtttgtgaggctggttgctcaggcaccgggcgatgctctccactctgctcccagcccgctgctaataaaacccatgggagccaattataatgctgttactcctccagcagaggttcagcctgtgttttatagaaggcactcatattgctcactagagaccctggaatcagagttctgttcagcgtttgctcgtattcactagaactatcacattactgaatctgcaaagaacacaaaacttgcctttttttgagtatatgtgggtaaggctcattgatagtgagtgtgagatgcattgacttgtttaccaaaacatctttgaaatgagagtaatttcagtaactgaagtgatgacattttgttttagccctctcctctgagtggattatgtgaaaatgtctaaacaagcaaaaatgctctttctgtacattgcaaaatggcagcctttaaagcaactactaatattgtttatttaaaggaaaacatttaggaaagtgtagtagccatgcaattaagcaagattttaaaaaactgcattctaaggagactcaatccagctttaagaatctacagaactggaacagaatagtggttagaaagttaaaatgtggttatgttttcagtgtggacatcctagctcgatggatcccagcaagatgacacaggtatgctgttcacatttcgattctaaatctgtcctggacagctctgtctgccaagtctgaaaaatgcaggtgtgagaaaagataaggaaacagtcacaattcttcatacgttttctgaatctcctttatgggatgaacctgtattagtgttactttcttcaacaagttttctttcagaaaggagttttatgattaggataagtccattttctcttcccaaagctttgatctatcacagaccaagaatctgatgaaatggatcacaatgttttgagaagagactgaaatattcccattgtgtgaccagtgccgtcctaggtttagacttgtggagcagaagaagtgagaagggaagacctgattgttgtttgtacatttttcacctgcagatagccttgaagcctcttcaaagagagagctattctgatcctgtcaactttctagctttctgttattaaaggagggtgtgtatagacctcatatctgtaaagtaatacctttatccaaaataaattatctttgcaagtaactacaacttgccttccaaacaacaaagtgatccttaactttgagacaggtcttgctgcagtagatgacacgccttgaggagcagacaataaagaacagaatttggcactttttaaatgatttgggataatcttctcagctcaggcgaaagctgttcagagtcacagggaatgtctctgggttgacagcaagaataaggtgatgccagttcataggagttgagagcaccaaccctctggactctgtattgagtaggagtggcccctgctcccaagtatctgacttgggagatgaagggctcctggatttgctgactagggggtttctctctacagttattgcaaaattagatgcaaacactggcctcgtgttcattccatttgtgattgtggtatctcaaatggaggccaccagaactgagccttcttcccttcagaataacacttgagttaagtcgcataagacagatcccacttattcctggagatgtctatctgtcccaaaagcagagagcagagtgtgctcgtgatcacaccaacgagaaggagcccctggttgcaggaagtactcccacttctttcttctgaagaagaaagaataagacacttttactaagcagggcctttacatttctctaaacagtgttgctcatctttttgcttttattcactaataaatacatgagaagatgaacatttgctgaagaggaagcaaataataaagacacacacacacacatacacacacacacatatataatcacctcccaatgaccctatctccaaataccaacacactggaggttgggaattcaacaaatgaatttaggtggggcaaagggagacaaaaatattcagttcctaatacatgcctatcacatttgtgaattacacagagccccaagggagactatgccctgtaattttgtgtccagtctgagctctgtatatcatgtgagaaaattaaaagcagaatggtatttagaggaaataaattaattgggcaatgttctagaaaccatatcatagaactaattgaagttaaagaaaccacagttccttatcattaagaaagaactaagagggaacacaacccacaaatattatttgtggatacttggagaattgcctgtagaagaaggatttgacgtctctgtggtcccagcgtgtggaattagtgaaagttagaaggaggtagattttggaaaaatagaaggtagaacttcccagtaaagaaagctcctcaaaactgtaaattagtaagctctttagcactgagctcatttaggcaggcaatcctctttcagagacattctaatggaaatatttaaattagacagaatttgaaactagatttctccacattctgactctaagatgttacattttaagagcccactgtttaataataatcaatctttaaatgatttgtataggtatagaagagagaatataaagaccgaagtaatctataatattatttttgtgttgaatgaagggtaagaagggagatacaaaatatgttcttcttccttagagatacagttaagatgaagcattcaaaggaaatggaagtgttctgatcaagtgggtaaaaggaattataaatttaggaatgaattgataactaggaaaatctcacctcagggaaatcgtgagataagagttttgttgtcactgttgctttgttttgtttaggggcctacattttgtttatcacatggctgtatctcttttatagaaaagacagactgatggatgtttattacccaataaatagttggtaagcttgttgcaaggaaacttaatctcaatcgaaaataaaatcgatctgtctgttaattatctgccatcactaaggaaatataacccttacataatcttgcttttatgtaatcagtttctacactatagtccactgtctctttttttatgttgggaatatataaaaattcattttctcctaacaatgatatgtgtttcagattaatttgccttctcttctgaaaattaagttctatgtaattaaaccaacggaaaatacaaacaacctaaaagatatcaattagaaggaacttgttaaaacacttgtggatacaatggttgactaaacttactagaaaatgagatgataagggcaggacagtatctattttatccgtcactatattgcttgtccttcatggtgactgctaccaggaggtcctcaataaaaatgtacgttatcagggccgagcgcgatggctcacgcctgtaatcccaacactttggaaggcaaaggcaggtggatcacctgaggtcggtagttcgagaccagccagaccaacatggagaaaccctgtctctactaaaaatacaaaaattagctgggcatggtggtgcatgcctgtaatcccagctactcaggaggctgaggcaggagaatagcttgaacccaggaggcagaggttgtggtgagctgagatggtgccattgcactccaggctaggcaacaagagcgaaactctgtctccaaaataataataataataataataaatttatgtaatcaaataaatgcaaaattattttcagggaaatattaactcagttgatgaaatatatgaaaatatatcaatcaaattcattctagagaattggtttaattacaatggtttatgttggtttttcaggagttaactgcccacttggtgggtttctggtttctctctattttcttggttctgtttgctgttttgttattgcatgagcaacagatgtttaagaatatatgaaactcaaattcaatttgaatattgattatgtctcaaatgtagttatagattttattagtagaaagtttgcttttatggaacccttatgggtccaaaacaaagaatatctaaagcaaatatgtggataatatggattatgtggggaatgcattgttgcagactatggtcagaaactctggaattgggactcagcaatctgttttgatttttggggtttttttgtttttttttttttttgagacagagtctcgctctatcgcccaggctggagtgcaatggcaccatctcggctcactgcaacctccacctcctgggctcaagcaattcttctgcctcagcctaccaagtggctgggattacaggtgcccgccaccacacccagctaattttggtatttttagtagagacggggtttcaccatgttggcctggctggtcacgaactcctgactttgggtgatctgcctgcctcattcccccaaagtgctgggattacaggcgtgagctactatgaccggccagcaatctgttttgaaaatccttcaggtgattctgatgaatacttaattttgaagaccatgagctttgggttctttgggaaacaagtggtgagggttttcgaggctccttttcccctctgctcccaacagctcttgaaacagaacctgctacaacctgggcggcagcatcctgctagccaggagttgaagttagacgtatagaaatagcagctgttttttctggagatatattgtgcaacatggtgactatggttaatgacgacatatggtatgtttgaaaattgctttaaaaagcagatttaaaatgttctcaccacaaataagtgatmagtatgtgaggtaatgttaccagaaaggggtcccaatccagaccccaagagagggttcttggatcttatgcaagaatgaatttggggcaagtccatagagctaagtgacagtaagtttattaggaaagtaaaggactaaagaatggctacttcatgggcagagcagccctgaaggctgctagttgcccatttttatggttatctcttaattatatgctaaatagggggtggattattcatgagttttctgggaaaggggtgggcaattcctggaactgagggttcctcccctttttagaccatatagagtaacttgcttatgttgccatggcatttgtaaactgtcatggcactggtgggagtgtagcagtgagacgaccagaggtcactcttaccgccatcttggttttggtgggttttgtctggcttctttactgcaccctgttttgtcagcaaggtttttgacctgtatctcgtgccaacatcctatctcatcctgtaactaagaatgcctaacctcctgggaatgcagtttatcaggtctttttcccagcccctactcaagatggagttgttctggttcaaatgcctctgacagtaatgcatgtgttgactaattaggttgattggtccttccacaattaatacatatttcagaacatcacgttgtacaccacaaatgtatacaatttttgtttgtcaattaaaataaaatttttaaaaaaagaaagaaaaagatagttctcttactcttcttcatttctcctccctacaactcacattcgccaataccagcaaattgttctcaagtggctacttcctgcttgctgatggctgaaattccttctgctaggagaaagcctttgggtccacaattagattagtattgttatatatttatatgttaatattaggttaacaatatactaataatataatgaggtaatttttcttcgaatgctttttagtcatgcataaaaaattgctttttaagtgtgatatcagacaagacaaaaccagctgaaggcagaaagaatgatgagggccatcagagagctgcagagagaaaaaagaggctgtgagctttcaagactttatgcctatgccttgagttaccttcaacatgcatgttgatcgaggagacatgcatgaagatagattattttcctgtaggtacaaaatcaaactgttctctttcatatgattcttgaaggtttttggtttgttttggtttttgttgttgcttaatccacaaaagagcttccttgctgaaatatatgttaatcaaatgttattatatccatagtttattcctcttcatcatcactatgagaaagcaaaggtcaaaggtggctgccccttcattcctttccacaaacattagaccaggggtgtccaaccttttggcttccctgggccgctctgaaagaagaagaattgtcttgggccacacataaaatacactaatactaatgatacctgatgagctaaaaaaaaaaaaaaatcgcaaaaatctcataatgttttaagaaaatttactaataagtattgggccacattcaaagctgtcctgggctgcatgcagcccttgggccacggatgggactagcttgttctagatattttcaccatagcagtctcttagatatattccactttctaagtattctgtttgaggtaacatttctgtttcatttcaggtttcaaatatatatcattaatttgcatttcaggttatttttagcttataatatgttaaagttcaaatcaagccagcactgcacagtgcctaacactgggtcttgggcagtaaacacttaataacacctgtgatgatacttcaaatttttttttccaagtttttatgcattagaataaacagattaactttcctttttacttaattgttccctgtagctagagtttgtggatggtttatattcaggataaatgatagcaaatgaaggaaaatgtgactcaaaatatgtgctacatgtccatttatgtttcatctacggatattaaaatattatttcccagtgtttggtccatggaaagaacacacttaataaacttcaaagtaactctgttccataagtgggaatagtaatttctatgaagtatgaaactttacagtttataaagtgctttcaagtacacaatctcatgtgcccctcccaacagccctgtgaagtaagtgtagggtaatgacttcttatttacttggctggagaatatggttggagaaaattcagtgacttgcccaatgtcacacagtgagttgtgaaaccctttagtggtccaaatgctcctatcatcacgcccagttgttaccttctccatcctcattgtgagctgaactccccgtcctctgcagtctggtcaacccctgctacattgggccaggtcacatttctgtaggtggcatgaaaaaaatggagacaactctgataggtggactcaactggtgagaggtgaaggctatcctgaatgtgactctaaagataaacatcaaaagttcagccttagccaacatcttagcattccgcaatagagttgaaggtatcacctatttcatctttcagaggagtgtcttcttggttcttaactccatcgttttcaagcctggctaacccttggaattacctgggaagatttttaaaattcagatgctccagtctcatcatgcagtgattctagcatcaggctcaagcactgatatttttgaaagctccccaggtgactctaacgttcagccagggttgagcgcccctgatacagctgagaaggcagcaagactgttataagctggcacagaagcagccttcttctcccttaaactaggtaaaaagagcatgtctgttgacagtcctaaccatttctatgaggaggccttgtgtaatttcaaagcaagccagaaacttgtgtctactcaggaattcctgtgggacattattaaagggtttatggttaactgatgggctgaattaatggtgagcattaaggcagattgaacctcaaaattcgggcagattaacaaagtgaccaaggtagaggtagagatttcaagcttaactttgagtttcctatctttcataagacaagtactggtggtaataaaaagcatgctttctttccttcaccagtcaagtggatgtggaccagcccttataaaaactcgggtctatccaaagagacataggaggagaggtataattaacttgagtaagcaaagtaataaacaacagcagcctgaaaaacagcttgcagaaatctaagagggatcccagtttctcagttctgtttttaaactaccccttcctttaatctcctgcagaagtaaactcatagaaattatactaagaactaaagttgcctgttcttgtattggatctgtgtgtgtgtgtgtgtgtgtgtgtgtgtgtgtgtgtgtgtgtgttttatgtatattaagaagggaggtgggaaggagaggacattggcctaattaccactgagattgtgtcttgtgaattccattgaggaaacacttcagaataagcacatttgttaaagtggatgagttattttacacttcatacgaaaatgaaaagatgaatgtatcattcacagttatattactagaggtgaaaaaaatagtatggttctcctcaacagggctgagttacacaaattttatctgaagcttctatttcaccaaagatacatttgactccatcctacctagagtaaggaaatatttaattattaattaatcttttgcagcaaagcacatgtataaatggattcagagttagaaagccattaaagccaactgaaatgtctccacaatttatagaagtcatggatacaatagagcctataatacactcaaaatccgattggaagagactttttaaactcaagaacactgtctttattatattagaagactaatgaatctcatttattcaattatattcaacaagcacttattgaggatctagcacaggtttggcattgttgagagtaaagaataagatagcaactcctcataataactacaaatacgtattaaacaattcgagaatgctaagaattattatattagcatgtactaaagctctcattttaaaaaatattactacagaaaatgtggcatagaaacagtgagtgctatcagcaattcaaaggatctaaaacagagttagtcatagtcatagggctcagtttttatctttcctcatgctctcaaatcttcctaaaacagcactttcatcaatagtaagcactggcttccccataatcaaagattattcagaatgagacctatccatcctgcttcttcatgtcccctcccaactctgcatcctcttatcagtgaggccaagtcccttcatgctgccctgggaccctttggcccgggcctttggtcacacaaatcctacaggcctccaggccctctggccaccaagttcatgtcccaaaccttaaccctcccccggccccacgctccatacatatgtaccaccgctactcagtccatactaatccatctaaatccagccacagacatgcaacttcctctgacaaatccaggaaaaggaagcatggtgtgtatcaatagaaatgtgtctgaatcccactatcttgaaaacattaaagattctaaaaaatatattttttaaaggtttacatctgaaggagataaaaatagtattttttgttgttgttggcagaacaaatttctgactcatgcttaatcagccagtgaagacactgatgagtatgagtcgattcaggggtaacagcagaaaatgaaagccagtgtggacaaatgggaagttggtctcttctgaggagaatagaaaattagtgttagaaaaagaccgttgtggtgaagttcttaaaagtgaccagcatacctatatgttctgtgcaaaacaggttatcttcctctgctctgcttagctgattagtctgagagacgttcttaccagcccagggataccagcrcaaagccttgcccatatccattaactaaagacatttcacaacaagacaatttgagtgaattataaatagtctaaacttatttgtaaatggaataattggaactacattaaaataaaaattaatgaagagaattaacataaacataaagaggttttttctttaaaagcctattataaggaattgttttataatttaattgttaattaacaccataaatttctcagctttctttaaataaatggatacacacatgcacacacacagagaaggagagagagttggtgctttttatttttatttctcaaagttagatcaaatctcatgaaaagtttaccattgactaaaataaaacctctacttgatggtgatacatgcctagacacaggatctttaccaagagaacatcaatttcctagtgtcaaataggcaaacctaaataaatatattgagaataatagcatataattttctaatttcaaaattatgactttatattttggcataattattggtccatttgtaaacaagaatgtctttcaaactggtttttctagatttctagatttgtttattcaaacaaatcaagcaaggatacttgctgttatatagatcacaaatatgtytgagctaaaaattaacttcagtcagaaattcactgattcaccaaatgattcaactactaatatgtgatagatttagattccctttaacttacatattgtatagactccctaccactaagaagtaacataataccgtattagttttctatccttacaaaaggcgagaaaataacrgaggcaaaagcacagatttttatcaatatagaacaaggaggactgttttgtaagtttttctcacattaacccatttagacaatctagctttgttgctgagagaagtatccgtttctctttttaactcattctctgtccctgtgtcaaatgctaaacagcagaaatatgttcatttggtccaactgtagtcttttatcttagtcttgttttgatccaatactgagaagaaaaatccatctagttaccctacttcttttccagtatgcacagcacttgtgtgagtaaatatgaaggatccagggtagataacagcaaatatactgtttggtattttctccttccgagaaatagcaatacccacttagagcacagggatgctgtgaagattagtcacattaaatttgagtatagtccattggagatatgctactgtgatcaactgttaaatctgataagaaacactgagaccatcatccactcctctgaactatcctttaatagcccagtcccgatggaagctggaggccatcattcacttcaaatctgtgactttattctcggtttttttgttgttgttgttttattttttattgaccatgtggtaatttcaagaagcaggctgggcacaatggctcaaccctgaaatcccagcactttgggaggccaagatgggcagattgcttgagcccaggggttcaagacctaagcaatatggtgaggccctgtctcaacaaaaaatccaaaaattagccaggtgtggtggcatgcacctgtagtcccaactactagggaggctgagtggggaggatagcttgagcctggaaggtcaaggctgcaatgagccatgatcatgccactgcactccagcctagctgacagaatgagaccctgtctcaaaaaaaaaaaaaaaaaaaaaaaaaaaaaaaaaaaaaagccatagaaagcagtttctatagtaaaaagaactcatatgcatttattctttttctgaaatttcactactaggaatctatcataagaaaaaaatctaaaatattggaaaaagctctttatacagagatgtttctgcagcattatttatgagcaccaagcatttaataacaatctacatgcctatgaatagaaaagagatgaatttaattatcatagaagcatatgttgaaacatcattaaacactatatttgcaaaaagtttttaagaaaaggagaactgtttttcttacaatgttaaatggagaaggagaacacaagatggtataaatgatacaatatcaactatgtaatatatatgtagggataagactcgaaagataacagagtattagcaatcgccagtgggtgggaggttattatatggtcattttctttttaatactgcctttttactcctcacttactataaggatcatttagtacattttacaaaacaaacaaacatacactaatggaaatggagtcaggaaacttattttccaagctactctaccactgtaaattttacgttaggcaagtctctactgcagtgtattgatagaatatggccattttaccttctaagactcctataattaactgatgtaatgtatttgaaatcactttttattttaaaagtccaatataattacataattatattttttggaggagaaaaagagagattttcatagtttttccaagtaaaaaatacttatttacatagtgaaaatagaggttcactattattctttctgccaccagttggaattcagttttctggatagttttttacacagttttttgtgtagactatggtataacacattgttcgccttggttcctgtcgactaagtagaaacatatataatgcagattatttatcttataaaaatatgtcttggtttatttaagtaatgtgatatttatcttgaattatttttcaaccttgccttaaaattgacaaacataattaaaactcctggccaggcgtggtggctcacgcctgtaatcccagcactttgggaggccgaggcgggcagatcacgaggtcaggagatcgagaccatcctggctaacacggtgaaaccctgtctctactaaaaatacaaaaaattagccagghgtggtggtgggtgcctgtagtctcagctactcaggaggctgaggcaggagaatggcgtgaacccgggaggcagagcttgcagtgagccgagatggcgccactgcactccagcctgggtgacagagcaagactccatctcaaaataaaaaaaaataaaaaataaacaaaaaaaaaacactccttaaagtgatacttagacattacaattttcactctttttccatcactgacttaaatagtgaaagaaagaaaaagagaaagagagaggaaagaaggaggaggggagagagtgagagaaagcaatatggctctcaaatttactacaagggagaaaatttgcaagggaggttgggaaaactaattttgctaatataatataatatatgctgagaaagaggaagagaacggtgaatttatcaccttttctctgccacagactcctaggcaaagagagaagaaatgtctcctcagacctagaggaatcagagaacttcagtcaataagttgtctgtggttcagtctagtttgggaaggacatagatattgtatatcctaagagatatttctgaaaactgtcacaaatcatcagataacattgagaaaaatcacaggcttcataagctatagaacctttgtttacctttttttcttgtaacttttattttaggttctggggtacatgtgctggtttgtaacacagataaacttgtgtcacaagggtttactgtacagattwttttgtcactcaggtactaaacctaatacccaatagatacttttttttcttctctccctcctctcaccttccaccctcaagtaggccccagtgtctgttgttcccttctttgagttcatgagttctatttacctccctcttataagtaagaacatgtggtatttggttttctgttcctgtgttagttygctaaggataatggcctccagttccacccatgtttccacaaaagacatgaactcattcttttttatggctgcatagtattccattatgtatatatacaacattttccttatctagtctgtcaccgagaggcatttaggtttattccatgtctttgctattgtgaagagtgttgcaatgaacatatgcatgcatgtgtctttataataaaatgatttacattgctctgggtatatagccagtaatgagattgctgggccgaatagtagttctgattttagccctttgaggaattgccacagtgctttccataaaggctgaactaatttacattcccaccaacagtgtataagtgttcccttttctctgcaacctcaccagcatatgttattttttgactttttaatgatagccattctgactagtgtaagatggtatcacattgtggctttgatttgcatttctgtaatgatcagtgattttaagctttttggccacatgtatgtctttagaaaagtgttcatgtcctttgcctactttttaatgaagttgtttgttgttgtttattttcttgtaaatttgtttaagttccttatatatgctggattttagacctttgtcacatgcatagtttgcatagttttctcccattctgtaggttgtctgttcaatctgttgatagcttcttttgctgtgatgaagctcttaagtttaattagatcccatttgtcaatttttgcttttgttgcaattgcttttggtgtctttgtcatgaaaactttgcccattcctgtgtccagaatggtattgcttcggttgtcttccatggtttttatagttytgggttttatgtttaagtctttcatccrtattgagttgatttttgtatatagcataagaaagtagtccagttttaatcttctgcacatggctagccagctatcccagcaccatttattgaatagtgagtcttttcccctgtcttgtttttgtcagatggttgaagatcagatggctaaaggtgtatggccttatttctgggctttctattttgttccatgtatctatgtatctgtttttttgtactagtaccatgctgttttggttactgtagccctgtaatatagtttgaagtcaagtaacatgatgcctgtagctttgttctttttgcttaagattgccttggmtaaggaggcctgcctgcctctgtaggctccacctctgggggcagggcacagacaaacaaaaagacagcagtaacctctgcagacttaaatgtccctgtctgacagctttaaagagagcagtggttgtcccagcacgcagctggagatctgagaatgggcagactgcctcctcaagtgggtccctgacccctgacccctgagcagcctaactgggaggcaccccccagtaggggcagactgacacctcacacagccgggtactcctctgagacaaaacttccagaggaacaatcagayagcagcatttgcagttcatgaaaatccgctgttctgcagccaccgctgctgatatccaggcaaacagagtctggagtggacctctagcaaactccaacagacctgcagctgagggtcctrtctgttagaaggaaaactaacaaacagaaaggacatccacaccaaaaacccatctgtacatcaccatcatcaaagaccaaaagtagataaaaccacaaagatggggagaaaacagagcagaaaaactggaaactctaaaaagcagagcacctctcctcctccaaaggaacgcagttcctcaccagcaacggaacaaagctggacggagaatgactttgacgagttgagagaagaatgcttcagacgatcaaactactccrggctacaggatgaaattcaaaccaaaggcaaagaagctgaaaactttgaaaaaaatttagacaaatgtataactagaataaccaatacagagaagtgcttaaaggagctgatggagctgaaagccaaggctcgagaactacgtgaagaatgcagaagcctcaggagccgatgcgatcaattggaagaaagggtatcagtgatggaagatgaaatgaatgaaatgaagcgagaagagaagtttagagaaaaaagaataaaaagaaatgaacaaagcctccaagaaatatgggactatgtgaaaagaccaaatctacatctgactggtgtacctgaaagtgatggggagaatggaaccaagttggaaaacactctgcaggatattatccaggakaacttccccaatctagcaaggcaggccaacattcagattcaggaaatacagagaacgccacaaagatactcctcgagaagagcaactccaagacacataattgtcagattcaccaaagttgaaatgaaggaaaaaatgttaagggcagccagagagaaaggtcgggttacccacaaagggaagcccatcagactaacagcggatctctcggcagaaactctataagccagaagagagtgggggccaatattcgatattcttaaagaaaagaatcttcaacccagaatttcacatccagtgaaactaagcttcgtaagtgaaggagaaataaaatatttcacagacaaggaaatgctgagagattttgtcaccaccaggcctgccctaaaagagctcctgaaggaagctctaaacatggaaaggaacaactggtaccagccactgcaaaatcaagccaaattgtcaagaccgtcaaggctaggaagaaactgcatcaactaatgagcaaaataaccagctaacatcataatgacaggatcaaattcacacataacaatattaactttaaatataaatggactaaatgctccaattaaaagacacagactgagaaattggataaagagtcaagacccatcagtgtgctgtattcaggaaacccatctcacgtgcagagacacacataggatcaaaataaaaggatagaggaagatctaccaagcaaatggaaaacaaaaaaaggcaggggttgcaatcctagtctctgataaaacagacctgaaaccaacaaagatcaaaagagacaaagaaggccattacataatggtaaagggatcaattcaacaagaagagctaactctcctaaatatatatgcacccaatacaggagcacccagattcataaagcaagtccctagtgacctacaaagagacttagactcccacaaattaataatgggagactttaacaccccactgtcaacattagacagatcaaygagacagaaagtcaacaaggatacccaggaattgaactcagctstgcaccaagtggacctaatagacatctacagaactctccaccccaaatcaacacaatatacatttttttcagcaccacaccacacctattccaaaattgaccacatacttggaagtaaagctctcctcagcaaatgtaaaagaacagaaattataacaaactgtctctcagaccacagtgcaatcaaactagaactcaggattaagaaactcactcaaaaccactcaactacatggaaactgaacaacctgctcctgaatgactactgggtacataacgaaatgaaggtagaaataaagatgtcctttgaaaccaacgagaacaaagacacaacataccagaatctctgggatgcattcaaagcagtgtgtagagggaaatttatagcactaaatgcccacaasagaaagcatgaaagatccaaaattgacaccctaacatcacaattaaaagaactagaaaagcaagagcaaacacattcaaaagctagcagaaggcaagaaataactaaaatcagagcagaactgaaggaaatagagacacaaaaaacccttcaaaaaattaatgaatccagaagctggtttattgaaaggatcaacaaaatcagtagactgctagcaagactaataaagaagaaaagagaaaagaatcaaatagacgcaataaaaaatgataaaggggatatcaccaccgatcccacagaagtacaaactaccatcagagaatactacaaacacctctatgcaaataaactagaaaatctagaagaaatggataaattcctggacacatacaccctcccaagactaaaccaggaagaggttgaatctctgaatagaccaataacaggctctgaaattgtggcaataatcaatagcttaccaacaaaaaatagtccagraccagatggattcacagccgaattctaccagaggtacaaggaggaactggtaccattccttctgaaactattccaatcaatagaaaaagagggaatcttccctaactcattttataaggccagcatcatcctgataccaaagcagggcagagacacaaccaaaaaagagaattttagaccaatatccttgatgaacattgatgcaaaaatcctcaataaaatactggcaaaccgaatccagcagcacatcaaaaagcttatccaccatgatcaagtgggcttcatccctgggatgcaaggctggttcaatatacayaaatcaataaatgtaatccagcatataaacagaaccaaagacaaaaatcacatgattatctcaatagatgcagaaaaggcctttgacaaaattcaacaacccttcatgctaaaaactctcaataaattaggtattgatgggacatatctcaaaatagtaagagctatctatgacaaacccacagctaatatcatactgaatgggcaraaactggaagcattccctttgaaaacgggcacaagacagggatgccctctcttaccactcctatttaacatagtgttggaagttctggccagggcaattaggcaggagaaggaaataaagggtattcaattaggaaaagaggaagtcaaattgtccctgtttgcagatgacatgattgtatatctagaaaaccccattvtctcarctcgaaatctccttaagctgataagcaacttcagcaaagtctcaggatacaaaatcaatgtacaaaaatcacaagcattcttatacaccaataacagacaaacagagagccaaatcatgagtgaactcccattcacaattgcttcaaagagaataaaatacctaggaatccaacttacaagggatgtgaaggacctcttcaaggagaactacaaaccactgctcaaggaaataaaagaggatacaaacaagtggaagaacattccatgttcatgggtaggaagaatcaatatcgtgaaaatggccatactgcccaaggtaatttatagattcaatgccatccccatcaagctaccaatgactttcttcacagaattagaaaaaactactttaaagttcatatggaaccaaaaaagagcccacatcgccaagtcaatcctaagccaaaagaacaaagctggaggcatcacgctacctgacttcaaactatactacaaggctacagtaaccaaaacagcatggtactggtaccaatacagagatatagatcaatggaacagaacagagctctcagaaataacgctgcatatctacaactatctgatctttgacaaacctgagaaaaacaagcaatgggtaaaggattccctatttaataaatggtgctgggaaaactggctagccatatgtagaaagctgaaactggatcccttccttacaccttataaaaaaattaattcaaaatggattaaagacttaaatgttagacctaaaaccgtaaaaaccgtagaagaaaacctaggcattaccattcaggacataggcatgggcaaggacttcatgtctaaaacaccaaaagcaatggcaacaaaagccaaaattgacaaatgggatctcattaaactaaagagcttctgcacagcaaaagaaactaccatcagagtgaacaggcaacctacaaaatgggagaaaattttcacaacctactcatctgacaaagggctaatatccagaatctacaatgaactccaacaaatttacaagaaaaagacaaacaaccccattgaaaagtgggtgaaggacacgaacagacacttctcaaaagaagacatttgtgcagccaaaaaacacatgaaaaaatgctcaccttcactggccatcagagaaatgcaaatcaaaaccacaatgagatactgtctcacaccagttagaatggcaatcattaaaaagtcaggaaacaacaggtgctggagaggatgtggagaaataggaacacttttacactgttggtgggactctaaactagttcaaccattgtggaagtcagtgtggcgattcctcagggatctagaactagaaataccatttgacacagccatcccattactgagtatatacccaaaggactacaaatcatactgctataaagacacatgcacgtgtatgtttattgcggcactattcacaatagcaaagacttggaaccaacccaaatgtccaacaatgatagactggattaagaaaatgtggcacatatacaccatggaatactatgcagccataaaaaatgatgagatcatgtcctttgtagggacatggatgaaattggaaatcatcattctcagtaaactatcacaaggacaaaaaaccaaacactgcatgttctcactcataggtgggaattgaacaatgagaacatatggacacaggaaggggaacatcacactctggggcctgttgtggggtggggggaggggggagggatagcattaggagatatacctaatgctaaatgacgagttaatgggtgcagcacaccagcatgacacatgtatacatatgtaactaacctgtacattgtgcacatgtaccctaaaacttaaagtataataataagaataaaagaaaatggattgtcttggctatctgggctcttttttggttccatatgaatttttaaatcattttttctggttctgtgaagaatgtcatttgtagtttgatagaaataatattgaatttgtaaatttctttgggaagcatggccatttcaatgatattgattcttcctatccatgagaatgggatgtttttccatttgtttgtcatatctagtttctttgagcagtgttttgtaattcccattgtagagatattttatctcccctgttagctgtattcctgggtattttattctctttgtggcaattgtgaatgggattgccttcctaatttggctctcagcttagctattgttagtgtatagaaaagctggtgatttttctacattgattttgtatcctgagattttgctgaagttgtttatcagctgaaggagcttttgggctgagactatgggttttcctagatagagaatcatgttgtctgcaaacagggacagtttgacttcctcttttccaatttagatgccttatttctttctcttgcctgattgctatggccaggactttcaatactatgttgaatagaagtagagaaagaggkcattcttgtcttctgtcagttttcaagaggaatgattccagcttttccctattcagtgtaatattggctgacggtctgtcatagatggttctaattatattaaggcatgttccttcaatacatagtttattgggagtttttaacataaagggatgttggattttatcaaaagccttttctgcatctattgagatagtcatgtggcttttgtctttacttctgtttatgtaatgcatcacatttatggatttgtatatgttgaacaaactttgcatcctggagatgaagcctacttgattatgatggattagccttttgatgtgctkctggattcagtttgaactattttgttgaggatttttacgtcagtgttcatcaaggatattggcctgacgttttctttttttgttgtgcctttgtcaggttttggtatcaggatgaaatgggcctcatagaatgagttagggaagagtccctcctcctcaatttcttcccagtttattattggtataacatacaggaaggaactagttgtgacaccctcaataagttacttaatctctcctaatcttagttcccctttgtgtaaaatgaggatgacatgtagctgacaagtctgtgtggaagatcagacttttagcactgtgtcatatgaggtactcaataaatgtccctttcttggtgaaaaaaaaaaaaaagaaaatcaatttcttcctggttcagtcttgggagggtgtatatgtccagcaatttattcatctcttctgggttttctagtttgtgtgcatagaggtgttcatagtagtttctgatggttatttttatttctgtgaggtcaatggtagcatcctctttgtcatttcttcttttttttttattatactttaagttgtagggtacatgtgcatgacgtgcaggttagttacatatgtatacatgtgccatgttggtgtgctgcacccagtaactcgtcatttaacattaggtatatctcctaatgctatccctcccccatccccccaccccacaacaggccccagagtgtgatgttccccttcctgtgtccatgtgttctcattgttcaattcccacctatgagtgagaacgtgcagtgtttggttttttgtcgttgcaatagtttgctgagaatgatggtttccagcttcatccatgtccctacaaaggacatgaactcatcattttttayggctgcatagtattccatggtgtatatgtgccacattttcttaatccagtctatcattgttggacatttgggttggttccaagtctttgctattgtgartagtgccgcaataaacatacatgtgcatgtgtctttatagcagcatgtcttataatcctttgggtatatacccagtaatgggattgctgggtcaaatggtatttctagttctagatccctgaggaatcgccacactgacgtccacaatggttgaactagtgtagagtcccaccaacagtgtaaaagtgttcctatttctccacatcctctccagcacctgttgtttcctgactttttaatgattgccattctaactagtgtgagatggtatctcattgtggttttgatttccatttctctgatggccagtgaggatgagcattttttcatgtgtcttttggctgcataaatgtcttcttttgagaagtgtctgttcacgtccttcgcccacttttcgatggggttgtttgtttgtttcttgtaaatttgttggagttcattgtagattctggatattagccctttgtcagatgagtagattgcaaaaattttctcccattctgtaggttgcctgttcactctgatggtagtttcttttgctgtgcagaagctctttagtttaattagatcccatttgtcaattttggcttttgttgccattgcttttggtgttttagacatgaagtccttgcccatgcctatgcccttaatggtattgcctaggttttcttctagggtttttatggttttaggtctaacatttaagtctttaatccatcttgaattaatttttatataaggtgtaaggaagggatccagtttcagctttctacatatggctagccagttttcccagcaccatttattaaatagggaatcctttccccagttcttgtttttttcaggtttgtcaaagatcagatggttrtagatatgtggcattatttctgagggctctgttctgtyccattggtctatatctctgttttggtaccagtaccatgctgttttggttactgtagccttgtagtatagtttgaagtcaggtagcatgatgcctccagctttgttcttttggcttaggattgacttggcgatgtgggctcttttttggttccatatgaactttaaagtagttttttctaattctgtgaagaaagtcattggtagcttgatggggatggcattgaatctataaattaccttgggcagtatggccattttcacgatattgattcttcctacycatgagcatggaatgttcttccatttgtctgtatcctcttttatttccttgagcagtggtttgtagttctccttgaagaggtccttcacatcccttgtaagttggattcctaggtattttattctctttgaagcaattgtgaatgggcattcactcatgatttggctccgtttgtctgttattgatgtataagaatgcttgtgatttttgcacattgattttgtatcctgagactttgctgaagttgcctatcagcttaaggagatttkgggctaagacgatggggttttctagatatacaatcatgtcatctgcaaacagggacaatttgacttcttcttttcctaactgaataaattgtgtttatttgtgtcatctctcttttcttcttcattagtctagctagcggcctatcattaatattttcaaaaaactaactcctggaatcactgatcttttgaatggtttttcattccttgactactttcagctcagctctgatttcgattacttgtcttctgctagctttggggttgatttgttcttgcttctctaattctttcagttgtggtrttaggttgttaatttgagatctttctaacttttctatgtgggcatttagtggtatgaatttccctctgaaacattgccatgtcatatctttgttctcatttgtttcaaagaacttcttgattctctcttacttatccaaaagtcattcaagagcatgttgtttaatttccatgtaattgcatggttttgagcaatttttttwattgtattctattcttattgcgctgtggtctgagactatgtttggtgtttgctgtttaaagccaatacttcgaaacaatctataccaggttttaggaattctaacctgcagggggtatggctaggcattggatgtcatcccattattcccttcttttttttttttttttttttggttttgttttttgagacggagtttcactcctgttactcaggctggagtgcagtggtgcagtctcggctcactgcaacctccgcctcctgggttcaagcgattctcctgcctcagcttcccgagtagctgggattacaagcacatgcaacaacacctggctaatttttgcatttttagtagaaacagggtttgctccccttttagatgtatttttgcttgtttttttctttttctgtgagacagagtctcgctctgtcaccaaggctggagtgcaatggcgtgatctcagctcactgcaaccactgggtccctcccttgacacatggggattacaatttgacatgagatttgggtgggaacacagagccaaaccatatcagaggtcaaaattagagattaaggaaaaagaaccatagtcctggttccagggttagaacaaggtcaggacagagaaataagtctgagttctgatgggctgttgaaaggctgcaccgggtgctcccagaattactgcaagggaggttcattcacctgggattatacttcatgccgtgtgggaaattacatgctctctagtcaactgttgacattaccaagaccctcagccttggagatttacattttactcacacctcagacatagacacaagctggggttcatttgtttgttttactttttcagatgttggatgaaaaaagagattcttaataatgggttttcacttctaactccccctttctccccatcaaaaaaacaaaacaaaacaaaacaaacctcaaaagactttattttcctttccctttctttayagcagagatcagggtatcagggtatcaagagagcagggtatcaggctgctctcttatccaaatggcaatactcaaaggttcccaagatttagtcacctcccttctcaagtgaatataaaacgtggagcatctttctttgcagagtaagactgactttaggtcatcttgagcccatttatcattatttgaaacattayagaatctattggatcatatagccaaagttatagaaaatataattttcatttttaaacagatctcttattatgaatggttacttgggctgcctggccttggaatatctcttttgcatgattgcaatatacttgtgtccaaatgtggatcttggcctcttaagtaatgttctcacattttacccaaacttgtcggtgttggctaaccagaggtttaatgtggactaatcagtgcagggaagcatcccagtatgtgtatatttctaagtgcctgaactaacatggggcaggcactatgcatagttgctaacctgatgaaacagcttcaattagagcctcatcgctgacattccagagtggctgcacttggaatcataggatgtgcaggtatctgtggtcagatttttacttaaaacaaaaaaaaaggagaagtttcagagtataagttttattggatttggggacttggagttcttggaaaatgataatgatttagaatatagtttgtacatctcccctgggtgaaacttgaggatctttgttttgtktaygtctttctcacgaggtagaagatcgattctaagtcaagaacacatttgtggcaatgtaattacaagtgaaatatacaaaaaggctcctgaacaacccctttaacttccttgttctacttgccctgrctcaaactatgctgcttccctcctgtctctcagcacccctccccagacagagcacccactcccttcccagcccctgcctrcaagctcccttcccaccctttgaatgctcaggaggaaccactcacagcaaaattaggcctccaggctcccttcttcctaggctccctttcttgaggtgtctctgctggtttgctctctcttgatctgtttctggcccccacactgtgaattttagatcctactctttatcagcaatgtctgggtaagaggagaaatcaagattcctgcaaaaaatggacatgctgactcagcctagagttatggagctggactggcttaagtcactgcttcctttgtcctaacttactcattttactaatacaaccattcacaaatagttgcagtcatgatatggaaaagttaaggaacgaggaatatgtgtttaatgtcttttctatttccctgtgagtgcttatagaatccattctcttacatggcagcaggagaaagagtgagcaggggaaatgtcagacacttaccaaacaaccagatctcctgagaactccctcactatcaggagaacaggagagcagcaaggttttcagcagctcagtcattttagctgagaaatgaggaagggaagtgttaaagcctacatacagaaagaggtagtcaaacatataaggaaaagaagaatataattcctctagttaaagagagtgttctgacaataaactctaatatgaaagtaatttccccccttttaattaatagcaaacatctgtattcaaacatgaacttttttctgttatctttcactgtggagagcagaattagccccattctacagttagaaaaatggagacatgaaacattcaaggatttcatccaatataacaagaccaccagacgaaagctaatggtttacagatgcagggtatttttcaaagaagaaggagaaatcatgttatctttgatgtaacatgtgtagaactaacacaagtgtttgcctttgagaattacaatagtcagaggggaaaaaaaacttttttcatcttttttattttaaaattcctatgtgtatgtagtcacttctctaagacaggccaaggtatttttttatgaataacaaattttactaaataagttatgcaataagctaaatcaaaatttcctcataataaatctttaaagtttctccttcttttcaccagttcttttgtggaagaaaaacacaggcatgctgacaatggccaagacaaaggtgttcctctttctttccaaatcctgtagactggaatagttatggaactgagagaagtcacagcagtcctgatccaaagtgtcacactaaactatgtgccaggcacagggatctccgctctcaagtgactttcaggccagaggtggtggacaagataagcatgctgttaggaatgaatgtggggtggccrcagtagcacatgggaggccgttgaacttggccttggggaccaagatgtgatttctggaacataagagcaaactcatacctaagatacgtgtaggaattagcctggtgaaggagtgttccaggaaggtggaacaggacatgagaaaacctggagttgatagggctttcagcagatgagaagaactcgaagcaatccagcatgtcaggaataatgggcagtagggttaacttgactgccagaatcttccttttgtacttttcgtgtgcattaaatttattgacagtagtgtgctacattgaagagacaaggctagaagtaactgcttcctgacatactgtacaaacttgtggataaatatgaaaactttaggtctgggcaaggactaaatattttcttaaatgataggttttctctgagcggttcttcctgttgtaaactaagttcaaacccaagtattctaggactggcactaaatttgaccaattcatttatgtctcaccccaaacttgttcttttagaattcaaaggaatttttccttaaaagccccatttaaattttacctgagtaatttccccctttcaagttagttttttaaaagatatttattgagattattttcataattttgcaagaatgacatgttcattttaggaaacttgaaatatagaggaaagctatatcaatgaaaataaaatcactcacaataccactaaggtgataatctttgtcaatattaacttgtacagggtatttgtgatataattttctaagtttttctatgaagatattttttaacaaatatttcaacaatttatatgcatttcctgtttctgtgtgcatgtatacacatgatatatattccactcattttaaagttaatttgaattatttaatttatgaacacactcttatttgcaagtttttgtagaactattaacatatctagtgtgtgaacttttagccctgttgaaaatagcttgcaagctgtaagctggttatatttcaaagagctagaggctcctgtagttctctattmattagttttaaagcacctctatgacatgacataggtggcagtattattatccctatattgcagagggggcagccaaagcagacagcagttgcataaccaaggccggggtagaaacagaactggggttcttttgaaagtaggtagagtaaaaattacacataaaatgaaatattggtgatttgtacctctattcaaagcctcatctctttgaaatgacaatgcgtaaaacacattggccctctgttatttttccatcaattcagaactgaatctgaccttggagagtccacacagatatcagtggaacgtctggccgattgcatgtgaggagctgctgccagaactttgcctgaaagcttaaataccctatgagagctgcaaggaattctgaaaaattacgttgaatatcgatgttgaagttaaaatacacatatatgcgtgtgcgtgtacgtgtgcaagcacacagacacgcacacagaattttaagcccaaaagcagcaccagagccaattccatgatatttgtattagtaatctttacttgggcagaattcacttgaagctggtgggattctttttcctgagtcaagcctgcagaatgaagcctgctgggagtcagcaaaccacaacagacgtcatcagctttctcctgcttcaggatatacatactgatcactgcgggggtcgggggagaattttatttttgcttgcgcaggcttacacaattgtcagcggatataacccttgcctttctttgaagtgtgagctatcaaaaactaaataaaccagatggagccattttctgattcaaggtgacagagcagaccaatgcctgaataatatctctttttaaagatggaaatagaattacaaatttgctacaactaatttgcactttcctttgaaaaggtggagcccaaaaagaaatttttctcaagaggcttttccgcctgagaataagtaatatttaaaataagagaaaggttggaaaattgaccacacaatacatgaagttagcaagagaacgagggggaaattgtcaactatgaaagtgacaaacactgagtcgctggcattcagataacccctcttctccttgcaaccagataaatatacattcttgattcccggattccttccattcttggtgcaatacttgaaaaaaaatttgaccaggtttttggcattttcatcttttctgggaatacttctaaatgacctaggggaaattttctaaaccaaagaacagttttggcagcaaaaacaagcctcagtatgtattatgattgaaaaaaagtaatttagcctttaactcatgcaaggatctacgagaacatctatgtcaaacagaataaaatgaatttgatatctttatttttaatgtatggaaaagatgatgtttttcacttcattattttaactctataaaagaaaaacttctttgatgatttactaaacaaggaattaactagattgttaatgttagtgttataatttactcttacaggattgagtttctcaattgtgctaaatttgttctattcatctcacggctccctctaatacgtaggaaagtataaaaacaacctatctgggtctttatttttctcatctgtgcaataaggataataggtcctatttcgaagcattgctgagatgattagatgatacaaggaaaatgtccaacctagtatctgtacatggtaggttctttctgattcattctcttctaccttcttttctatggcatttgaatattgtgtgtggacttcagcagactgattgtgtgaagttcaactagtaagggcacaaagccaggtacgtctgaaggacctaatgtttatatgagtgctaactacgtacctggcacctaataagcgctcgataaatattagctattgttgtatcacacacctcactttatcctcgctacaactctggagaggttttattttcattctcattttccagttgtcaaaactaagtcttgggaggcaaagtaactagcccaatgttgcacagcaggactatgacggagccagaattccagctgagatctgctccggagctcctggtctcactgctgcagcatgccacacctctccctaagtatggggtgggcaggcctcggacaagttcaaccacctgcaacagaactggaaaggcagaaggacttctgggagaaaaaaaaaatggctgttctactcatctgcacattctaagggaaattctcttagatacacctaatttaatttctcagctatgtttagaaattaactctaagcctatttatttacaagaataatgcagtcaaagacactgttaaccagcttggttatctgcctttgcagcttctggaagattcaaagcagttgaattgaaggtagggacagttgctacagtcaattgccttgaaaacagtagaagtgacctgaaaacctgccaaatgctgacacaaaagctttgaaagccgtagtagcctggagccatttagcatagcagcaaatagcctgaaaccctcaaatagtccttgaagtacagtaattgatatcatcataaggtcatttagattattaaacaggagtatattacacattcatagaactagaaatttcatccaaatattattttttaagttcagtaacttaaataggaagtattagtgaaagagaagaatcacttaaataaaacacctcttctattgaaactactagcgaaataaaactagtgataaaactaattttttcagcaaacctgaaaacttttttttattattatactttaagttctagggtacatgtgcacaacgtgcaggtttgttacatatgtatacatatgccatgttgstgtgytgcatccattaactcgtcatttacattaggtatatctcctaatgctatccctccccctccccccaccccacgacaggccccggtgtgtgatgttccccttcttgtgtccatgtgttctcattgttcaattcccacctatgagtaagaacatgcggtgtttggtttttgtccttgcaatagtttgctgagaatgatggcaaacctgaaaacttaaccacgtaaactttaaactctggatttgttggtcttttttctatcatatataactttttgaattgggtgactgaagttacaccaaagatgggtgttatgttaggcatacaatgaatcattcaagcatctctaattagcataggaaatgggttcttgcttggcttaaggagtcagcaattttcaatataaattttaagagaattttaatctaaatatgatcaagaaggaaattaacacattcttctggaaatacacaaacatacacacataccctaagcattcctacatgaagcattgttgactaatgttatatttcaacttacatttacttacaacatcagttccatagccctgggaagttggggactatgatggtagtggataaggtagccagggaaaatttcaatagcgtcaaacagtaatttgggatttaaaaagtcatagctgtcttttggattttatctatagtttccatgcatcttgggacaaatcatttgaatctcacaggaatcccaatttcagcatgattggcaggatggaacgattggcaggatcgaggcagaataccttcagtcccaagtagcagatcactaaatccaaaatcagtcagagagatacagccctatccccagagacctgtctcatctttgggcagcccataaattaagagtcaggcaaaaccacactgcacctgaaagacagactgattttcctttttgagttgacttcctggatggtcttggatagatacagaaatatgattcagtaaacttaacacctgagcattagagctaacccgattcaaaatgagatcaactcctcaacatcacaaacaatcctgaacccaacttagtcaggaaaagaaggccaacacttggcatgtgtctgggccatcgtgacattcaaagttaaaggaaaatcttggaacagtctaagcagtgaaaagaacatggtgcctcctcaccacaagtaactcaaaacaaaataatacaaactcttaaattaccgttaagaggtccaacaaagtttttatgttttttaaatatatttatttccacatttatggaaagataataaatacgtgtacaatttgccttttgttaaatatatttatatattatttatacatatatacatatctatacatatacgtgtgtgtgtttgtgtgtgtgtcaaaagccaaatccttatttcaagaaactttggtgatcttgcttcactgatctcctaaatatgggcttagcctgtgttttaactgatttttgtggccaagcatctcccatgttcagcagtgtatgactgggcttcccccttccctctctccccgactaagcccagaaatgtctcatggccacccacccagctcagactctattttattaaaaggcagtctctgcttgtactgatttcatagagacaatatgcaaattactaagtggcttatttaacatataatcctggaagtaaatactgcagaaatgcaaagtacttattaaaattgatcttcctctgagattaataaatgattctttgggaataaattgttcaaccaagcaagattaataaasttaagggccgttagccagttttcttgtagtaaattacagggtgctttgcaagaattgcattatttcatataagttaattcattgaaattaattcattgaatatatgtaattttaactttataagtaatgaaaataactaataaagaagttgaacagctagtacagctgaaaaaaaaagaaggaaaaagaaaaggccatcaaactgtcaaagcatacctatcagggctggcatcgacactataaatatgcaagccacagatacacaaaacaggcactaccaaatatgctttttgtcattttgtcccctatatactccatggtttgaaatattttgtctacagaactgcattaacttggcaatacagttgatccttgaataatgagggggttaggagaaccagcctctgcatagtggaaaatctgtgtataacttttgagtcccccaaatcttaactactaatagcctattttgaccagaagccttactgatagcatcaatagtcaagtaacatgtattttgtgtgttttatgtatcatttactgtattcttacaataaagtaagtagagaaaggaaagtgttattaagaaaatcataaggaagagaaaacatatttactatacattatgtggaagtggatcatcataaaggttttcatctttgtcatcttcaagttgagtaggctgaggagagggaggaagaggaagggggaaatttgttgtctcagggtagcaagaagagacagaagaaaatctacttataagtggacctatgcagttcgaacctatgttattcaagggtcaactgtaattattttgtttttcctgttttttcacccaatcagagattctgcttggtaaggcataacaatatcacttcactgagttgatataattaccctcttcagtgtgtctcttcttattgtgccataaccaggtactgtgacctcatgcctggttttcttagctcttgtgaaggtatttctgtgtgtggatagttgttcaaatggatgtttctcgtggacgagggagacaatcactagagagccccattctgccatcttgctccaccttccggctgacttgatataattaaagaatttgacttttttggcaatctgcataatcttattaaagctaaagatttcatttctactagcctttttatatatgtgtgtatctgcatatacatttataaatatttacatacgcatatgttataccacttaatacattgaaatatgcatgataatataatatagcctttaaatatattgaaaaatatattcttatggmtctcctttcttaccataccatctctctgagacaggagactgctgattaaattcaagcctctcttttcacagaggagcatgccatgtcccagagcagttattgcactggccaagatcaaacaagccattgaagattgaattttctgttgtccatataacacttctacaacaaactccatctgtttgctatggtctctaaataagcacctatattaagagcaagggactcaccgaaaattattctagtgaaataattatctttcaggtcacctcttgtctctgctgtcccagacacttttgggcataagtacttgttctataacatagctttctttatatttatgcctacctccattttaccattgcattataacaatagtattgtgcaatagtaataatgcattttaccattgcatgataacaatagtattatggcctgcctctccctctattactagttcctacaagtgcaagagctacgtctttctgatctatttttccttggcacctactgtacctagtttcctaagkgttgatttagggtggatgagataagattgatctggcacaatgttttgttttcttatgtttaaataccttctgtatgccagtaattttccaaattcataaccaaggactggcttttcccctgtactctatactcagactacctacttgacatcaacttaggtatctcatcattccaaacttaaaatatccaatcaaatgcctgattaaatatatctaagtatatttcttactatcccagcaaataacacaagagccgctgctctttttccttcacatgccgatccatgtgtttgttctaaaaatcctacctgcaaaatatttcctagctgggtgcagtggctcacgcctgtaatcccagcactttgggaggctgaggcaggtggatcacctgaggtcgggagttcgagaccagcctggccaacatgatgagaccccatctctactaaaaatacaaaactgtctgggcgtggtggtgcatgcctgtaatcccagctacttggggggctgaggctggagaattgcttgaacccaggaggcggaggttgcagtgagctgagattgcaccactgcactccagtctgggtgacaagagcaaaactctgtctcaaaaaaaaaaaaaaatcctgaaactgtttatttttccttcagtctcacagctaccaccctagccaatacatcatttcttctttcttgaattgtattagcctcctgattaatttctgcttctattcttgttcctatgcaatttcttctccacagagctaccagtgtggtcttatgaaaactattatatattagatcacatcactcttcttctgaaaaccttgtaatggcttgtcatcacacttggagagacatccaagatcattctctaatctacatagcccagcattgtctggcctggaatctcatctcatgccaccttttcccttggtcactgagtctctgtcactgccttcctttgtttgtcactggccttctttgtttctttagacatagcagctagttcttgcttttgggtcttcccawgggttgctttttctgcctcaagtcctcttccgccaaatctctgcctggttgccttcttgttgtccttaattttcagctgaaacgtcacttacttcaagagctcccttttgaccatacaattaaattagtttcttagccactattttgttaattattaattaaatttttgtttgagaattttctggttaatgtttttgtgtgcttttcaacgtgtttacttcctaattctcactaatatgtgaagtctgacttgttcaaaactttgttacatgcttagaccatgactggcccacagacggtgcttagtgttggatgcttaatgatgttaaattcatttgcctgcctttaacatccccaagtacaaggagaataaattcttgtgctcagaattcgcctgataaatatttgtcatctagggtcaaggacctcatcttttttccatttgggggcacctatttattattgcttctgtggaggttgatatgttaatgtgtagtaaccttttgcacccagcagttccatcctttgagctctaccattgatttttctcatctttgtgcctgaagagccagattgattccttttttcccactgtcctgacagtttgcagtgatactcactgtgcaagtgggagccattgcccttcagctatcagaaggctggccctgccccagaagtgcaggcaaggagctttgtacagcagctgtttgtgtctgtgcacaaaatggtatcccttcttccagagttagcccatggtcttggaagggtgggacccagctccttctggatcagattcacttaccttgccaggaagcactggctgagagggtgggagaaactacaaagcaatgtttctattaagtcttcgagattagagatggaaaccagaaagaggaagaaagggagagagagaaacagaagggtctcagaaaaaaaaaaccagctcactcttccattttacccctctgccaagggactctaaaaccctttttcccaattatctatttgttagtgcagttccacactggctgagtctccatcaggcactgtgagaccccacctgtttcccaaagtaattttagatgcccatgaggccacttgggtacacagtcacttattccttaagtgagtatttactgcaccaatgaataacctgctctgattaatagttatagcagtaacatcactcttggcccaggctcatctcttagtgcagaagatcccaggacgagcaggacatagacaaggtgtgacaagcccagagacattctacaaccccaagctggaatcttgcctttactaaccaggcaggaccctgaaaagaagccagtaccttggatcattttatctaaagctttcatgtagcaaaggggccaccaaatctctgaagttgtccccagtcccatatcacattaactgtatcacactctttcttcactcctcaacagagaggctgaggagcagataattcagagtgactccataatgatggctcccttctgcccttcgagcagagcatctttctttctccatcctgattttctgaaagtgaggaagaaagctagctattttttgactctatcagtctctacagtctctttcagtgccaaagtcagccatcactcttacaggaaacttcattataggagcctcatggcaaaaaaataaatatctatagctatagaaatagatagatacagatatagatatcaatatagatataaatagatatatctatatatgtaagactttcgggagttgctttagttttttaggccacaaagacctaaaagaagaaaatcactactttcgtgcccaaaatgatgttcttaaggcctgaaaaggtaaggagcttcccagagagcattatctatttagcaaccaggagcaggctttttgcaatgccattaaggattgacttacaggtgacaatgccttaccaagaaagcccttgataattcagtaaccacatcctttgatggtgatctaggaaaggatgacatttaaaaaaaaacctcctctaggaataattctgttataatgggtttctagagatttagggagaaactaattggatattcactgttgatggctatatatttagatcacactagaaaaaaataatgttcatccatgttttatagaaatggatccggagaattttgcagatgaactgaaacacatgttaaaagttgaaacataaggaaaagaaatggcagcagatcaatagtgaggtaaagggcccagcagccgatcgcctccaggggctagaattcacctttagcatcattgctagyggaaatctgcacttttttttcctctttagtttttatgttacctttatcatctttttctttcatctcctgaccacttcccaccaaacatatatcctttatttttcctttctttttacctttactatgtgtttccctttttctatcacccttgtctcatggctgctggttccactgatggcacctaagactgaaggggttaccaatgccagctccacagagaagggagcagatactttggaggtgatgttagtggctggatttcatggaatgcctactttgtgcctggccttgttagagatgcttgtcatgtatgcttgcatttcatcctctcagttgtcctaagaactcagtctaatattatgcaacaccctagttcaattcgagaataaaagcagttttgttttgttgtattttgtttctgaaaaactctgcctccaaaggttctagagaaaaagcccccaagaaatgccaactggaagatggaagtgggaggtttgaccaacaggttagagataagaaagttgcaacaactgggtaaatttctgaaaccacaagctgatttctatgaccaatctgttttctacgaccaatctgttttatttgcacgtttgtgctcttgggggaaaacgtgactttaccaaccatgttaatgggggaaaagttctaacccttcaataatttcaagaaaaccagaatatggtttaggtcaaaaaagagtacttgattttgcaacaccaaatatcccttctgaggtttcccaaaaatgctgtggcaatcccacacggaactctctccatatttttaccatagaaacaatagtgctaattcagcatgcactgtgatttagaccactttgggcggtgctttaaggaagatatcaaagaaatgaatacctgcactcttataatatcttaaaaatgcaatacagaatataccaaatttccatgtaaaatgctaaataaaataaaatgcattgattataatgtgtttcagaagtgtagaaaaacaaatggaatcattggacttcactaggtttagtaggtcaaagatttagagtatctactattagatacttattcaaataagtacatgggcttattaataaattattattagggacagaaacgaggaatgcaaaaagtagttgaagatcctaaatgtcagaatgatttgcctgagggtttagactttccttcccttagggatattacacgggaacctagcctttctatcactctgcaacacctttgaaaagaaggagctatataagggtgatatggaatttttaggtttacattgccctagtagaactataaatacacatgactaggtaaccagatttaccacatggaaatagaagagatgcctgatccaccagacacaagtctgtcttcagcttcatctctgcatctactaccccaggacagaaatcagcctagggccagacttgaatatctgttgtccatgcagaaagtgacccaagtcatttcctcaacactcagaaacatttaaagctcttttttttttcttttccatttctggccaagctgtttagaaagcacagatgcagctggcactgtgatattgtaagcagccttgctaaatggctccaaaaggaaaatagctgtccaatgtcttgggtagatctgtgagctccattcaccaatgtcacatcatcattctctggttcttcagacccaagaatcgaggtcagagacagcggagttgctgctgcaattttgtttacataacaaggtaaagactactctgataaccctccattgctagccccttttcgtaagaaataaagttaccttagtggtttagcatctgatttgaagaaaccaccccattactgaagggagatcagatgttcctttaattttttaaaatgttcatgtgaaccacgtgcaacatgttcttcctctctggtcacgatgagagatgaagacttttttcagcatttttttgataaaggttgtggcaaagatctaaaatccaccctgctggtcacagtcatgacccwggtggcagtgaagatgtgactttggcttgagaaatatgagatgtaatcctgccatgaagaacagctatagaaaaaggtgctggggtgtggtaattattcttcyttttcttcaattcatcggacttaaatgtttagcagccagatatgatgataagctgtaaatcaagcagagtttctactgctttatacaatatcccaaccacacaggcagtacagcagagtgctaagaaggtgtgcttatcacccttctaaagcctgatagtatctgcaccctgaacaaattactttcataggagatcatgataatgcctaccttttgggggattcttgtcaggattcaataaggaattgcatatgaaatgcttagtgctgtatctggtacataagcattcaaaggaagtgcttgggctcaggtctgtgggaatctgaagcttctgttttctggatcatgcttcattattagcaaaattagaaaataatctgctattcactgaatgtgtcccttcaaaattcatatgtgttgataccctaactcccaatgtgatggtatttggaggtgggacctatgggaagtaatatggatataatggtagagccttcgtaattggattagcacctttatagaaagagacaccagagagcttgctttctctccctctccccaccatgtgaggatacagcaggaaggcaaccacctggtagctaggaagagggccctcaccagaatctgaccatgctggtgccccaacctcaaacttcccagcctctggaactgtgagaaatgaacttctgttgtcgaagccatccagtctatggcactttgttatagcagcccaagctaacttaagatgtgatctaatggaaatagtctatctctgaagtccctttaaactctcacattatgtgattcctctttctttgctttgtggtaataaaacacttttcttaagctcccagtttgctaggaacacagtaacaactcacctgaggaaagtagtaagaatgttcttgaagtctgacaatcattagagctaagcctttaaaaattctatcaaataaaaaataatcagcaaaaacataattaaccacccatgttttcctagctatgaacaaattctatactatataatttctattttttaaagtgtgaagtaaaaatttctaagacactgttttagttgtcaagacataaaaaaagaatgaaaaaaattggttatcattttttaatatttatttatttatttattttgagacagagtcttgctctgtcgcccaggctggagtacagtggtgctatcttggctcactgcaacctccacctcccggcttcaagcaattctcctgcctcagcctcctgagtagatgggactgcaggcacgcaccaccatgcctggctaatttttatatttttagtagagatggggtttcaccatgttacccaggctggtcttgaactcctgacctcaggtgatccagctgcctcakcctcccaaagtgctgggattacaagtgtgagccaccacgcccagcctgtcatttttaataacaaaaactaatttggatatattgcatctatatttatattacagcactgtagttcaccatgctttatagttagttgtatatgtgtctgtctctccaccaaacttgtaaacaattttaagagaagggagcatgtttttgtatatcaagcacttagcgtagggcaggcacaattcaccactcaataaatgcatgttaaatgaattaatgaatgaattaagggcgcagcactgagacgttaagttaagaagtatggttcaacagcctctgcaatccaaaataaagacaggccagagcatcaaaggcaagtagtgacgtaagtgaagttacatcccagatgaccaaaatggataagaggtcctgctttgtttaaatagaagagtcagctttaaggtggggcacaaagacttcatgaaaaaacatggaattttatttggattagagaagtggaaaaatctttcccaagaagaaggaccacgtgagcagtaacataatatatttgtttcctattgctgttataacaaatcaccacaaatttaggggcttaaaacaacacaaattcattatcttacagttctggaggtaaagtcaaggtgtctacaggtctgtatttctttctggaggctctaagggataatctgttttcctgccttttttatctttgagagcctcctcccattccttggcccaaggcccctttccatcttcaaagtcaccaatgaccagctagctgaatctttctcacatcacatcactctgacgctgactcttctgcctccctcttccacatgtaaggacacttgtgaaattattttggtctcatccagataatccagatattctctgtattttaatgatggctgattagcaaccttaacttcatctactaccttaatctcctttgccatgtaacctaacatattcacaggttccgaggactaggatgtgggcacctttggaaggccattattctgcctactatacataatgtcagatgcatctgacatgtttgtgcaacaatatgacttccacagaaattttgcatattcaatgtaagtttgaatgtgtttacaggactaggtgagtgggagcctatttttgaaagtgctgaatgcccaagaaagggatttgaactagttttataagtaataattatctttgcatcaaattagtattaatattgccattacttttcatgttacatgtttgaaaatgacatgattataaattatgttcaatccagaatatcataacttttaaaggtaaataagacttaactgaagttttcaatgattaacgagagacttgaaaaacacaatttaatagtagcctcatcaattgcctcctcaaagtttgaaagcaggaaaaaaaaagtaataacagcatttaaaaggcatttattaaaagcccagttatctgtggcttgaagttgactcttgatattctaattgagacgcacaaacataaaatcagcaaggtatgtgaacatatgcaagtcaaagacagatgtatgttaccttgcacctaagtggacaaaagaatgttaacgtcaaatgcaaagatgtctcagaaaacacagaatacaagaaatcttatcagcagaccacaaaataggtccaggaagatcatggaggacaaagagtagatagacccagaggtccaaataagcaaatagagcaggatcagttagtatgcatatcctataaatagaaagatatgcaatcattttaaagtaattttcaaaatagaaggagaaaaatgtagttaaaatttcaatgtgggatgaaaaaaaattaccaaagtgaaattcttagagaatcttttgataataaagatcttagacacatgtcaaagttgtcaaatattctagtgtgctgggcttttttcccttgattatggtgcaataattcttctagcaacactgcatatcaaacaaaaagggtccagtaggaatccctgtactgtaccatgcaaagaatgtgttgtatacatactacatgttaaatggccactcctttaattttcactctaaattctcctgccattaccggggaaaacaactcctaaaattaccagaaataataaaacactctgtatactagtttttaatgcaatatcttccaactttctcattatttagttactcccctggattatatatatcaggaaatattggtgttcataaccatagcaaagcacttagccttagaaagaatcaggaaagamaatggaaaaaataacacagtgaactgtgtttccaattaccagcagatgctttcatttattctaagcgttcttgtttagttaactgtacawatttttaatcatagaaatctggtaatgttctagacccatgctcttagttaccctggtcttccagctgatttcacatgtctcttgcttctggcatcattttcccataaatactgtgcctagggcgcatgaattccaggtgaaacctgttaaagaatgcagcctattgcaaagtttacttgattcaacttttgtgctgtgtgtgcatgtgtgtgtgtgcatgtgttgtgtgtgtgtgtttcgctgagactgacattgctgtagatttctctgaatcagcagcaccattagccactggctacagcaccatgaatgcctgcttccttttttttccatctttatctctttgaggaatcatctggtcaccattcactcatgcctggaatatcacagtgggaaagattaccaggcttcatggaaagactactttacataaatctttaataaaccaaatgaaagagcaggtcttgctgaaagtatccctgatgatggagatcaaagactcagagccttgcctgtattccaaccattctgaaaatagcaggaggggtgcaacaaaatgctggaaagaaggagtcatggagaaactggcctaactaaattgcatttgacatttgatgagaaaagactgtcaaaaatagtatttgtttatgaaattctttaagattctatcacatatatttattgcatgggcttatagttgatagtcaaccttatctttaaagttaacccataaggggaaaaaaagaataaaagaaaattaacaagctatggttcaatgtccccagatacagcctttgttcttacatagcagttctggttgcttctttccattgagagtatttggcctgcgccagcatgattgtttttagaagtcctaataggtgtatctggaaagactgggatggttgctgcattttctttcataaataactaatatggaacaggcataaaatccttgccacatggttatactctagccttgctattcagagtgtggtcatgaccaacaaccttgacatccccaggaaacctgttaaaaatgcagagtctcaggtcccggccagacttctggaatcagaaatctgcattttaatggaatccccaggttattcaaatgcacattaatatttgagaagccttgatctagaatagcctctaggagataccatttggcatagctgttctatgtaattcataattaccaggaggggccgggcgcggtggctcacgcctgtaatcccagcactttgggaggccgaggcgggcggatcacgaggtcaggagatcgagaccatcccggctaaaacggtgaaaccccgtctctactaaaaatacaaaaaattagccgggcgtagtggcgggcgcctgtagtcccagctacttgggaggctgaggcaggagaatggcgtgaacccgggaggcggagcttgcagtgagccgagatcccgccactgcactccagcctgggcgacagagcgagactccgtctcaaaaaaaaaaaaaaaaaagaaggcttgattcctcatcattttctcactttccttttgttatgtcatttatataaaaaatctttctatatcttattagtggtctagtttatttttattagattaagaggaaagaaccctcactcaggcattttccagcagttttttgagtatgtctggataatctctcctccactctccctgagatcttcttaacctggtcaaattcttgagagcgttcaaaatttatgcatctcacttattttaaaaaattaacatatttcagactttgtacaggccactttttaaatatcacatttgattctgcacactacatttcttttaagcacacttacaaattaaacagagatcagttaggagcaatcaaagttataaaaatgtttgagaaataaagactccaaacaaaacaytgaggccctcatcagtttgtctagggaaatgaggccagtagggggcctgaagatacatgttcactaccacagcatatgacacaaagctgcacagctcatgaacatcaaacacattttgtgtttagtcactttggactaaaaacaaaattccctattaagagaacctatacagcattaactagggcactaaataatacatggtaaagatcatgcaggatgagaccctagacatgattcctgggcttttatccctccaaaatgcacttacaaagaatatttatcttatgagccacatacattgttctgtatctgtctattctcattcatactttcaccaggcctaccttaagaaccttgctaccatcaaatctcttactgtcttctgccacaggtcactccccagtaccctatatccaacagccctgcctttgatttcctttactcctgcattctcgctggggaacccaaatttccgaagtgagacctacttcaagggttgaagggcttgactttccagctttctaacatatcccagggaaggatagccaaaatttgtgtttaatgaacttgtcaactgtgatatcatatagcttaaaaataacaatattaaatttttatagcacattacagtttaaaaataactgacattctagtcttatttaatcctttcaagatcccagtgtgatggataaaawgttgccatcatacccatttatagataaggccccaaatttggggcaaagctcagtggtgagtatagatcaaaacccagtttttgtaactctcagataagtagtcttagagagtgactttagagatttccttgttgtagctgttttctaagaagttgacagactcgaatgtgaaattctgaaaagtgtactctaccaccactgtgacctttcacaatcagaaataagtcctgaaatcctagaaaggctatagtcagagggtgccaggggcacacaccgaagtatcagatgttcagtagtgggacagaataggaggctgtattcatcagcaggcaggagctgagtagagaaaatcaagtcttcctgccatgttgttctcaaccttttgtctcactggacccatttttttggaaaattcacagagacagtaaacttagcattagttaagatctttaacagctaacaggatagagtgtgatgttagctgaaatcctagtttctctcttaaaacatacaaaaataaatgaataagtaaaggagggagaggtcactcacactgaaaaccagaattagggcacaagaggccgggcaggtccccagtacctgaaaaaggacccaaaggctagcacagaaggtcttcccttctgctgttgctcccacagttaatattcatttgcagagtgaacaagagaatgattgggtatggtttagacactcctcctacttcgccccacctgtctttcctcatctctccccacatgctttccccctttccccatgacaatggaaatatgtgctgccttgtagggtcggtctgtagactaagtcgtttttcctacttgctggcattatttcttgagattagctaaggccagagttatcacatttctatgtctcctaaattgtttgcagttcttctacttggactgtatagaaccaagttgaaagacctgtttttacttccctgctcattttgaattttttttttgaattgcatttgtaaaagcagagtggtcgtgtgtgtgcatgtgtgtgtgtgtgtgtttacacatccatacttgaactgatggagaggaaagttcaggacaaaataaataaactccctccatagtttgcatttttttccaaaagataggccacagataagggtcaataagggtataaaacaattccaaaatatctgagtgagaaaatttttattaaactttttgttttgtaagaatctattaatagattcaaagtgaaagaaaatgacaagggatatatgtttctaagtttccatttttttgaaaggtacattctctagaattgttagaaatatttaacattataaatgccttattttacaaatcatgtataataaatgcttatctgcctagtgactggagcacccatagtctacaagatttttacatagccctcagaacaccaaaaattcttcaacataatccaggttctaaatcaactatatatttgacacttttcttggttgtatactttagtatcggggttatcaattcttttatagctccaaccacaaagcaaagtctttttatttttagtttttggaagaaggagccaatgcaatggctagtttttattaaaaagaagaaactttttagcacattttgagtaacttagtgcaggggctcagtgggcccactggtggggcagcttgtaatagtttccagtcagggcatcacyggggctcacctttgtccagccaaaaccagatgatggcactattctcttcacagatgctgcccactgctggtgaaggaggggggctaaattaaggtcctctttggtacctgaagctgcctttgggggtagtatattatatgggtccagtcccttccgtgcagccatcatgatatccctctccaacccagtcacctgctcattgtcagtaagaacatcacctccagatgcattggagtgcacttcaaccacccctcagggaccctgggccctcagggcccgcacagccggcaccccagctcctcaaagtaacctcgaagccatgaagccatcacaccctcaacaagtaacagtacttccaggaacagcaaagtctttttgatacaagtaggtgtccattgtccattggaacaagctgttttgactttgttagttctcattattttgggttgattcacaatgcctgaaaaagaacttggttattttgaaaatctatcttaaaatgtcctgtctgcaacccattaattactgatattaacatgtgtaagaatcctcacaagttacctagatgggtcttctctgttccatgattcctttgatcacataacaaccccaccctttccccaccctcagtgatccaaacttctggctgcagataccatatcaagatgaatgatgtccactgagtagtgaaaattataggtttacaggcatgttcttctaaagtaactatctgaaaaacaaaagagatcccagcctatgagatgttagctacgaaatgtaacaaaaccacctttcagataattcacatggtagagaggttttagtccagcaagtactagcctcgcatcagtttgtcccaatctcttgaacctgcagttgagccaaaaatttccgagccaagctttctcgcaagatttcctgtacttcctgtttctatgtgagccagaaataccatgagaatgacctttcttgtggtatttttgcccttatactccaggatgaaaataatcccatattgggggaactttttttaaattgtgcaaatatttccaggtttcaaaccttcaaatgaagtaggttcctccttgggaatgaaaatgtgaaatggtgatggcttggccctgactcatctccactaggaagtattcgtgctcagtgatccaacattttgtaatttctctaagatatttttacaaggaactagataaaatagtacagaggatacaatggaaatgtatatccttggattttttttaaaaagtcattcttgaagaaatgaacaatgaagtgttgtgttcttagtacattagtgtatgtgatatatgatatcacatatttgttttctttgttcttaacccctttgttccaagggtcaggatatcctgatgctaagtactattgcaaaataactgaacaaaaataaaaatagtcaaacacttaggaaactcttcagttgttatgtcaaggaagtttgtgactgaggagtgagtttaagacattattcaggaaatatgataataaagcaaacagtctacatgtgattattaaataaaatcatctcaatcctagagagtcttgatgcccccagcctgatggaagggtaagataaggactggacgggctgtcaaagtggtggaagtgttgaactgatggtgaaatcctttcatctcttatcagagagggaaaaaggaagggcacatctttctaatcaagtagaccgctgattattccctaattgtgttgtatgtatatctggttgttatagaaagagctgctagatcaatattttcataacaaaattcaccaaaagcagtgtcttcaatgtctttattattgttttataccctcttgccccttcttcacctgttaggaaggagagtaggtttgccagtatgcttttccatccagaaaaaagaaaattcacttaatccagtatggaaaactaaacttattaaccatggatttagagaaataataaaacaacaataaaattacagttgtctttgctggtttcaactttaaaaagaaatgaggtgggagtaatgaaaataaaacacactctacaacgatctttctcctcttccccaagtttcctcctctctcccatgaagaaatatcaaataattgtgtgataaaccagccttgaaaggaatgtagagcagaagcaacagattatacaccagcaaaatggcatgccaagcaaaataaagcactttgcaatgtggagacgtgaagagaggaagatgggattgttacaatgttctccaagaaaacaggggctattcacttgaatgtgcaagttcaaattgttcctacaaacccaatttgctggcaaaagtgccaaatacaawactaccctactttcgtttctgtccaaggcctttcacataagctacagggggcatcgccttttgttgaattggttcttactttcagggttagcgcctccatctctgagactaggaacaagaggcatggcccacagttgakgttgccctcgattcaaccactctcaggtcggggacacagtagtcagtggcccacataataaatcaacagtgctctccctccagaaggtgaattgttaacattcttttctttctttcattgccatttatgtcccctgtgaacatcctttaaaatgcttgttcctttgaaaatgggttttgaatgagcctgagccacatatccaggctatgcaggccactgcccatacgcatgaggatcttgatgcttcccgaattcgcatctttcggagttaactgtggaatgtgattcaatgttatttcccttccagctgaagggcagctgaggttatgaagggatttgactaataggtcataacccagataggtttgccgagaaccaaatgacacaagggggagggatgtggagaaggagcgagagtgatcaaactgaggcactgaggatcaaccaagcccatcccagcactggtcttggtgactgggcaaggtgccccccaacccccatcaggccctccagagagaagcagctgcagattggctctgcagactctcagcttcctctgtttttttgagaactccttggggcttgcaggcctgagcctgtaccacaggggtgactcctcacctgacacctccagataactggcctccagcaaggggggagcccctctgtgaggttagcaaaggggaagccccgcttctttgcctgaagtccttaagagctaagccgacaaagagctaagagtcaacaaactttgacaagcaccaaaagagaattgagaacaaataaatcagaagaaagaagaggaaaagcaaatgctagaacctcgatggcttttttttttctccctgctgtcgttccagctgtagcctgggattaattaagtgctgtgaactcagtgccagagagaggaggggaaaaaaaatgcattctatctctaaggaaggagtacagtaacagtttctcaccagagagaaacctagggaagtgaatcgctctcgtcggcagtgtttgtggagggcctgaagagacagggaggttgtgccaggctggaggaggcttgtctttccgaagctggagaggatcttacgggggttcgcttttccctgcctgggaagaatttcccctgtggtagcagcagcagcagcagcagaagcagaaacagcagcagcagcaacagcagcagcagcagcagcaccaccaccaccactacctcctcttctggggcacaagacagaatgcctgtgctagagcgmtatttccacccagcagagctaggcaggaggtggacaggcccagaaggtgtgctgccctcctccccgggaagccggccggggtgccagcaggggccgctgccctgggacttgccaragatgatcaggatggtaaagctggtttggaaatccaaaagtgagctgcaggcgaccaaacagagaggcattctggacaatgaagatgctctccgcagctttccaggtaaattgaccatggggtgtaataggtcacaggaccaagtctgataactaactccctttctttgtagagtccaagccatagggaggaaaatgaactgtgtagcatcaggtctgagggctgtgacttccaaatgtctgctgtatgatagaaatgcatcttgaaattaagagtgatttagtaggaggagcatttgactggaaatcaagaaacctgggtcctggactcagcttgacaaatgcttgccctttgggcttgcacaagccaaatttcctgagtttcagtccccaccaaggagggggtggaattggatgctctttaatggccatcctgactctaacatttcttgtcaacaagttagagatatccctaggagaatattctccttgggtggctttttatcattctttctataaagtaaaatacattttccaatttttaactatgccatttacagcatgtattatgttcccagcactgagtttggcatgcaagctttttatgtcctgggcaagttggtaaactttcttgacttggtttcccctttggcaaatgtcagcaatataaacacctttattgatatcaactcactcacaaatgtggaaataatgattcccagggactttgtcttgtcataagaatgtgctgtgtttgggacggttgtggagaacttcactgtgtttctgacagtggatacaaccaccaccaagacacccagcatgcctgggaaggatcccaaggggcttcgtaaactaagaaagccacagctgactacagggcactctctttctttgaggaatatgttgctagatatttggaaagtggtgggttcacttcagaagaaagaacatgagtgtgtgtttatgcatctgaagtcttggctaggcctatgcagtggaatcctggcgtgccattggcggtgagggatggggtagatggaaaagatacatcaaaaattacctctccctttctcgtggaaacagagtaggaaataaaaatctggctagttttgattttaatgatttatgccaggaactttttttaagttatgacttaataatctgtaaagaatattattaagaagttaatactctgggaaaagaaaagatttaaaagggagaaaaaaacagggttggtctccagtaaacaatgagtccttgagtacataggaaagtgagggaaaygaataaaactgaggtttatgtggcaattgggagaaggatgcccagggagatgggtcttggtcagatgaaatgaggtaacgctaaaccagtgttgcatgtgagtagggtaagaaaaatggaaaaacccacctgggcagaaaattttactctgacacttcaactcttagcactttaggtttgtttcagtcaattaaatgattaaaattcatattacaaactgcaccctttgataaaactatctaattcaatagttgttagcatgtctgtggagataggtgtacattattatttatgttctatattagtgaacatctaattcctgaaaaagcaatactctggagaaaaagcagaactcctgtagcttcttattacttaaaaggcacacttttctggacatgatgaagcagagcttgttgagtcttactatacctctctaccactgcctcacattcagtggaaactgtctctgaagccacttggattcccagggaagctgcaccctggtctgctgttgaggttgcctgcctgtgtggagacaggctttataacacctttccaaaggatgtgtgtttgcctcctgttcttcctcctgtgcctcctcactctcagggagatgagggctcatccttactggaatgggcataaaaccttttcatcatcatccatctatgcagcagcaggtcataggatgcaaccccaaagatgagtggcttcactttccaaactgtctcttaccttcttccttactcatcctattcctgatgctgcatttcctctgagcatcaggtgtcttcagctgcatcattttcaccacagcagcacaacaatggggccctcaggaacacttacagactatttcaaaacttctggcatttttttgtttgtttttagaaagtggtgatttaagctgttttcagttcctgcacagaggcagaggtttatgatagacagctcttcaaaaaacagcaagacacggtgctccctcgctctctctctctgtcatttcatccttgcctcagtctcctcaatttatactttcataatccttttaagcaactgactatgcatcaggtgagccttgctttatgcttgaaatgtttcttccttggctcagtcaactgaaaattttctattcaaacaacaaagcccaggtcaagcatctctctctttaaaatgcctttcctgatctccagcggcctccygtctcccccagtggtaatctattccctcctctttgctatctttacctgtagttacttaacattttacatttatagcacacatatttttgctgtgctagtaactaaaaacaggaaaattaaatgttataacattctgtgtatattttgactgcttgtggtaatgaattgatttaactttttttaaaccatgaaattgcagaaattctgaatcgaaccaacagttactttagaggactttaaagatggtgtcattggctcttaatgtgtttaatggaaccttaaaagtcccagtgtttcttttccttagcaaagggcatcattatttttacgcacccttcttcaacaagactggaactttgtttctcacaagtgaagtagaaaaatgttctgagatttggctaaggtaataaaaggagagaataaaaaaaatatgggaacataaatatgtgttcgtgagagattttaaggtgaaatacgctgaattaggagtatggaatggaaagaacagtcccctggagaaagtgggggagtgccagagagaaggtgatacatagaaacgtcttccaccatcttcagactggcatgctctgccgactgttgggtggctgtccaaagcaatagactgtaggagggaatgggagatgatagaaggaaggaagaggagcttgtcaccttcacatgttagatctgtgcatctgggagtgcccccaaagctgggcattggccaaggcactgttcaccctagcaaggggctctggaagttatcagcatgcttgaggtccaagtgtcaactctgttctttgaactgtacccaattatttaattgtgttaatactcacatctttttccctttatgaagcaaacaaaggaattatctaattatctagttaacccctgtattttggagatgaggtaaatagttcagagagactcaataaggcatccgggatcacacactgaaactgtatcagaaccagaccagcatttcgattgcccaactctggtccacagaactcatgtggtcagggtacatgctgggtaatagaaatttaaatttaaaccaagacatggctttattgattacatgtagatggggcaaaatgagaactcatgatgtgatataaaccttggtcaaaccagaaaaatagtattaccatgcagaacaagtcaaaggattgtgtctcgtatacattttctacttattctgtgggctttagtcttatatccaagcttcaaatactgcaaatatccaaggaaagatccccaactgttatcaatagaaagtcagcttacaccattgcagtgacagcatgcacccatgtggggagtggggagaaggatgaggatagaaaataattaagtagcttctcagatgctgtgaggacaaatatgatgctaattataattctagtcagcaacctgtttaagactagatatcccttagcaggacttgttcttagttgaataaataattagattttggaattcaaccaaataaccgcaaactctgcaactgggaaacttacctttcatttcggtgtctctggtctaaattttgcattatagtttacttatttattaagctcgttcccatttcaataagctttggttctaggaaaatataaatacacacaaatcgctcaaagaaagaaactcatcttccccatagccattgtaacgtctcctgcctttcaaggagaatacaaaatcagaaattttctttatgctcagacctgaatatcaaattatttcagagaagaaaatctccagaaccattctctgattccagtactctacaattcaaattaacatttaaactactatttcaaaatgtctcaagtatcaagcacaatataaatcaaatatgttgaagaatgaacatttcgatcattataatcaagaagcatttatgggatgcttagtgtataccaggcactgtgctaggcaccagggactcagagatgaatcaaaagcttaatgaaagaacaattgtggatttatgaatcagagctctgtctacaactacagtgtgaaaacaagcacttgttagtttaaacctgtcaactcaaactactggctgtaaaactggtaaaattcaaaaacacttgtaaaaatttatacacactttcaaatactcattggttctaatgatttcattcaaagcaggacaaattgctttgagcaaggaatcaattagtctcaatggcagataagtattaattcataayatttttctaaaactactgcttttagcagcctgttttcactctgtagtgatgctggataataatcattaataatttaaagcatctcttaaatgtgaatgcaaattgagtcaatactggagtacatcatctcactttgaactaaaccttctccttcacctgacttattttcatgaatgactcatgaaaggttcaaaactgctaactccagctccccaattcccactagttctaagtccataagagaggctaagggtgccagagtgtggttgcaatgttgagatcttaaaagttttaaattctgcatctccattactgaactgtgtgaccctgggtgggtacttcacctctcggtgcctcagtttcttcttatgtaaaaagagaattaataatagcacctttgcttaaggttgttgtcgggattaaatgacataatagcaaaaaaaaaaaaaaaaaaaaaaagtgcctagaatagaacctaagttccaccacactctcagtaaatgtatactctcataattactggtgttggtgttatttttctcaacaacttctctcattcattatcttttctctgttcagttgcatggcccttggtcaaatctcatgttgttttgtctataatcttgcaatagccttcaactctctctatccattgtcattctattctgtgatttagatcaacagtgttaaaagaaaaatcaagatatgtctcaacccttcttcaaaatcctttaataattctctagtgtctacagagaaaatccagattctttcctcctgcattcaaagttctccatctggcacgaactcatttttccagtcttatttgtcattattgccctctgagtactcatattccacccagacaagacaaacctcccacagcatcctacttgttttctgctcattgttctcaatgcttaaaatgactttgctccatgtccctaatttatcccattccttacttaatatcccgctcgtatgctagccccttcatgaatccctcctgagattactgaaggaaaatatgcctttctcttctgaagttccacagaactttctttgtatttatttaacaggcaaatcacttaattttgttacaattagtgtacatttcttcctctccttctagattccagctctttgagagtctggagaacattctgtttttttcatgttttccctaagatctgttgcatgtcagccactcaatacattttgatatgtgaaaaaataaaattatcagaaggaataaaatagcttacaaattgccatcagatgcatgaatgaacatctttttagggacagattactcaagaaacatgaattctagctcttgtttttaatggaatcctatttaamcatattccagcagaagatcaggattagtcattatagcttttaaaataaaagaatacacaagagtgaagttcagaactattaaaaaaggtataagtgcaaaactaatatgagacagctctctcttcctatagagaacttgtaatctactgataattacaaaattttagagcaaatgcatgcatttatagasttttaaaataattactctgttcatgcattttggaacactttacataaactaaaatttcaaaagtggcttcttctacarataacagtctgtagactcctgaacataatttcaaaaatagagtgcaaaaggtgtgtgtttacccagccctacgaatgagcttttgaggggctggctctcaatggaggatggtattcccaagatctctgctcgttctctgcaaacagtttcttttttcttctttccctttaaaaaaaaaaattaaacaaggctggttcaactggacagaaaagcattgacttttgcatcagaccaattccaaaaaaaaaaattagtagctttattgtgaaaagcccgaaagtttcaagtttttttttttttaactcacgaaagtaactgaaactgtgtactgtcttctatctgattttttccactctttaattttcagtactcttgataatacatactaggtacatctcatcatatcagaaatagtaagcagagctcacggaatttgtgatttaatgcaatgctgtagtcttgatatacacacagtgtgaactttatactttattttcctgtttatccctgtctgcctttccatacatttctctttggaattgacttcaatctctaaaatgccaaaagaccaccccaagaaatgagttttgtatctttgaacttgtcttaaatttcctgaaattataaaattattagaggccccttcttctaagcacttcttcttacctaaaaaatccacaggacatatattttagagcttataaaccaagtcgctgtcctgagcattttgttacttcatctgctgtaacacaaatgctgaggggtactccagtgagtaggtcacaattctcatcatgagtgacaggagaaaacttgtcagccttgtatgcagttggaaggcatggctgacaaagacaaagcagggtttagttgtggaaagccttgggtccaaggggccaagcttactacagaaaaatagaatcactagagagaaaagaaggacaaatttcaagagagaccgagtcgcagttgcatgaatgtggtagtagaaattgaaaggtacaggagccagaaaattgtaaaataaaatcacagctagagctatgatgggaatgaacgtaaatcttcygtaaaggtatcgaaaaggaaaattaaataactaagggtaataagacacatatcatgcaataattagaattttaatgcttcttaacctctggaattaaagccaaagctaaagaaagattgtctttcttgcttccttctccaaatctttttggatgacacccaaacatttcacacaaatctataaacgtaagtgacaagcacttcagaaaacctgcaggacattacatttagaggatctgtgacagtcgttcattcaaagaagtcgatagtttgctgaagaaaataatttaaaaagaaaagaagaagggacaggcagacaggcaggcctagagcacccaggaaaaggaagtcaggtaaggtcactacaaagaaacattcaaatataagaagtgtaataaaaaaatacatacagaagtgagaaggaaacagtcactgtttaaaacatttgtaacagagatttcaagtttgcgcactcaaatatgtgatgaaacgtagcctgagtctcttcttcaaccaagaaaattatcctcttgagcccaccctgatggggaatagggaaatttaaacttgttaattagcaccatggtggtcagtctcttctcgattacttcttttgaataaataccttgccactctttgctcctctccaagttggcatctgggtgaatatgtgccttgggttcccacatacctatccaatgtttctcctgcacacgcctgagaggtgccaacctcagagggagaagcaaatgtatgttcatgtgccactgggctctgcctgtgacgcttccctgcaattccccagggtatcaggagtagactttgcaactgtctctttgacatgaccttaccctgtgccatatcctctttcctcccagcagaaggaagcctcaatgtgcccatatctatagacccacctcttaatatattaaagggatctaataaaagaataaagaaaatcctttcatctttccacaaagacaagctgttaagattattgtccttctgcaaactcacacacaaaacaaaacccgaaaacctgttactctgaaggccaaacaatgaatatcagctcccttcttttcttctcattcttgctataatattccaaatgatcttccacgtatgcctctagaggggtggaagcagaggatatgcacaagagagtgcaaaacaaaagaaaatggcccacggacatacatcaaaaaacattatctctatcacacactggttaagttactatgtgctaggccctatccttgagcattgcgtattcaacatgatttgtctgagttacattcccatgtaactagaagcatcagctagacctgattcttctaccctctctactaccactctttctctgtctctctcttaaacacatacatttccacaaccatctcaaaatgttgacactgaaaagtttgaccaaatgactgtaatacatgaaaaaagatgtgtacaaatctcacctttctggttggttttcacattgagagctgagcttttgtatctgccactaattggaattgtggtcctaatcatacaatgtattgtattctggtcaggtctgatacattttcactgcttaaatgtgctaattggaaattctgagagctcttctcctcctttctttggccctcatcccctagaaagaaagtggggagggaatgtaaatagacaaaattggactaaaacaaattttgttttgaaaaatttttgaaaatgtctcaaatcctccaaaaattgttagaaacatactaggaggtcacaaaatggaaaatgatgtttcaatgttacatacaaatactgaacttcttatgctaaacagtaagcatcaaccaaataggtgttatttccaacttagaaatagaagaaattgagacttctatttactggttatttatttaagatattcagaaagggaaatgaaaaattcaaatttctagttttctttactcagtgcatagcattgtgctttctgtctgggacagaataaaggatattatgacctattagaagagacagatacagaaacaactcactgatatcaaggcagaatggcatatgctttacaataaagtggaaataatactctatgggaacgtagaggaagaatcaaaagtgtttattcaactaagtttgtttggtgcctatcatgtgccacatagtttcttcattccttagaaaataaatattcatgaaccaagaatgttgaggtagatggatggatgggtggatggatagatagatagacagacagacagacagatagatagatgtgatatataatatactaaatgtgcatacacaaagtctgtgccaattgccaacacataagacagtgattaattctgcctgtatgatggtggtaaaggaggtgtcaagaaaggagatgatgggctgggcgyggtggctcacggctataacatcagcactttgggaggccgaggcaggtggatcacctgaggtcaggagttcaagaccagcctggccaacatggtgaaactctgtctctactaaaaatacaaaaattagaggcgtggtggtgggtgcctgtaacccagctactcgggaggctgaggcaggagaatcctcgaacccaggaggtagaggttgcagtgagccgagattgtgccattacactcaacacaggaccaaatgcaacaaattccagggaaggccaagttatggggtataaaatgaatcaggggagggctaggataagactagaaagataggctgggggtcaggttgccattggcctcatctgtctttctgaggagtttatcctatagggataagaaaacttcagacaattttagtgggaagtgatatgataaattttacattttagaaagatcattctagcaacagtggctggtgaagaggtggagttagggtgagcatactaacgaatatgtataaccatagtggcattcattgaccatatttgtaagatgttgaaaattttgagatgctgaatattttctcttcaacttacaaaccaaatttcccaagtgctatagtattttacacagagccacaagaaataatatagaaataatcaagccaaagcccttgacacatggtatcatcctatcatgaaggatttatatagccttccatctagacatgctgttccagtcatgttcatctcttccccaaatgcagaacacaggttgtcgccatagtctcagaacagtctatccttcttacatcgccaactcacatttcttccagtacttagattgcctgttttgtttgtttgtttgtttttgaaatgaggtcttgctctgtcacccaggctggagtgcagtggctcaatcacagctcactgcagccttgaactcctaggctcaagcaatccttcctcctctgcctcccaagtagctgggactatggatgcacaccaccacacccagctaatttttttatttttgtagagacatggtcttgctacgttgcccaggctggtcttgagttcctggcctcaggggatcctcctgcctctgcctcccaaagtgctgggattacagttgtgagccaccacactggccctccatgtttttctaagcaaacagttcttcccacactagatgccactggatggatgagaaaacatataagaaaaatatggttttttatgtatcttataatgtagtgtgttaaagttacakcctcaaaaacaaaccaagtgtgatcagtactccatgaggattgggcattaactgactctttgttggttgacccaggaaggttctgtgatggactgatcattacagctatgactttaggatggttaagatctcaacaagatgtgagaaatttggtgagggaataaacgtgaacataggtacaaggcaaagaagcacaggaaatgattgagaatggagattagtcaaattggcttggcacagcattaggagtgaagaagagtgggaaacagaaaaagacattagtgggacgagactgcatatggacaagaaatcttaactcttgtagaaccattgaaaatctttaaatggaacagtaaagggtactttcacttgaattttttaatgaaaatgggtctttgagaggatctagttaaatcactgcattttttttttatggtgagaaagctgagactccacagaagttacacaacatatgtggggcacagagctagttattgactgcacaagggccaactcgaggtcccttgacatccagccatgccattgactcagccacgctgctggtcatggtctaaccctgaagccgctcaactccagccgaggcttctctaacatgataatctctctaaatccaattttctgtccttttcactcccaaatacttaacgtctccgtgatgcgtgatggcactatataagtgtgtagtgtccatctttccatgagcaagagttagatgtttacatgtaaacctacatgtgatatgtatacacacatttttcttgtttccaaacttagattagaaattgtctaggagagtcccaagccctctctgtgaattttcccatctacattgcctgcaatgtactaaagagatagacgttcaccagaaaattaaaaaaaaaaaaatgccaaaggtgagaatttcaccaggattgtgaattaacaaagttatatgtaagagagatagatagaggtggtagctggtagttgcttaaccattataaataaaatgttactgtggtccttttcaggagttctgctgccttctgcattgttgcctggaggtagaatttcaagcagggccagtgtaagtggctattgtggcttgggtctgtggtacatgtgcccataagctactgaggatcagcctttcagttcctcaggctctctttgcaaaagtagtggtgaccatgattcagggcctgtactcagaaagcaagttgaagatttagctacatttaggcaagattttataaactggacaggcctaactcccaccatttgtttttctttcctgcttctataaggtgtttgtagccccgaaggaacagtgtaatctttgatgaccatttttcctcctttatcctctgaaactttctcctcctcctcctcctcttcctcctcctctcagacgcttcccaggctgcctgctaatgccgttcagagcctgtctgtttatgactacccaaataagtcaatagttagaaatacaattgaagtggcttcttcttttaaatcagcaatagaccttgttccattaaaaataagatcctactctgaaccattgcagaaattttttttgtttcttataaagaaatgacagtgagtgaggggagtgggggcgggcagagatttctgatgttattcttaattatttttactccatgctctctgtacctttagatctagctgaggcagaaacagtgaaatgccataaaataaccctctctcgaagtatatttggcctcacaggaaacaggaaataccagaaaagatcacaagaaaagctgtaatcataagatttcyagcctaattcttttgacgtcagcagtttagataagtcagataagcaatcgcgagcatccgcgagttcttgagtgccagtccaaatacccacagtgcatcttcaacccttttgaactctcgcattgtttagcccctgcgaggaggctctcctctcttcccygcaagaagcatatcctgaaattgtgaattatggattttatgtcaacattaaggtgttcaaagacattacacagagcttctaaattggtcccgtaaccaattcagcttgctggatgcattgtaaaccctggatggggccgagtgttaataaaacaaaggaaaaccaagcctggttcatctcaaagggagtttgcttcctgaagtttaacttttccagtctgggcaactcatctacggccatgtaatgtctttgataatatgctaaaagatttcttaccatatccaaagtatttagtaactccttcattcttcattatttccacctttcgttcgctaccaccacctccattgcccaccacaacaatatacttacgggctggttagatataaatgataatgaggaatacactccccttcgagacattttcctaacttcagaaccaggaccatggaacttgaccattatataataagcagaggcacatgtatgggctgttcagagggatgaagtaggagtttaaataaagatttaaatagatattacattacatgtacatttaaagtaaaaaaaaaaaaggctgaggataaaaacttctttgcacaatatctacctatttccaaaaagacttgtaagcttatatgacgcttacaataaaatgtaagtacacaagcacataaaaccattctgtcaggatgagagataaagccatatataaaaagtaggaggaaagagaagagttacgcaaagcagttgagcaaaactgggatcagaacttcctagcagacagggcaaaggggaagcaaaaatgattactacattcattatctccaggaagatttgctgggaagaaagatatttttcctggcttcgggtatgtggagcagtttttgatgaggactgtcagtctggtactggagaatgtcctcctgaagagttgaagtaaatgggaagaggtgaaccagctggggagagttttgcaggctcttgtagtgaaagacagttccataaagaactgaggagttccaactggggcccatcccattggctccccatggaagagtgcagccatgtgggaaaagtgcaagtctccacccagagctcagttcttgtgggtgtataaagttagggtacagccccccccccacccacagcatgccgaacacatgctgctaatcccatcatgggcatacctgccattatagtctttaaaatggaaagagaaaaattaagaagcaatgcttccttttagatagcagaagtgtttttgtatttgcctttggtctgtgccaggcatttcacttcaattatatacacattggtaaggtgctctaactaactcataggtggatcctgagtcttctacctggtttctaacctggcacttccctcatatgactacactcttccatcctcattccccccagttgcggacatattcttgatcccttatgtcagacctgtcccaaggcacaagctgggtcctatcccattggctccactgaatggtctctatgctaataaagacatacttgagactgggtaatttataaaggaaagaggtttaatggactcacatttttttaaaaaagttatacttcaagttttagggtacatgtgcacaatgtgcaggtttgttacatatgtatacatgtgccacgttggtgtgctgcacccattaactcatcatttagcattaggtatatctcttaatgctatccctcccccctccccccaccccacaacaggcccggtgtgtgatgttccccttcctgtgtccatgtgttcttattgttcaattcccacccatgagttagaacatgcggtgtttggttttttgtccttgcaatagtttgctgagaatgatggtttccagcttcatccatgtccctaaaaaggacatgaactcatcattttttatggctgcatagtattccatggtgtatatgtgccacattttcttaatcctgtctatcattgctggacatttgggttggttccaagtctttgctattgtgaatagtgccacaataaacatatgtgtgcatgtgtctttagagcagcatgatttataatcctttgggtatatacccaataatgggatgtctgggtcaaatggtaattctagttctagatccctgaggaatcaccacactgacttccacaatggttaagctagtttacagtcccaccaacattgtaaaagtgttcctatttctccacatcctctccagcacctgttgtttcctgactttttaatgattgccattctaactggtgtgagatggtatctcattgtggttttgatttgcatttctctgatggccagtgatgatgagcattttttcatgtgttttttggctgcgtaaatgtcttcttttgagaagtgtctgttcatatcctttgcccactttttgatggcgttgtttttttcttgtaaatttgttggagttcattgtagattctggatattagccttttgtcagatgagtagattgcagaaattttctcccattctgtaggttgcctgttcactctgatggtagtttcttttgctgtgcagaagctctttagtttaattagatcccatttgtcaattttggcttttgttgccattgcttttggtgttttagacatgaagttcttgcccatgcttatgtcctgaatggtattgcctaggtttcttctagggtttttatggttttaggtctaacatttaagtctttaatccatcttgaattaatttttgtataaggtgtaaggaagggatccagtttcagctttctacatatggctagccagttttcccagcaccatttattaaatagggaatcgtttccccatttcttgtttttgtcaggtttgtcaaagatcagatagttgtagatatgtggcattattgctgaggactctgttctgtttcattggtctatatctctgttttggtaccagtatcatgctgttttggttactgtagacttgtagtatagtttgaagtcaggtagcatgatgcctccagctttgttcttttggcttaggattgacttggcaatgcgagcccttttttggttccatatgaactttaaagtagttttttccaattctgtgaagaaagtcattggtagctcgatggggatggcattgaatctataaattaccttgggcagtatggccattttcacgatattgattcttcctacccatgagcatggaatgttcttccatttgtttgtatcttcttttatttccttgagcagtggtttgtagttctccttgaagaggatggactcacattttcacatggctagggaggcctcacaatcgtggtggaagatgaaggaaaagcaaagggacatcttacatgatggcaggcaaagagagtgtgtgcaggggaactaccctttataaaaccatcagatcccatgatacttattcactatcacgagaagaacacaggaaatacctgcccccatgattcaattacctcccaccaggtccctcccaaaacacatagggactattacaattcaaggtgagagccaaaccatatcactgtggaactgtctttcattgtgagggtctgtaaaactgtccaggtggctcatctctacatatgtgtatagaattagagccaaatgtctggcacagaccaaaggccaatctaaaatcatttctgctatctaaaagggagcactgcttcttaatttttctctttccattttaaaggttataatggtagatatgcccatgatggaattagcagaacatgttttaygtgtggggagtgagaagggcagggagatgatgtactctaacttctgtgctgtaaaacatgtggatttgcctttccagtagtaaaccttgaaagtattctttacttctactttttaataaaactttttgctctctaccttgagtaccagcactgagtcttttacttcattggtagtccctcagtgtaggaacacatgtagatggagacactcaaaaattcaagttgtgttaaaagttcagagtaaatatctgaatacatttttcattttatttgaacccatttcacacactttgcccaacattcttctcagtgaaaatccttttagtatttcccaaagatccagaaagactggaaagaatgtgcatgtttagattaaaagataaatattacactgaaagcagcacagtaaatatgaaaacaagtggatccattcctattcagtacaaaagtgaggagcagctgggtgctaagtgtacctagatctgcagtccagacattgtttctgagaccacttccaaagaaacttacagaggagggctgcccatgtggcatgggcaagggggcggggtctaaaggaaccagattaacagcagaaacgaaacaaggttcttgctcctttgtacaaagaacaagsttctttctttgtattagtaagacactggacaatgatcctgcaagataaggaaggagaagaggggaagactaaaagattccagaaagtataatttccaaagtaacaccggctttttaaaagaacaatggagttcagaaaggaaaaagaagacgggagctagataatgccagaggtggcacagagaatgaggggaaacgtagaaggaggaggaggaatctggatggcactagaaagacatgttctgtattgtgtgtcttaacttcttagaggtgagctgctcctattcctgacagctcaccaaggtcaaggtcgacagttgctatacgtcttcagtcttccccacactaaccatgttgaataactttgtcccttcattggaaaccaagctttaattaagggccagccaagatatgtgcatacacaggtgaactgtttatttataacggtgatatgacttctaattatattaatgtgttttaaaggcttcgtgggccatcttaaaaactgtcaagttctttctgcagttcttgctttttggcaattgccctacaaagctgaaaagttagttagaggcacacttttcagtaagccttcaattctgagctcctttgcagatagaatccttttttttttttttttttttttttttttttttttttgacaagagttttgcccttgttgcccaggctggagtgcaatggcgtgatcttggctcactgcaacctccgcctcctgggttcaatcgattctcctgccacagcctcccaaatagctgggattacaggcacctgccaccacacccagctaatttttgtatttttagtagagacggggttttgccatgttggccaggctggtctcaaactccaracttcaggtgatccacctgcctcggcctcccaaagtgctgggattacaggcgtgagccaccgcgcttggccgactccatcttttttatgtttgkggttctggtttgtattcttttttgttaatcttatgaaaaattaatagccttctatttccctaagcccctcccctttggccctatcattaggcatacttctctttaattcattatcatggttaaaagatgagctctggagcccaatggccctgtatctttactaaagtctttggacctcggttttctcatttgtaagatggaaataaccaaagaaactgcattgtggtgcgattgtgaaggttaaatcagttaatccacacaaagaactagcacactgctggtacataataagctaagtgatgtacatgctaatggttattatcccacactattctcatttctactgattacccagaaatattaagttgcctttttatcttatccttgaagatcaggaagcactaactcaattcacattccctcatccatggttcattactctgagtgataaatagtggaaagaaaagtcatagaacagacttttggcttaattatatttgcaattcccatggtaaatcttgaaagtatccttctattttttaatcaaactctcacccattatacatcaaagtatacaatgaaagcctaatacctctaatcatacaattaccaaaatgttctgaatggtttagggtggagatgcagagtttaaaatttggttgtgtcaaattacatgcaaaagtaattttgtacacacaatgttgaatttgccagtatttggttgtcaactaaatccttagttaaaaggagaagtttgtgttctgatttttgagttgtcaattattcatggtatgaatggccacttaagtcaaaaacccatgtcatcacaaagcttttacttgaatctagattctagatcaccattttgttgggatgatatctgctcacagttttttgtttgagacggagtcttgttctgtcacccaggctggagtgcagtggtgccatctcagctcacggcgacctccacctcccaggttcaagcaattctcctgcctcagcctcccaagtagctggggtcacaggcgtgcaccacctcgcctgactaatttttttatttttagtagagacggggtttcaccatgttttccaggctggtctcgaactcctgacctcaggtaatccttctgcctcgacctttaaaagtgctgggattacaggcatgaggcactgcgccygcctctgctcacaatttaataatgcaaaaagacaatctataacacattgccattagaattccaaccactgctttttaggaatcaagactgatcactcttgacaagtggcagatctttccaaagcaccagataggggggaactcaaaaatcaggggttttgtaaagagatcaacatacagtaatagtttatctcctaatgaaattggcaggggtcaaggtcttccagttatgttcaagaaaaaccattagatatcctcatgagatttcagagtttggataatcttcaattggaaataaaggacaccctgaaaacatgtaacatctgctcacccacaaatgtccaaaggaggctgaaaatattcagaattcccagcatgctcactggacaaaaactatgtccccatcccacctccagtgtctatttcctgggaattcagtagcaaagcagaaacaataaccaaagggaattaagaaaaaagaatacctggttaattacttttaaggtaataagactagtaagaattatctgagttttggatgtactattcattagcagccctagtttatgatattccaatgttttaagcaatggtagattcaggaggcttataaacctcatcttttatcaacacacatgttaactggtatccttctgtgctgtcaaacatgtggatttggggaaaatgtaagagaggggatgaggaagagagattttaatgggtggtattttacagaattcagggggaaaaatagtataccatgtccatttactagaactaaatgactactagaaccaaagtcatttactttaaataactactcaaccattgaggacactgatttggggggaaaaaagtgatttatataacgaatagtttaatagaaagtaagccttttaggttctgctatggaaatagcagaaataggattagagagtcagcaacttaaatacacataatccatgattatgtcttttyagatgcatgaattatgaatgagtcagtctgaacagttgtttggcatgaagtgtgttgacaggtcaagttgacctgtgctttgggccaggggtggtctaactaacagcaactttacagtttaggagttaacccatttatgccagagattgcaatttatttttgtaaaaaatcagaccttggtgatgaccttgagcaataggatataaataactcccacaaggttagtcttccaataatggaacactaggcataaatgggttgagtgacttgtttctgaggcagagaaaagatggaagaatgaatgcagacttcatctctgaccccaattgcttaataattcctcaatgcaattatacaaaattaatcaaatccctggatggagaatcaaaaggcaatcttcctacttgctatgccgatgtaaactttccttctctgtgcaccacagccagacaaactggatgctgtggagatctgagctgtggtggaaccctgccaggaaggcacagtcgcttgaaacagagcccgcatttgatttaagctcagaatgacaactttggcaaggaggggtggtggctttgctgcagttgagcgggaaaagcctagatgctaggcataaatttataagttttaattatgcaaactccaagaacgtagtagctgcttgaatactatcccaaagtctactcgattaatctccccaaaatcatgctgctcagttttcatgactacttcacattcaaaattttaactcttacctcctcacagttgaaataaatggattgcttccataagtaaaaggctaatcatcctacaccttaattaagaaaatagtgaaggtggtggttggaacattgaacatcactttataggaagtatttgccataaattaatcattcctgatccacctgaactctgccaagcttggagagggataggaagacataccaattacagcccttccctttgagaattttcaacccagtttggaattgaggaaccaggcatgaagaactaastaaaattcaaacccatgtattctaatgtggaatgttaatcttgaaaaattggaagacacatatatcagaatgaaaatggataattattttaaatctagtttataaaaatgaatagctaatatatccctccttcttctttagctaatcattattttgcagagcatttttcctgaataaggatgatttctaaatctaggtcataatcccagaccttcaccctgttcctgaccttatggggaaagggagtgattcttttggctcccatttgatttgttattttttcctctccttgtactttctcttccagttgtctcctctgccctttcttcttttctgcccactttaaggaaacattatattaaaattcaaatgtataaacagtagtatgcatgagaagtatgtaagtaagaacctaaaatcattttattagctgagtaaaaatgccataaatcagagaaaaggtgtaaattacaagaaaatctaaattgtggtaatataaacaatagttattataataactttcatgagacagcaatttaggatgtacaaaaatcatttatttagattagctccttaattcttataacaaccctgtgaggtagacacagaattagtactccactttacaaatgggaaattgaggctcaagtcacataaatgacttgtcccagatcacatagctagtaaaaacctaaataagaaggctttgtacagtatctgccactgtctgtgctgagtaaattcaaggttatatcactatgtgaccaagctgagattctaatcctctcctcctgattctaagcctagagttcttttcacttcatttgcttcatttgatatattccacttctttttaaaaaagaagtccttggagttgtattggctgctctctcagtgaaggcatcagtaggagaattgtcatactattttctggaacattgtgccatgcatagtgactgttgtgtaatagatgctcaataattatttactgaatgcatgaaggtaaatgaataaggcaaatactatgaagttggctggcaccctcttttatgttactttaaaataaattgttattatctagtagcacagcaaacagttttattttcaaatgaatcaatattagtgtcaatggcattgtttgcaggcgtcagagatcataaaaagttctgcatgtgtgtgtgtttctgtgtgtatgtgtttgaattctttctcctctcatctggctgatatattgtcttcacttgtccaattcttaacaaaatattcacaccgttacatttagttgactagatacatagtttggaattcttattgatgaattaaacactttctttaaaattaaatatagatttgaatactcacaaagaaaagaatcaaagaaatttggcacagttcaaggagatttgttgtgggtgaagaggtcaaaggacaagtctggatcaggaattcttgggcaattaacttttaatgattcctcttcctctctcccacccccatataagaaataagggcagtattgcctgccaaacatgaaattcagatgtaaaaattgggacaacaatacctctcactgccttcagctacttagtaccctgcagaggtcatatgtgtccaaactcaaccactcatagagtagaagccatcaaacccattcgtcaagtactaaataagcattgaatcaatgctgggcatagtaccatgttgggtagggcagtgacagttcgaagtgaggggatagagggattacaaagactaagatagtgcaagtggagattgagaatgcaactctatacccagtgctgaatcttgatstggctcttgctacatatgtgatttttggcaaactaacctctcagacctcagtcctctcatttttaagttagtacaattcctggtacattgccagaactcaaacatgggatattagcattactgtgccagtccttatggagcgtgcgatctagggataagacagaaattgaaacagtaaaatagcatgtgatgcttactgtgatagagccgagcaaagctctgtgggatcgccaatgcatggaggcctaaccacctctaagggtatactggagtggttgtgaactaaaccatgttctaaagctttgcaggcaatcctcacgccatcctcataaggtaaatacagtactattatccttttttaaaaattttttccacctttattgagatataattgacaaataaaaattgtatatgtttaaagtagacaacatgatgttttaatatatgtatacattatgaaataattaccacaatgaagctaattaatatatccatcacctcacatagttacctttttgtgtttgtgtggtggtgggtggtggtaggaatatttaagatctaagctcttagagaattccaagtatagaatacattttttaaatttattgttatttcaatagttttgggagtacaggtgacataatgcattattattaactatagccaccatgctgtacattcagtctccagaatatattcatcttacagctgaaagtttgtacccttttatcttacttgtggatagggaaaaagaagcatcaaaatgtcaggacagatgtcaggatcactgaggtaccaagtaaacaagatggaagaagatcattacaggcacgagaagagcagctctagggtcctgaaagatcccttcctctcaccacctcatcctttccagctccaatgcccagttcgcctgtgacctgacctaaaagaccaaattgctctctggagtgaatctggagtagtttccaaggccccagattgaactgaaggctgagattgctctaggcatgcactagaatctagcagttgattctagcccatctcagattcttgtggagcagagtagacaggaagaggaagcaaggagagcagagactgttaacactgacccatgtttagattttctgctgtcattctagattctcaagatattagtatgggtttgaatcttcaaaactgagacagattgagagacaacaataaatagtgatgagaacctttaattgaatatttgctagtataactttgatcaggcttttctgtaaaattagactagtattagcgaccctgcctacaaaaaacaaggttctaaaatagcaatatgtgaatctgagtctcaagtaaatatgggtaaatattatcgcaaggcttgcaaaattgtaggcagtgacctggaagagcatgtggagttactttaatgaacagcatctgattaaccagacccatggagactctggctcagtggctgataaagcccttagatacataccattttaaaaccacaatgggatatcttgaggttaaaagtaaaccacaaatatctcacaaaaatcaaaggaactatgtatactcattaatatttttcccatccgtatccttctgaccatttcttccaccaccttggtaagtcaggacctcctcattttgcacctagactactgcagtagtcccctacctgtgttccctgctttcagcatggcttaaagatgaacccatcttaatacaagttactctttccaaggcacagctctgcttatgctattctctgggaaatcttcccgtggctcccagctaacttagcatccagggcaggccataaggcagccccgcccctactttccacttctccgcctcactttccctgcacaccaacaaaaccgcacagttcgtgtttctcatattcactgttacttctgcctctgaacgtttactcaaaattgtcctccctagacattcaaaacctcatatccaaccctctcatttccaaattcccttatccttcaagaatcagccctaccccgtcacccatagcaccttctagcttatgctatagttatttttcaatattccatatcttcctggctaacataataaattcccctccaacacccatttgtccagtccaaggtagcttctcattaaagttttttttttactacataattaataatgttgactgaaaaatataattctttttaatgcaatgtgtggagtatcatctggctttggattttattaacatgtgataaaactatgaaaatattcacaacttcttaattgaacagctttttactctgggatttgttttagcgtgcaatggaagactattagtatttaaaatttctctgagagtgcagctgtattaacattacagctataaaggaaaagcacaaacaggccaaacaaatgctttgagagaagaaaaacaagccaaattacttacgattattttctctctgtgcacaaggagccaaaaattaccaaacagtaggcaaaaataaaaacttcagttttttaatctcwtaaatgcaaaagctacccacctgcttctctgttggtggcaagttcattgaatgccaggctaggaacaagctgctcaaaagaaggaatccgtaggagaccacttaggctgttacccagtgttctcaaatgtggggccttcatggagacagttcctctccttaaagcttgagtgtctcaggttcactctcattcgtccccttgcctggttctgacccctctctcagctgtctctttttgttttctccaccttcatcttcggaaccttcaccaagaactttacaacagaggtaagacaatcagctccatccatttcccttccttctgaaagcaagtcaattcccgtggcccataaagcatggttttcgttgtctttagcttaattgtcactctttctggagggcctttcctgatgtcccgattaggaagttaggcacctacccttcattctccttcatgacattcataattatgtttcatttctgccttcctctcaaaacactgtaagccccccaagagcagaaacagtatttgttactgctctatgcctggcacttgatagagatgctcaataaatattcattgtgaatgaatgaataaacaaatgcaagtaacagagtccaacaatttgtaggtttacgagggtggcatttgtctatgtgtgcaaatgcatttatatctaatcattgccagagcacaatttcatatatgcctaaaagtcaaggaagagacatctacttgaacctctctgggactagcaggacttgacagcagctacctggaaacaaaatactacagctcgtatttctcagtttgcttgtagggttttctcagtttgctttgaagatgccataaaattatgttattaaccatttctcctatacaattatttacaaatcagcttatcaaattagacgtttgcttcacaaaaccacctttgaggctaaatcacagggctagaataatataaaaaaactgaaattgtcatcttttttcctcatctgagaagtcatactaatgattatgagtgtcttgctaatttaaaaagagactttgggcttgatttggctatttcataaacttctattgtagttaatggtatactctgtagccagggagtgagaaggcatcacaaagcatctaattgaatcccagggtgccaggaatattgctgctttaacttcaatttcagaagcattgtaggattctgcttaaaatcggctcaccccttccatataccctgaagccatacatgttgctttccaaaaaaaccaaaccaaacccaacagcaaacaagaaattcagggtatacaaccgtatatcaattaatattaaattatagagttcagtgtctcagattctattacatggtgatcatgtaacgttttcatctaaatagtttagtttattctggatttttcaaagtctgattaggcataaatttcagaaagatcagatttctagaatagcagctattatggaacagttaatatttcagattttaaccactaagatatgctctttattttttatcagttcttagtaacaatgtgaaaatagtatttccccctgtgatcttcagagttctaactggtggtttacaacaaggtcaccaattttacacaccactgccaatggcttcctcaaagttcacaatccagtgatttccataaaggctttttttgtttgtttgttttaagttttatccaggcatgtctatatgtggctctttccttatttttagccagtctgacttaatagcagttcagaaggaaagactcttctacctgygaggcaatacagcaattcctgtttccattgcacaacagcacaaaggccttgcccataatattatacttaatgctgggaaatgtgactgactcccccaggatgactcaataacccttagagcagatgtgcaccttggattccatgtttgctgtttgggtttggtttggtccttttagaaggcaagatgcatggtctcagagtagataggagaggtgggatgactccgaaccaaatactgaacagaaatgaaacgttattgatgctcctttacaaagccatcattttcttattatagcacccacaaatatgagagattcaaagcccttagagaacatgaatgtggcactttggatctttgaataagttaatgaaataggcatagcctgggcaactgcaaaagaatagatgttcagccctttcgctatgcaggtgcaaaccagttatgaaaacagatatttaaagtttttactaaaaatcctttttaggatttttaaaaaaccttcaggtatgcaatatatcctgttacacaaagtctcatgataaatactctttaaaaagaaaaaaagttgaatatcacttagcaaccgaagaacaaaagcagaagaaatggagagacagagcacaaagctgaagctagggaaatatgaatactggttacatccttatcaatgactccctgagtattcctttggataaccataacctttttttttttttttttgaaatgaggcctcactgtgtcacccaggctggagcacagtggcacaatagatggtagctcactgcagcctagaactcctggccgcaagtgatcctcccatctcagcctcccaagtagatggaaccacaggtgtatgcgaccacacccagctaatttaatattttttatagagatagggtcttgctatgttgcccaggtctcaaattccttacttcaagcaatcctcccacctcagcttcccaaaatgctggaattacaggtgtgagccattgcacccaacacaacaaccatgttttttctctgtaggaattcctccacacattgggaatgtatctttctccttcattcacagaaatgttctagataataagatgaggcatgcatgtaaaattttcagcttaaagcatcttcaaatgaacaatttacccatttttctccaaaccaaataatcccaattctaagtgagactttattgaatttatttctgtttctcagccctaatcatctgcctttgctgatttccattgcccactttcaaatccctactagactttatgaagacctgtatacccaaagcccagtgtaaatatttttaattgaaatgaaggcatgaaatgtgttagaatttaacataaaacctaaaactacataggacattctaattaagacttgactagcaatatctagggacttctatgccggaagcataactagaattaaagtgtttgacttcttctttttaacttttttggtttgctttggttttgtattctatttcaactattctaagtgtgatttttgaccagcatttaatgttgatatagatgtggcttcacatctaagcaaggaaggtgtttttcaagtgctggaagtgagctgccagtatttcccacacatcaggccttgttttttcaacaccttgtggatcgctaattggagtttgcataatctaccgccaaattgcaagcattcctttgagatgagtggaacacacacttcccttccagaatcaatgaaaagagaaggtcaggaagaggaaaagcagcaaacaatgatctaattaatttagaagaaactgaatttctggttcttgatttccttcagaagaaaaaaatgaaatgccacctgaaaggaatgtttgtgattcatgttttaatcccccaaacagttcaattgttagctgctgtcgacgaaaaagagttaagactctgtaaaatatttgaagagagttagtccgagccaaatatgagtgaccaacggcccgtgacacaggcccaggagggcctgagaacatgtgcccaaggtggtcaggctacagcttggttttgagcattttaacataagacatccaacagtacatgaaagatgtacattggttctgtccggaaaggcaagacaactaggagagttggggctgggagtgggggcggcgtgccaggtcattagtggattcaaagattttctgataggcaattggttgaaaaatctaaagacctggaatcaatagaagggagtgcctgggttaagagaaggggttgtggagaccaagattcctttttttttttttttttttttttgagacggagtctcgctctgtgtcccaggctggagtgcagtggcgcgatctcggctgactgcaagctccgcctcccgggttcacaccattctcctgcctcagcctcaagagtagctgggactacaggcgcccgccaccacgcccggctaatttttttgtgtttttagtagagacggggtttcactgtgttagccrgaatggtctcaatctcttgaccttgtgatccacccgcctcggcctcccaaagtgctgggattacaggcgtgagccaccgtgcccggccttcaagattcttattacacagatgaagcctctgggtagcaggcttcagagagaatcgattgtaaatgtttcttaatcacactttaaaaggtgccagactctttagttgattctctcctggatcagaaaaaatacatagaatgggtcaaatatatgtcaaagcaatctgttttggggtaaaatacttcgatttctttcagggcctgctatctcatgttagtatcttattgcgacaaagcatctgttttgtcagtcttaaggtctctgttttaatgtcagtgctggtcacctgtgcctgaattcctaagggaggaaggtataatgaggcatgtccaaccaccccttcccctcatagcctgaactagtgtttcaggtttacgttagaatgcccttggcccagaggagggatcaattcagttggttggggggcttagaattttatttagggtttacactgcccatagcaaaggagaaagaaataattttgaaataactttaaaatgtgcttttgctttaaaggctgaggagctggaagcagtaagcaagcggggacaaatcatgaggagaaaacactctcagcatgcagtgaatcatctttaaaccattcacaagcacgtgcataagtaaatatgtacatgtgaggctacactgatcaaatccatggaggaattagaaaataatcagtagtgaatgcatcctccatcaacaagtcctaatggtttccccttcaattcagtccttgaaattgtacagttcaaaactgtctcagaaaagcaaggctaatattctttaaaaagcatttgattatataaatgtgcagagtttttaaggcattcaagaatacagttattgcctattttaaatttttgaaattaatatctagccaattaaaacaaactaggtcttttaaatgagtcattttcagcttttttaaacacttagttctataatatacagttataaagtgtgaaaaattatcttcaatttttgtttgttttaaattactgttaaaatcacaatatcttcatcagaaaatagagcagagatgaattgccttggtaaaaatatcacaaaaattaatgttaaaaaattcagaatggtaaatgaagtgcttaaagaatcagtttaaaagatggcaaatctctttttctgtctattgatcaatgaaactatctctaatccgagtcatcattaaagtgttatgcaaacagaaatctgaattcaaatgagcacaaaagaccccaaaactttaagtatattaaactgataaatatcaaaaaattagaaattcccccaagagtcaactctttctcagcatacatattaagttgcagggaactgatcagttgaatagctcaactcaactatattcaactgtattcagctgcactgtatcttaaagtatgaaagcctatataaaaaaaaaaaaacagaagatttaaaatgaattttaagaaacagctacttaaactcaaaaccagttgataaacataccttttgatgcaacaacaggaacagtgtaattaaaagtggattaagtccttgaattccaattgaacaggagaggaaatccaatatatttgaattcttttgggttagaatctgtcaatgatattaaggcaaattatttataatttcacaatgatatccagttagaatatttattaatctttataaatacccatccaatttgctttcaggcctatatttttcacattttatatgactataatatgtcattctcaaataatattagcataatcaagtctcatgaataacaatattgttgaaaaaatattaagtgttctctaatctgcttttttattttaaaaggttagttaatggcattgatccagatagaatagcattttagtccttctttcatgatttaattcatttaatttaaaaaacattgaaaattttttaatacgttaagatactagaaaacacactctcatttagaatggcattctttaaatgtattgttaataatttgcaacatattgacttttttattatgaccaaactaaaataccataatagattgattttcttacgtgataataacagcaaagatttgaatcaaaaaaatctaaagtcagtataaaacaaactacttgggcttacgtaggaaccaaacccaaactcttgyccaaatgaacaattgaaattcctgttgaggttttgaaaaatctccaccaccccatcaagtgccctacttttcatgcagctcaacacttccaaacagagccagcatgaggagccctgagatccctgtggtcggccctttcccaagtattccaaacccacgcctggaccaagaagctccaggaatctcatcakaagccttgactccaggaggtttcgagttagatttccaaaccagagaggtttggaaaagagcatgttgaaccttcgacccactcttgacttgcccatctgtatttcagttacaggcactcacctaagagtactgacttctctcatgacagctgcatagttaatgtgccatttccactgtaagaaacttggctggggccagtcaagatggttcagtttaacaacctaataaatatattgaaaataaccagtgaaaacaaaattacagagactgccttgtagctcagctgccatcgtctctgtagccaacctcagccttcacctcagcattgcacaaagttcagaatcactaacatatcagaaaggttggacaagaggaaaagtaaactggaaacacacacacacgtgtgtatacataagtttaattctgaagtattgagaattttattttcaaagtgctagaaaggcaacagagagatagttcatttcacaattacagaaacaccaagaaattataaacttctctggatgtcagttttcttactggaaaaattatgttaaaattatatcactctagccaagtgtagtggtgcatgcctgtagtcccagctactagggaggctaaggtgggaggatcgcttgaggccaaaagttcgaggcttcactgagctatgatcacaccactgcactccagcctgggcaactgagcaagattccactcaataaattaataaatgagtgcagcattctaatgttttaaggattaaatgacatgatcatataacaatgcctaacaaggtacacagtgcagtaacaagtaaatgtattttagcttttttccttggtttccattaacatttttttccttcagttagtcattctaaaaatatttattaagcatctattatgttttaagaattaaatgaggtgaccctacaacagtgccttaaaaggtacacagcacaaaaactaaatatattttagcttcttccctcagtcccctttaacatttttttcattcagtcagtcattctacaaatatttattgagcatttattatgtagcaggcatcataatttgtcttgaatatataatggcaaatacaataaacacagttcctgcccttaatggggaaaacagaaaataaataggcggggaggcgaggagagagaaagacaaatcgaaattgtcctaagttctgtgaaggacctaaacagggtacagggagaggaaatggtgggagaggggcacctggttagatagctcatggcatagctgatactttaattttgttttttaagtagagatgagttcttgctgtgttgcccaggctgctcttgaactcctgggctcaagcgatcctcctgccctggcctactaaagtgctgggattctgggtgtaagccaccttgcccagccctgtttatttttctattgatcttaagaaagaaaaagatgtcttctaataactattttaccttaatcagttttaagacaagctttgcagagctccatgaccctctgaagagaccgtggccaccttgwaggttagagtatttcggacagatggctgtactactgagagcttttctggacrtggccgttctggctaactttcatcttgtcattacatttccttttctgagaaaggttgcaagggtggttttgacagagtgatgctgttggtatttagaatcctgactttcttgatccttttcggtggagctgcgggacacatgtgcgatggaaactggcctggttgccatggtggatagtgttctgacaacagtcacatgggtcaggtgtccgttttggatctttcaggcctgtcagcagctcctgataaagctagccatgtggtttttcttggctcacctgtatatcctggtaggaacagctaagagccactcaacgcacccttctctttttggagaaaccccagggagttgtgttgcttggggctgggccgcttggagaccatgttctttgtctttttggcctgctctcggggctaaggagcattgatggaatatctgagatggtggcgtcggcagggatggccatgctgaagtctgttcatatcacacaactagggccacaagcaaagtcctccatctgaatgacattcagggacagtccataaactcaacgtgtgcacagagtgcctccgtacgccatgcattgtgacaggtcctggggtaacagatctgaaagactccttctttgtgtgtaaagaacatgattgggttaattaagtaaaagtgaatattttctttactgagtcataaaattacgggcatatgtcttaatcagctaaggctgtcataacacagcaccataaactcaatggcttaaacaacagaaactgattttctcacagtcttacaggctgaaagtccaggatcaaggcatctgtggagttggtttcttctgaggcctctcccctcggcttgtagatgtcacttctatggtcttccctctgggcctgtgtcctaattttctcttcatacaagkgcactagtcataatggattagggcctactccagtggcctcatctaacttaactgccttttaaaagaccccatctccatataggtcacattctgaggtgcttgggttaggattttaacatacgaatttggcaggggacacactstagcccataacagcatttttacagccacayatagtaaaaatctggaaatacaccaccacatgtatcagagtataagtggcaaaggttgatcatgatacgtatctctcagttgagaatttcagcgtgatttctaaaaacttgttgtgaaagtacaatgcgcagaaaactgaaatttcaccaaaagtcccatatctgaagcaaataaaaaaatttagttcccatattctttccaatagaaataattccttcgtggagaatttatgcctatctcgttcctatgacaaaaaggaatttggccagcctggccaacatggtgaaaccctgtctgtactaaaaatacaaaaaaatgaactgggcacggtggcacacacctgtaatcccagctacttgggtaaaagaattacctgaggtaaaagaatcatttgaacccaggaggtggatgttgcagtgagccaagatcgcaccactgcactctatcctgggtgacagagagaccttgtctcaaaaaaaaaaaaaggcgggggggatttggggtttttttgttgtttaagggttttttaatttttaatttttgtgggcacatagtaagggtatatatttatgggtacatgagatattttgatacaggcatacaatgcatcataatcgcatcaaggtaaatgggatatctatcacatcaagcatttatttctttctttgtgttacaagcaatccaattatactttttaagttatttttaaatgtgtgataaattttgttgactgaagtcaccctattgtgctatcaaatactagatcttattcactctatctaattatatttttgtaccaattaaccattccyccttcccactacacttcccagcatttggtaaccatcattctactccctatctccatgagctcaattgcttcatttttagcactgacaaataggtgagaatatataaagttgatctttctgtgcctagcttacttcatttaatctaacgacctccgagtgaatccatattgttgcaaatgactggatctcattcttttttatggctgaatagtactccattgtgtatgtgtcccacattttctttatccattcatctgctggtgaactcttaagttgcttccgtatcttggctgttgtgaatagtgctgctgtgcacatgggagtgcagggagcttttcaatatactgatttcttttcttctgaatatatacctagaagtgaaatttctgcatcatatggtacaaaaaataatttaagggaatctggatttcttttctctatgcaagatcattcaattgtttcctctagtaaggaaaaacttctgaaacaaattcacaaaattaatcaagatttttgttaatgaataaagtgttctcaagccaccgtctcagtctgtctttctgggtgctttacctactgtcttctcttgggtgctttccttctgacatagcaagagcatatttcagacaattgtagactcaaatatttcaaagcattaaaggaaaaaggggcatctgaaaattatcttgatgttctctgacagctctaatactatataaattattactaatgtactaagatttcaaagtgctaggcaaagcgtccccaacccactgcagattctcacaaaaaggaaaacatgctgaactgtattccttggagctgttgatgacttctctttgtacgtaatgaatgagatgttgtagaaatagcacaatcgctggaacacactcaggaatatgatgctcctcagtctcccacacttgataccaaggatcctagctgtcccattgtctacctcagctgtagggggtttgtgtgctctaatttgccctggcactgctttatcatttaaaaacttagttctgggtgaagtgtggttgcatattgcaattcagagtgccttcaatgcatactgtttcatggccatctcttctcccttgtttccccttcccttttattctttccttcttcttggagtccctcttatttgagtgatccctgaraagggtactcactgctaagaagaacgacctgggttacataacaagtccttacagaacaatgcctcaagaggaggtacggctagtcaaggcacagaaagcaaaatctagccctaacgacattactcctttacctaggatcttgattatgtatctcattttctgtgacttgacttctacatctttgcagggatgacatgttttgtctccattttttatacggcagataaatgtggtaggttgaatatacctgcttaccccaaagcctttgatagaataacagtaaaaaatgaatgaactcacaagaataaagagtggaaaaggaaacgtcaatcagccagaggtacaatgggaggatggaaagtggatagatgtatagtgactgagttatatttacttcttggtaccactaagtgcctgcagaagagagaagcctaaccaaaataaactgatgcagccgggcatggtggctcatgcctgtaatcccagcactttgggaggccaatgcaggtggatcacttgagaggtcaggagttcgagaccagcctggccaacttggtgaaaccccgtctctactaaaaatacaaaaattagccaagcatcatggcagttgtctgtaatcccagctacttgggaggctgaggcaggagaattgcttgaacccaggaggcggaggttgcagtgagccaagattgcgccattacactctaggctgggcaacagagcaaaactctgtctcaaaaaaataaaaataagctaatgtgtgcccccaaaacttagaaagcctcaggaattgaaggcagcaaggaaatgtaaagacaggaaacaagagaactgggagaatgctcaaaataaaagaattggttcgaagtctttatgagttgcagttagacgcccagatctcttcccccaccccacacatccaatcagatagtccctttcaccctggcagaagactaagatgtattctctgaggaggctgagtcagggagcttctgaacttaataatgcactccataatgttgaaagtatgctattctggacaatggcaatgggaacacctggggaaggaatgatgcactattctaaggtcatgggaatgaaggcaaagatgtgtactaaacgacagcacctaaagcctttctccatggaaagtggtcacccagggaaaaaaactaaggttattgacatttgttcaggggtccctgaacaaaatgtctctctcgacccctgacaataagtgaaggtaagaatacaccatatgcgggtatgcaagatgtcaatttctttcttcttatgtaccctgtgccagggagcctggaggatgtgttccaccaaaatcaggatataaacagagaagtgggaggtgggggtgggaagagagggagggataggaagagagagcatctagcacaggagagaagaaaagagaaggaccaggaggacaatgacaaatagctataggaagtagacctataagcagaatagtcctgagaagaaaaatctccgatccactgtgcttgacaatattattgtattttaccattatttcaaacacacagaagagtgagcaagctaaaaacataaagatgtgtggtttttttcaataaataaagaaaatgtaaacatagtatccaaggtggcttagctgtgaattatgaagactataataatgaatgtgatttaaccctaaattggaatgattgggaagttgtgggtgtagggaaaggtggtgaaaaaagggaaatgttttggatcattgtaagccttagagtgttagttggctttttaaactatgtacagtattacttagataaaaactaaaattaaatttcaaatataaggttaattaacccatgtgaagcacatacttcagcatgtattttaaaatgcaaaggtattcttaatgaatattaatcttaaaggcttcaaggtcttccaaaaggcagaattttacaaatgtaaatttttaaaattattatggtattgtataatattcctgcactaatatgtgttaaaagggttctatcaaccctggattttaatttttcaaatgtatgacatagtttcttttgttgtttatggaaaagctgagcaacttggtaacgaatgtgaatatgtttggaagcccaatccagctcatgtagatgcatatttgtttccatgatcatttgaaattctatggagtcaccactgctgattcaaacctggccaggcttcctgattctaatctcatcccagggtgaattgaggttagctgctggagggaatgttcagttcagttgaatgtaaatctagcgccaagccacatgtgagctgagtgtgccaggatgccaagtgataaatcgaggaaagaaagatcacatgaggctgacatcttagcactgacacatggccctcttctgcagaaatactgggcaaagagttgtgagtcagctacaaggaagatagggctttccactgaaaaaggcagtgttcaaaggactcattcgtcaggaaaaagaattcccatgtcaatgagagctgaatgtgagctacactcatctttggataggtatttgatgaatactcgtattcttggagtgactttccaacatttaactaagaccattcagccttcacaacccatttgacttaaagggcaaaagtgcctatctgacaattttgatgatcagacattgccttcttccccttctactcctgctagatccattctagtctctgtctagttaattcctttaaaaacctccatgttaaagtagacttcaatatctagcatactagttccagaaaaatgataccaaaaaggtatattagattgcacatggtggtgaaaatgtttaaaaatcctgaaaaaaaaaaggtattatgtaaaagagacaaaagagaggaaaaaagctctttggattttttgattagcagaaggtacacatctttatgtgcaaaaaacctgccgtctcctaaatatccttatttggggtggtgtaggtcataaggggtagaatttatatttagaaagtacatatacattttaaacttaataatgttgaaagatatgcactatacactcataaaatagccttataatttaaaaaaatctatatgcacttattacaagtattttaaataaaccagaaaagtctaaataaaaagtagcccaaattctgtcacccagggaaactctattttattaatatctttccagacagctctgtatggccacacatgcaattttataatgggattataaaattggggttatacccctcatactgttgtccaacctggagaattatatacagatgctcctcaatttatgatgccactgcattcccaataatccattctaagttgaaatcttcaacttacaatgggtttatctgggtgtaagcccattgtaaattgaggagtgtattgaatatatatcactttcacatcatcataaagtcaaaaaactgtaaatcaaaccttcctaagtcagtgaccccctgtacccttaaacaatgagataaacttccatcaagcatggcagtactctggctttgttctccgtttgaaaaaccgtcactttataggcttaatatatctattttacacattaagactgtaccttcaaactgtgttgttccatacagtagccctagtcatgtgtggctaaacttgaattaacaaaaattgaataaaatttaaaattcagttcctgaggtgcactaataacatttcaatggctccagagtaacatatggctggtggctactgtattagacaatacagaatggtttcatcatcacagaaagttctgctggacagtgctgagttggaaccaggtgttctttacacacagaccacttaaagactgaggttttatttatacacctgagttttccaagcacttttatctttgactgtggccaacattctatagggctaaatcccaactttagcagccggaagtcgcaactgaagagaccagccatttggattaggaagacaaaaaaaaaaaaaaaaaaaagactttcccactgtttccagtgacttctcaaagggtatggcttccagctattctggtgaccagaatgacactccccttaaccctgagcttccttgggacatgacagctcttgctcactgagaatgagtgtgagagtttgagggtggatcctcctttgtagattgggacccatcctacgtcagcctgggaaaatcactccaaatatcagaaaataaataaaacaaggacaattaaagagcaacaaggtctgggaactggatccaaaccaaccacccacctgcagttcctctagatcttacgctatcacgaggagaggggaaaaaataaatgaagaaaaaaacctccatgtgtccagtgttaagctctcaagctgagcaaataaataaccctctcccccttttgggttccctgtgtctctagagaacaggatgcaaaattaaattccaagctcgttccaataatttgagaagataaacttccaatttcttagaatttatgttcaatttgaataagcacctaaagttacaggctctccaaactcacacaagtcccctacccccagctttaaatccctggaggctgaaagtttggcaatgagaacaaacattctcacaatttcttattcttccttcttccacttaaactttaactttctcaacaatgcccttcagaggtttcctttcagcacgtcttcctccagtcctaggaggaatgtggaaatatgagaaaaagaaactaacagcatgagaagagattttcaatttctgtgggtccccaaaatggttcagtctgaagttcgtaggaagatgtggaatcatttctcacttgttgtaaactgtcatatctctgcttatgagccatttttgttcagtagatacccattcgacatggagatctatccactctctatcctaaggggcagactttggaagaactactggttttattttcaattcgttcatttatttgctcaataaacattaattgagcagctgctgtgtactagggacagagccaagtgctatgttgacaagcattaataagaaatggctcctgtccttaaggagctctaaggaaaaagagaagcaagatatggcgatgaatgctaggatggagagctgcatggaggaagggcacccattgcaaaaggggcgaggggaatgtggtctgggaaagcttccttcaggagaagatacttgaactgagtcttgaaacatagctctaaattagccacacagtgaaggtagatagaaatatcccagcataatgtttgtggagggacaaacaaatcaatgaggttggcacagcatagtggcaagaaataaggctggagaattggacagagtcagatgaggagaggccctttatttcaccctgaaggtgatacagtcatagaagggtttttaacatggaatgatgggagagggtcatcatttcagagagattactgcagtatgattttgggagatggactgaaagtgaacacacatgaggagagagaaacaccattgtagatgtgacaacagtgcctcggggagaaactaggggactactgaagatctagaaaggacccaatgagaggaatccaataaatattgaggcaaaattttcaagatctgatgaccaaatggataaatagagggagactacagtggcttctaagggcaattgagtgattaaaacataaactagtattttaagatttgtttgttggggggatggtggttattaacagaatatctactctggcctctgacatacacacaaacattcctaagacaggaaaaagaggacaaactttcctatgagcctcacaactgattctcattattctagaaagccttgcctctcgcattagtgttctgttttctagactttgctgactctttcaaaacaaacagataggcaaagaaatctaagatatcattcactaggtaaaataatttgaattttggcatcaacctaaatgagaccctttcagttatttagtcaacagtgtttactgggatttattctgtgctgagcactgcaaatacaagaagagatagaacccacattcaaacttcttcattagtccatattctttgtacatttatgtttttatttgtttgtttgcttacacctggttatgatcatacatttcagcagtggtcctcaaactagagcgtaaataggaataacttggagaggtggtcaaactacagcttcctgagccctgtccccaaagttcatgactcactgagtcagtcagggtagggcccatgaatttgcctttctattagtgcaatttctagtactactggtgggaggcccacactctgagaagcatttatttacggctttgagcgagagtaactttgtgaagcaatgtaaggttgtttcctgtggtcctgacgcatccgtaatgtggaattgatgtcaatgggaattacacaggccacagaggtgtcacacacaggccttaggtgctcatgaccaacctctcaccatggagctgttgcctcctgtttttcagttgcctctcccattgggcattgctgtcgctgttgctccatacgttgctgcagttacggcacttgaggaggtcaaacagtccctgttggagagactggagaaatgggagcaaacctgtctctctctaaacttctgttattttatctgaccttaagagtaagattaataatctgatcacctaatcatctggagaggacagcgagatttgccaaatattaacagacatgggaaaggctgtgatgttcagctgagggccagtcatgcagttagcctggaccacaaaaaagataaatgggtaagaacctgccttgcagttgcattgtgagtgtaatagcttgccaaatgcctcggctatgaatgagttttcttgtatgggtctcttctaggtagagcaaagtcccttctgtttacttacaacattcaggagtgtttctgatatttgcctttaggtatatgcttttcaatctcacatacaggaaaatcataccggaagttattgggtaattcaagtatcaaatgaagtgagagcaatgggagtggaaagaagatacaaatttcaaatttaaagaatgttggaaaacaaacagtaaaagacttgttttctacaacagagggcgatgtgagacgagaaaaaaatagttgaaattaactcccagatgtccacctcttttgaccaggaaaaggatggcatcaattacataaatataaagattgaagaggaattggtttaaaaggttgaattctgttttagacatccaggtgacagtgggacagccaggtaaaagtattttgaaatatttggaaatccaggactggagtctgggtgagaaaggtggcttggaggacagtgttagaaggcccctgcttagctgtcacttagaattgataactgaggcctatcagtgatgaactcactgagagagggtctgtgagagaacagtcggaagactgagggtggaaccctgatattccttccagaagggttccaaataagttcttcttggatttgatacctttgtgcattctcagttcactgtttcagttaaaatataggtggtattcctggaacatagtatggggctgcctttggagacctcctcaagtacctgagcatgtgcgcatgactacttgcatctatgcccacctgtatagaaaaaaaatggcttttctactcattttagagggtgaattggggcattttcaattctctcagaaagacgtaacagaagtgtctgaaatggcatgctaactacccttaaaatgtctgtagcttttctcttttccatattattcatgccatgtgatactgacctggggatacttcccagccacatttgaaagcctcccctgaagttgcaaacccaatggtttggaaaagatattttgaataacttaaaatatacagtgtaaacaaactggccttttagtatgaagtgtactaaattaaagaaaccagatgctttggttggcttggaacagctgaattatgattggctctccttcactaaccattttctttggggcctcctctctctgctccttcttcccctctctctctctcctcccacattgatatttttcttttttttcagaaagccataagctcatcagatacaagagacatagctccctaatatcagcaacaaatgatttctgaaattagcattgttgtaaatttaaattgtttgcctgtactcactgaaatttgcttataaagacttgatgtaagagtgagtcatccttcaattaaagttctacatgcaaaggacttttctatgtaacaattttgacttcaaaattaaatattcctctttcaactaactaccaactgggacattgtgtaaggtctataggaaatcatttcgatcatttcaatccctaactctccaaattatttatccatatgaaatcaagaagccccacaaccctctgagatagggttccaaacccaaatatcccaattcgctaaagttagataaacctccatgcaaccgagtagctttccctgacacaggatggccaaatttatgccatctctaatcaattgataccttggaaaattactagttaatgcaaactgaaatctgctttcatctgaaatatctgcagaactgtgccagaaatatatattcagcttggactctaggaatagaatctctagaaagggaaggggatgaaaggaaggaaagaaaagagtagggaagggaaattttacacagcccagtagcagtaaaaatagatcaacactattacctcaatgattaatatgccacatagttgggaaaaactttgtgtttctgtgattcaagataaacactagcagtctccgtcagaagggtcaattatggcttagctaatacaggtagttgtgaaacattttgtaagtatagtgttcttattataagtattaggtgtaaaaggcaaattgccagatgccatctcataattgttggaatcctactgtatttgaactggataagggaatcttatcttagatcaaggcatctaaaaggtacttatctttatgttctccctttaaggatacctttttattgtgctttagtaaatcaagtctcagaatggaattggttccaaataatttgcagggggttcatttcatttcaatttcaaggtggtgaaaaaaaatcactccagaaattctccatgacctcttttttttcttcaaaacacccatctcctccacctatccccttcacccctctttccctctaggtctcgactcctagccgatggctggcccctggggcatctgccacttgcaggagagctgggtggaatggagcaggcacactctgggatgaacgttccagggtttttcccatcctagtcgagcctcaccgaacttttccaaaatgtgctattgtattagatacatttaagagggtcttaaagtggtaactggctcaccagagttacaggatctttttgtcatcagcattttattgcacagtctgacttcacttcccagttctgagacaggaaaagaaaaatgggtctaccaatgtttcctgccgaatcactcaatgctcaaggcaggggaaaatatatatatatgtttttgctagaaacttcacatagaaaatgagtcaggatattctattttgtgtcttgactttgcatctttatgccaaagtgctgtcctggtattaatctgttttgaaatgtgtggggatttgtgaaaagcaaaggcaaaacttttaagcctggtagcccagtttgtcttgctattctaatgtgccggagggggctgagtgttcagagaaacagctctgtgcctggctgacttttggttgatggaatcagttaacatccacaggcagatatggaaatcttgactttcatcagtaggttgctggctatctggggatgcrgcactgaaggcaaagagtggaggcaaagtagtggaaagaaaagtcaatactgaaaagtgcaaggaatttacgaagctctcacccattgtccaggacagctccacttccaataccgggaagttattgcccccacattaatccctggctccgtggtaccgtaactgactaggccacagggagatgagagtgtgactgaggagcacaggccaacaacaaacacttcaggctcaagcagtattttacaattcattacatcttagggtcattattaagcactgagctttgtgggttctttctttggattactcatccttagaatgtttgcccatcatactcttacggttttgctttattggccaagttttacaatttctccaggctgtgcttctttcttgcataggtatttttaacctttgtccaacagatagttattctgcagtactttctaatagttcccaccaaaatgcctctttgtcaaaggagaattctttccattattctgttttctgtagttggattgcgtgtctgggtaactggagttataactcctgtgcttggcgaatattctagtactcagtgtcatcctgagcagttgataacttttcttttgcatctactcttatatcagtatccctttccagttccattgtgaagctacttgtccattcagtatctaatgcttttcttaatggcttttatttattttattttttggggtgggggggatttaaggagtggaaaataggcaagaaagaaggaagaggctccccctgtacagagacagagggaggggggctccaagctgaatgagggaacccccttgttaatggtttttaaatattcccttattctatctgctgtttttccttcactctcctactcttaagccactttggccccatactaaaacttttcaaaaagacaaacatcccaatagtggtatatgtgggaatccagtttctctttcccccatcaacacatccaaaataattttcaaaaacctcgacaccaatctgactatgagcgtgcattttctctgagggtgaattttagttacatctcctttggctaaggattaatgatgcagacattttactcagaagaaaaaacataaaatggaaaatactgttattagagacattcagcaacagcttgagaatgtcagtaagtaaagcagtgtgtgtacggtgccaagatagacggagcagctgcttcggaagaatattgagaagccagctgttattcccattggcaccagaacgtgccaatcaccacacaaactgtgggcatcgtgcgccagattctgggggagagagcgccttcacaagccaactagaaaagggcccttgttgtttttatgtgtcaaagttctatctgccgttacttgtatactattctttatctacccattcttccttcataggttggttagaatgagaaagacagtatactgaggagagaaacatctttctctttcactttacattgttataacaaataattttatggtttaattgttgattgtggcacggctgggcatcttacgtcgattaatggagcaaacatgaacacatccaagtgaatttcagagggtgactaattcaccatctgatatggaccagtccattttctaaagctctctatctgggaaccagaagttttggctaataaaaaatagtacctcaaaatacctgcacaatgacagacataagaaaaatataagaataaaaaattaaaaatatatatccctaagaaacttttttacttccaagcaaagaaagaaaaaaaaagttgttccctaaattttattatcacaaagtaagaagagcaagagacattttcccccaaaatttattctgacttggaaattaagttaataccataaaaatgtggcctagttaactttcactttggctttctataaacaggtttttgagacctaaaatcattaacctagataagcaattagaaagcagtaacttcatcctcctacttttcagtatgctaaggcatgcaaagctttctaattaaacagcatcggcttctctagaaggaaggtgaaaaagaatacacctcatatctacatattcctagtttgagaaatatatgtatatacatagtcctactttgagggcagtgttgttctcgcattctggtttaggggttgtaatgcaacgtagccatgtggcaagcagagttatgttctagttgaaattgggaacattcttgctcttagaactatctatcttggaaatttaaataaataaaataaataagcaaaaaaatatatattatccatggtttcaacaagtcaataccagtgggagaaagcctttttctctaaatcacrtaaggaagagtggacaatcagtggcaaatctgtgggaccatccatcccatcggcagtataccagtgctacaagactaaagttcaatgtcactctgagtgtttcttttaccagggacatctttaaacctagtaagtagactgcrgctaaggagcattcctgaaacattgcacaggatggagctaggagcagatggagattgatgtcatcagaactcagcacaggaaataaagatctgagttgtagcaggttataatattactataccgggggcgggcagagaaagagaagaggcagccccacaaggggggagtggagctgtgggatatcccttacggaaatattatagacaacttctgcagaacatcaacaattagttcataaatttacaaacactcattgaaggtgtgctgtaagtgatgcactaagctggatgcccctgaatccaggagaacacaggcctagaaggagaaaaagcagggacacattaaaagtcttcaaacttttgaagacagcattaccaccaatatcataaggcagaataggattagaagtcaagtggacaaaagaccatatattgtattgtttgcatttatggatatgtccagaaacgggaaatctgtggagatagaaggtagaatagcagttgcttagggcttaggactaaggacagtaggctggggggataggaaagtgacaactgaaaggtacagggttcctttttatagtgatgaaaatgctctaaaattgactgtggtgatggttgcacgtattctgggaatatagtaaaagccattgaatcgtacactttaaatgagtgaattgtgtggtatgtaaattatatctcaataaagctgtcattttaaaatgtgaggtaataaaatttggcagggggtggagggggaagccaagtaaattgaaggagcaataaatactccagaagtggatcctcttcctcaggttcccatccccagcctgtatgcctttcccccgccaaaaaaaaaaagaaacacggggaactatcagatattcttkctcacctagaaaccgcaaaacacaagaaaaactcttcagagaacttcagtacctcattttctattacatttgaagcccacttaaatgtgagacatgataaggtcccacctcagtcctaggagaactgtgagcttgtgaattattgttcagagcctcttctagacaaaagggctttagctcataacaacactaacctctggataaaaagaggagactttcaagctctgtgaggccctctcataaataacaaaaaagattggcaccaggtaggtcattccagagactacagcatttacaaagttcttctatttgaatttatttcaagcagtcaataaataaatggttccatgctattaaaaatggagaaaagagaagactacaaacaagtgcttctacctcctgcaatttggtccatttctccagctcccatctcagagaaagatgcaattgttcatttgatgaccctggtactcagcgtattttctttggggccatcttttgaatattatttttgcataaaaccaagtaaatgaatgggaaagttgaaaaacataatcagaatgttatattgacactgttgtagattttccgaatgttgaaaaacaagaaatgaatggaaatgagtttgccaaagtgaacattttatgcatctttatatagggcatattcccaagtggaaaaacatacacttggataaagtaaaatggcaaaatatttttgaaaatttcaaatttatgccagttattggtcataattaggcagaactcttgccctcaaaaacttacattttaaatattcacttctttgtgtgtgtctttttctccttccttattttctgtgtctagtgttcagagaaggcacttttagctattttgtaggagctaccatattctgccccaccacaggaatgtaatctttcctatagccatctgtctttccaaagcatctatcttagtgatacacacggtgattactagcgattgtgtaggccctctgagataccgaaagacaccaaattagattgttgtgggttttttttcagtaactcaaaaagtgctgtattagtgttagccttgaatgactcacaagcgactgttcttttttatcatcagagatacaatcagggatcatcttcttccattgggtggggtagcttgggttccttcacgtggctatgagaaaggctgaactgtggagcatcacgatctggggagaaagccatgctaaaaggtccagaaaagacccaggaggatgtcttccataaagttggtgatcagttattatcaaaggaacactacaaatgtaaagtttctcatttaggaatttagagaatttgtgcttttagttgaagggattgttgggatatgaaatggcttcccagatgctattaaaataggctttgcatcatgacctggttttttctttttcagaacttgcattgcgccttccctgtagtaaataatatgaaatgaacatacatcttattgtgctcttaatgtcatcgataaatatttttcaacagtagtacattttattatttttgttattttgctttgagtgtgagtacacattgttgtcaaagtcctttctcagctctggtttgggcaattcaagaaaagtgtgccagttaccctcttagtttgaaccaggttatatgcagagtgccttgggttttgttaaacaaccaagtctcctaggagggccaagaagttttcaccacagatgccctaacctccctgtctctgtctcccactcctctgcctcccaaattatctctcaccaaacaaaccactgtaccacctatttctttatgccaacctctaagaagttcatactctatcaatcactacatttttcatttcaaaatactctacaagtcaattcatttcacagagcctcccctaacacaccagagcaatgctaatccattcccctagccaaagtgtccaaattccaacaggacacaattcacaaatgaccaaagatgatgcatattataaatatttgctttctgccctatttgcttttgcctcatgtgtcctctctattttgtgctttgggtgagacctttaacatgtgggttcggttacaaagtgagatagccatcagtggttctcaacatctccccattgaagtcactagggaaactgtaaaaaatatgcccagattcactcctgcccaattaaatcagaatatctaattgaaaacaactgatcacagatggttatgaaggagagtagaatgttagcctaatttcttttttcctcccatactgggctgagggggaaattcctggccagtttcaaatataatgaaaaaaagtaaagaaaatgttctgataacaagttaacaactgcagaatcctgtgattagaaggttaaaggtgggcaaaagcttatctttttctaagtcgctgcatgtcagaccagagaaatataaacatttgttttaaataacggttccctttttctactaactcttactataaagtttccatgacccacacctcaccttacttaactgctgttgatgagtagtaagattctctgaacattgattctatgaagtgtgttaacctcaagaagtatatgttctaaaaaatcaaacataggataagcgatgcttgaggtttatttgcaggtagtattgtcttaattgtgtagcttagaattttgcaaccaatgtgctgtgaatgaatctccagtgtgctgaaatattcaattccctcagcctcctgggtggccaggcaggcctgggacagccaagactgggaatcaaatattttttttttaatgtgtgggagccatggaaagatacagatggtagaatcttgaatgtttgaagtaaaaagcaatacagagtatcaagtttgtgctctatgtagaagacattatatactacacataaatccattcaacagttacaattatacatataggagtaaagccataagcagtagcatatcacttatgagaaactaagcaattcgtactaaaagaaattgtccccgattatcatcctgtagcataaaaattactgtcattactttatattgctcacagtcatagtaatctccaatataataatacatgagtataacagacttagaataggtattcaatgaagattgactaagaatggacattgctgtttaccatctccaaaataatttttcagtatatatgtaatagtttttcagttccaattctcaaattcaaacattaaaatcatgtaattgggtttggacatgaagaactacttctctgggttcaattatcacaaaaaagggatatttgcagatatgtttgcaaaactcctgtcaataatctagtggaattatgaagagtgagaaaagtgtcagaaaactggaaaaaggcaaaaattgtctaaattttcaaataggaagaaatggcagattcagttttttaaaaactgagagtgaaggccgggtacgatggctcatgcctgtaatcccagcactttgggaagctgaggcaggtggatcacctgagttcaggagttcgagaccagcctggccaacatggtgaaaccacaactctaccaaaaacacaaaaattagctgggcgtggtggtgggcacctgtagtcccagctactcgggaggctgaggcaggagaatcgcttgatcccaggaggcggaggttgcagtgagctgagatcgtgccactgcactccagcctggacaacaagagcgagactgtctcaaaaacaaaacaaaacaaaacaaaactcagagtgaaatggggagatgttgctcaaggggtacaaagtctcagacaggataaataaattcaggaactctactgtacagaatggtgactatagtcaataatgaggtactgtatacttgaatattactaaaagagtagaccctaaatgttctcaacacacaaacacacacacaagatttctatgtgaggtgatggatgcatttattagcttcatggtggtaatcatttcacaaggtatacattcatcaaaacatcatgtcgtataccataaacagatataattttcatctgtcaattatacctcagtcaagctgggaaaaaacacatcaaatgatctctgtaaagtatctccacttcagtttaattacccagtatgatggctgtgaaaacaaacgatgctgcttgtcaggggtatgtttaatgcacagtggaggtctgacttggcaaattaatatatgacccagtcaatcctatcgtgagttagtgaggcccagtcacagaagggcaggtttcagggactatttcgcccatgggcaatgttgtctgaattttatatgcttcccaaatagtcctttccaaatttcaagaatatatgctgcaaggtctttcttccaaggatgtatctagcacagtccagcttaattaattttatggataaagtactccaaaatacacctctccctaaaatacatgtatttgtatgttatatacttataaaatcgatggtaaacttgtgtgaatgaacagacccatggccatgtgccatgatccattttctgccttctctgtgcaaccaggagaatatttatggtggcttagttcccttttccagagaggcccatgaacacataggccctaggagagtgtctacaccactgagtgagaaagccatctctgggagccatgagcagagagagaagggggcacagtaacaggacttgccacaagtggaatgggaaatgcaatgcaggacctggtttacagggaaagataaaacatttgtttggggatctatttaatgtataaagtgccccaacagtctgctctcaacagagcagccagtgcaatccttgaaaaaccttagatcatgtcactttctcattcaaaattctcctgtcttctgtttcactctaagtctctaaactatctgccactctcctcctttcttagtctagtcccttcagactgctatagccaaataccttagactgggtaattcataaacaagagaaatttcttacctgtggttctagaggctgggaagtccaagatcaaggtgccaacaggttctctgtctggggagggcatgctctctgcctcataagacagcaccttctatgtgtcctcttgtggtgcaaggggcaagccagctcccttcaaccttttttatagttccattcacggagggcagagccctcaagacttaatcacttcccaaaaggcctcagttcttaatatcacctattggagattaagtttcaacatgaattttagaggaacgtgttcagacctactaccaccttcttcacacttgttaactccttgccctcatcccctcacactcctgcacctcactctccctgctccaccatgttggcccccttgctgtttccagaaagtaccaggcatgttccttgttgtcctggatttgctgttccctgagcctgaaatgctcctcccagatagtctcttggcttctcccacatttcattcaagtctttgctccatgtcacctcagtgtggccttctgaggtcctgccctgttgaaactgcagacctaccccacccctgcacagtggagtccacccagcactccctcatcccttccctgcttatttctccccatagcacttacattatttccctatagagggcaatttacttattgactttgtttattgtctgtcttccccactagaatctcagtcccacaggggcaggcacgttttatctgttttgttcactgctatattccgagaatctagaacagagcctggcacatagtaggcaaacaaaaacatgtttgtggaataaatgaataaacatccagttggtctacagtccaaaaaagaaattagaaccacaggtatagacctagtcatgcagacaaggatgcaaagggtgatgataccagagaatggagctaggggatctctaagtattttacacacacacgctccacatacagcagtatctacctaattattttccccaaaacagtcatctcagcagaaacttggaaaacacgtttcatagatgaatgtatttgagaaatgctatatgatctcactttcttggctattcagtacacattaacatactgaagcgtctgagaaattctacaattaaaaaaattaattttgataaacctgcatgtttcccaaatttgataacaccctttaattcacataatgtttaattgcttatcaaataatgttcttccctttaaacacactttaacactgacctagatttttataacagtatcaataatatgatttatatgatatataaagtataatatgcaatatcaaatttatgtaatacakatgttctatatttatatggtaatatcaataagaatactcttaaaaataaaattttattacaaagtgattggcaaagcagttttatccagttttacccatgtgatttcattgattcataccctctgtgaggtatacagagcagatccctacttaaagaaacagaggatcggatgaggcccagaatgggtaggacttaccaaggtcacagagggaatggatcacttttcatgccattgacttctttgtgatacgatttcaaaatactatgtattaataatactcatcctcccttaacaatagatcatggctgtcagctcaagacatctttaaacagagattgcaccacattagttaagggcacaggctgtggagctagtcaccttaatttccggtctgtctccatactcactggccatgtcatctgggcaaagtaatttaacagctttgtctctcagaggatgatattgataatagcactgatctaagggagctgagacgatcacatgagttaattcaagaaaagtattttaaactattacctagcacacactcaaggttcaataaatgcttgctattactatagaaatatatgttactgtgtttaataactgcattctataacatgggtataatataatcaattcaatcacttccctaccaagtctaggtttttccatctgtttccttcctgaaaaacaaacaaaaaatgaacaacacttggagtttaaaagaatcccaagtgccatgttggcacagatgtctggaatgaagaactcccaaatacttcctggtgctgagtgggctccagcggagagtgtggtggttgactggtccttctctggtcagcagacttggtgtggaagtctcctaagaacagactatctcctgggacttggagtatttcctatccgtgatcagcaacatcttttcttgcagtatttggcaagtttgtccttgttcccggccagaatcaggaagttcagaagcacataaaaacaaacaatacataaaaatgcttctctcaaattattcaaagttcaaaaaaacaagaaattatccatgatattgggatctacttggtattttatcttactagttatatttattctcatcaatgtgcccatcttttccttcccaatgaatgctttttttttttttttttggcagtgtttttcattgtactttttttcttggagtatatttaaagataggaagtggttagacaggttatcactgtattttgcaaaaatttacaggtattttcatgacataaactattctagcctcagttttcaaattatattttattattaataatatttttagaaattactattattcttaagatcagcataattttctaagaatgtcatttcagtgatcatagttgaccaattgcaagccaatacaataaagtgctgctttttgaaattttacttatcattcaagatccatttaagtatcagctccttaataaaaccttccttgttccccaattccatgtgatgcccaaaggactatgcttctctctctctctctctgtgtctctctctcactcactcacttcagtcactcaactaaatccaatggactttgttcaatcaccatttcagttgtgcttcttccacaaaatccatctggaaacctctcccttgctcttgaagcactctcttccatgacacaattctggttttcctcctatctctgactcccacttctcctttacagactcctcctcctccaacaagtgattaaatgttacagatactcaaggctggatgctagaccctattcacttctcgctcatttcctaggcaacttcatgatgacccatagttttatttgatttataaatttgtatctccatcccagaaattccccctaagccccagacccgtatgtccaactggttacttgacatttttgctttgaaatctcttgagggcatgtatttctttccacaaactgggtccttctagaattccctttttctgtgactagcacaatcagtcatccagttatgcaaaccagaaatctaggaatgatccttgatacttacctctccctcagccctcatatgaaatttcttaccatgtcagttttacctcctacacatctctaaaacctattcacttccctctcccagcatcagcaccctacaaactaccatcttttctcacctggactcttaaaatgatttcctacctagtcattctttacccttccattcctttctccatactgcacccaaagttgtttttaatacacaaatctgaacacattatccttctattaaaatcatttcatgactttctaattctctcaggaattctcttaagtcatcctaagtcttttctttaatcatcctaagtctgttaaagtcatcttttagagcctatcctacaaagtactaacacttctccagcctcattttgcaccgtgtctcatcccgccgaccttgttctccttgctatgtcacacttggctttgttatgatctctccgataagccatcctcctgccacaagtcctctgaatatgcccccacagcctagattcctgcactcagggtgaccatgcaaggtatgttctaaagcagaatacttttgagtgtgaaggtggcactataactaattatgccagacaagacaacatatgttcaccttaaattaactcctgttcatttaccagctctcagatcaaacatcaccccttaagggaacctcacagcaacctccctggcaaagtgaagaagaacattgttacttttataacacaatataactctctttagttcctgggggggggggggggaaatatatgtatatatatacacacacacacatatacaggaagagaagtggggaaggagagagaggaagaaggcaaagaaaggaaaggaagaagagagagtagactacaaagaaaatggacactcaaaatggagaggtagtacactcatcagatcagaagaatatcttttcctaataacattagtttctgaaaagagcattattaatttaaattgttggcctatactcagagaaatctgcttactggagacacagtgtaagagtctaagtaaatctttgatcatcaatctagaagaaggacttttaaatgtaaaaattatatttagttttaaaatttaacagtaaatgattttctttcaattctaataagaacactttatgggattgctagggagccatttaaacccagatatttccaagttacttatccatataaaaatcataaagcctcacaatgcttctgagagaggaacccaaacccaaatatttcagtatcattacaagtgagacttctcctagcttataccatatcgactcacttatgtgactgtcttctggattgttaattatctgagtgccaagaggacatcttatgaacctttgcatttcccttttcctcacctacttttcttttttttttttattattcttaaagttctagggtacatgagcacaacgtgcaggtttgttacatagttatacacgtaccatgttggtttgctgcacccattaactcgtcatttacattaggtatttctcctaacactatcccttccccagccccccaccccccaacaggcctcagtgtgtgatgttcccctccctgtgtccatgtgttctcatcatttaactcccagttatgagtgagaacatgcagtgtatggttttctgtccttgtgatattttgctgagaatgatggtttccagcttcatccatgtccctgcaaagtacatgaacttatccttttttatggctacatagtattccatggcatawatgtgccacattttctttatccagtctgttattgatggacatttgggttggttccaagtctttgctattgtgaatagtgctgcaattaacatacctgtgcatgtgtctttatagcagcatgatttataatcctttgggtatatacccagtaatgggattgatgggtcaaatggtatttctagttctagatccttgaggaatcgccacactgtcctccacaatggttgaactagtttacattcccaccaacagtgtaaaagcattcctatttctccacatcctctccagcatctgttgtttcctgactytttaatgattgccattctaactggcatgagatggtatctcattgtggttttgatttgcatttctctgatgaccagtgatgatgagcattttttcatatgtctgttggctgcataaatgtcttcttttgagaagtgtctgttcataycctttgtccactttttgatggggttgttttttttcttgtaaatttgtttaagttctttgtagattctggatattagccctttgttagatggatagattgcaaaaattttctcccattctgtaggttgcctgttcaccctgatgatagtttcttttgctgtgcagaagctctttagtttaattagatcccatttgtgtattttggctttttttgccattgcttttggtgttttagtcatgaagtctttgcccatgcatgtgtcctaaatggtattgcctaggttttcctctagggtttttgtggtttcaggtcttacatttaagtctttaatccattttgagttaatttttgtataaggtataaggaagggatccagtttcagctttctacatatggctagccagttttcccagcactatttattaaatagggaatcctttcccaattgcttgtttttgtcaggtttgtcaaagatcagatggttgtagatgtgtggtgttatttctgaggcctctgttctgttccattggtctatatatctgttttagtaccagtaccatgccgttttggttactgtagccttgtagtatagtttgcagtcaggtaacgtgatgcccccagctttgttctctttgcttaggattgtcttggctatgcaggctccttgttggttccatatgaaattgaagtaattttttccaattctgtgaagaaagtcagtggtagcttgatggggatagcattgaatctataaattactttgggcagtatggccattttcacgatattgattcttcctatccatgagcatggaatgtttttccatttatttgtgtcctcttttatttcgttgagcagtggtttgtaattctccttgaagaggtccttcacatcccttgtaagttggattcctgggtattttattctctttgtagtaattgtgaatgggagttcatgatttagttctctgtttgtctgttagtggtgtatggaatgcttgtgatttttgcacattgattttgtatcctgagactttgctgaagttgcttatcagcttaaggagattttgggctgagactgtggggttttctaaatatgctatcatgtcatctgcaaacagagacaatttgacttcctcttttcctaatagaatacctttatttctttctcttgcctgattgccctggccagaacttccaatactatattgaataggagtggtgagagagggcatccttgtcttgtgctggttttcaaagggaatgcttccaggtttgcccattcagtatgatattggctgagggattgtcataaacagctcttattattttgagatgtgttccatcaatacatagtttattgagagtttttagcatgaaaggctgaattttgtctaaggccttttctgcatctattgagataatcatgtggtttttgttgttggttctgttgatgtaatggattacatttattgatttgcgtaagttgaaccagccttgcatcccaggaatgaagtcgacttgatcgtggtggataagctttttgatgtgctgctggatttgatttgccagtattttatttaggatttttgcatcaatgttcatcagggatattggtccaaaattctctttttttgttgtgtctctgccaggctttgctatcaggatgatgctggcctcataaaatgagttagagagcatttcctctttttctattgattggaatagtttcagaatgaatgttgccagctcctctttgtacctctggtagaattcggctgtgaattcatctggtcctggactttttttggttggtaggctattcattattgcctcaatttcagaacctgttattggtctattcagagattcaacttcttcctgctttagtcttgggagggtgtatgtgtccaggaatctatccatttcttccaggttttctagtttatttgtgtagaagtgtttgtagtattctccaatggtagtttctatttctgtcttcgcctacttttcaacattttgtgtaatgttttgcataagcatttgttgaaatgaactgaattagtttaggatcccctcagcctgcccaaaaactggcccctttgctgactcccatacctaaatgttctaccaaactgcaagatacctacacactccagtggagtctacatcttcctgtagtctaacctgcaccactaggggttcatgggtcccgagctgtggtccacagcacacctgttgtcctgggcttataatgttgctgtgaagaaacaccaggataaatgttcggttttcctcaggacatagttttggtgctcacttttattaaccctgtcatgtccagcagagagagaagaaacatggcctgggaagactgaagggacctatgaagtacatcatgcgtagttgttcctggtctctgttgtggagaatggagatgctggccacgtgcaggagtgctttagagagcaagggctcccgagggcacctggaatcccaatttagtcactttataagctctctgtgctcctcaggacagtggggatgatacacacacctatgcctggggcttgtcacaaggactaaaggtgctcatacacataaagcccttcaaacagatcctgacatttagaaaatcctcctaaaaataccaacaattaaggagctggtagggggtgggtgggggtttgggaaggaacacagaatatccatcggaagaatggtaactaagtaagaacaatagctactggtttttgaataccaactatgtgccaggcactgtgctaagcaatttatatataatgcatttctaaaaaacaacgaactttgcttggtggaaattctggagattaaaagtattatcccagaaatacgtgaatgatgcgtaatcttacacccatccgtgttttcattactgaaggcagacccagatttcatagtccccaagttgactcctcaagttgttctccttctacccaacctttataaaaagacatgtctttgtgttcttttaaggtcttttacagcttttgaaattctccttgggcattcccactgcttcttgttcagtatctttttttatgagactcctatgttcctggtgattgaagcttacttttttctcattttccctctgaaaaactatcaagctcaaaaatgaggatagctcttgttgacactagtctaaaacctgccttaccttctttagaaaacaaacacactactatttacatattcacttttcagcattcaagttccaaaatgcacatttgtcagaaagtcatcattctaagctaaagatgcaaggtgatgcagtattgtttggcgactctaacttagtgaaatttcccttttctctgatttttatatgcaaatcaagatttttaagaagagaagaaagaacttttttcacatgcaaagaaaattgtgtttcattccttttgcgaaaaatgtggtttctggacgactaactcctggtttgcctctttcctacatacaaagctctctcaccgacagcccaggaacacacagctagtgaaacagaacaatggacaggaagcctcctacttagccagttcagcacatagtccttgatgaccaggcaggcccagtgtcactcaagaaagtggaagattgaacgcccacaggggaaatttgggtctaatcagccatcttggctccctcctgtaagatcatggtactcggaacaataatctctgcctaagttatctgaactggctgcttgtgctatcccataaatctatggagtgattaaattgcacaaccttcctcctctcttttaggccagataaacatcttaggagaaatcgttcacttagttaatttggagagtagtcagctgaaataaacaaagcttctagctgagatgtgcagtatggtgaaagttgtctgagatttgggatctggattttctctgtctttattttgcaagtggtggcagtgacatgaattagtaatgtgctcagcaagctcagaggaatacctttcatgagagctgcttctttcccaccatatttgggctgctttgcggcttcacctttctgataccagcactatctcatcttcctggttccttagtgatgcccctgctatgaatctctatcccatattccgtgcaacctgtttataccaagaacgtcactatcttcttcattcatctcagatgccatggaagcccagtagctactgctctgtccctgacaccttttcctcaccctgaaatgaccttgacataccacgacaggggccagagtctggttcttgtcacatggcctgtgtttcagccactgtaagttgtcatcgctgtcagagtctccaccctctttgccagttacataagaggctacatagacatctgcttcctagcacaagcttttattaaccagaggcagcgtgagaggccaagtaagcaagaggtccattccggagccctgtcctcagggagggtgaggggctgtcgtcaggtcaggtcgtggctcctggggcaattcagctcagctctgagcctgtttgcagccttcagtacaggggatgacatgtgatgttgtcagcctgaaggggcaaaaaaaagcagcagcctttcaaaatcagaatgcccctgctgtttgtttccttttggaacacaataagaacagactggggacatgactctaggctgtcaacgcttcctaccagcttccacagcacctttcatatgccagaagaaaaaaaacaagttgcttaagttaaacaaggactcaatgaatagtcaaaataattgtttagcttggatataaggccttaggtaaatagatgattgcctgagaccctgggccaggaaaagcagctaggcaggacaccgcttgttctgtccctcagaaaacagcccagtagcctctgctcctctgaggactgttgttactgaattaattctctcttcccaccagcgtattaaagcaatttaatatcagaacaggctccttaaagcagggagaaggaaagaaaactttctatattagaaatataccattaacacataaatcttactacatgagcgcttccattaaatagaatgcttcagattgggaatgtctggtgtgtttgtattgaactgttttcatgttgtgaaatttctcagatgcattgttagcatacttacaattgtcctgcctcctgccttactggtattcttaacatgatttcatccttttgaaaatgattatttactacaccaaaggggcattgttaggtttatgaggaatcagcttctcaaagtgcagtgtagttatggacagtgtcagcactgaaatggaatcttccaggtatggtttccttatttgttgttattgccgatttgtttgggtttgtttgcttgtttaggtatctttgctctcacctagctccattgttacttgtctcttcttcccaaagtagggtgcagtgtgaaaatttgttgccagctaatttcagttctgctgaagaatatttttaataattgctttcttacttaaaagtaatagattccttgttgatccaggacaggatttggttgtcttgcttgtacagcccatttccactgaaatgctctttgattgaaccgtgaactcatcaagggagtgggattctcctggtattctttttccacaaatcatcatgactgtacatttggtttatcagcaaacagcaatcaaagcatacattacgtaagaaaaagttaatgctgacctgtttaaccaatttttcatcttgataatataggaaagtggttaagaacatgaggtttcaagtcggttctgagtttaagcataagctctgcacttactagctctatgagtctgaacaaattatcaaatttccattagctttgcttcctcatctgtaaagctgtcaaataataataataacagctactttgggttgttgggttgatgatgtgagataatacatgtaaaatcctcagcacagtataagtattcaatgaatgttatctaccatattattttcacataccttataatttccttacaacaactctgtgatgtagayaaaattgctatgatttatgcaatttaaatattagacaactggacttcagagtgattactgattcatccagggttacccaagatggcaaaatgttcgtcctgtcagtacaggagcccccaagttcccagtgtattgccctcccttcatccatttggccacagggtactcttcctcagtttccctaaatctaaaactttacgtaataatgggcctccgctgccctagattgtcaggtgaagaccaggaagaaatcctgtcacaggcattaaaaacttcatcaatattacacagtgatttccaaaaggtgagcgtgaaagtgctggaaggagcccatgagattacagcaacaggtcaacaaatccacaagcccagccagctttgtagataaaatctatacagttcctctttggtaatactgagaagaaaatactaatggagaagtgatttccaaaaggtgagcgtgaaagtgctggaaggagcccatgagattacagcaacaggtcaacaaatccacaagcccagccagctttgtagataaaatctatacagtctcctccatgcatcatttttactgtatatgtctcccttcttaccattataaaacataaatttatttaaagtcagtgagtctatcattttaacatgctgtattttctcaattgatattaaaactacaactacttttatgtgaggatctaagattttcatttcttttttcattttaaaaaccaggtctacacactccctaaggtgtgtgtttctaatcataaggttagaaaacaacggtattgtagaaagagctcttcctatgaagtctaacagcctagatttaagtgctaccccactgactataagctgaaagcaccataaacttaggcagctcaattaaagtccataaatatttactatatcaggactttaaggggcttgtgcccttaactgggactacagagcgaatagtagtccttcacaaccattcttctctgagcctctattttcttacttataaagtaaagagaataaaggtgtctctcctcacagggttattatgaaggtccaatgagaaaaaacaagaagataaatatactgtcatgttgtgaaagtgctttgtaaacatagggtgttcaagacaactgccgaggagagaaaaacacttcaacttttcttggtagctttcctttattgaccagccaccccatattaaagtacataagtacattttttttaaagctaacagctttaccctcattgatgtaagtttatattcagacctataaaagtacttttccatctattcctcttcctctcactttggtttataacatttatccataaattacaatattctttcatatcaatatggcaatgtaatatcacattatacaaagcattgaagaaggcaccaatgtaaaattcaaagcagagaacagcccaagagctcatggcttgcactttacaaccccaagtacactcaaggcccatctatgagggacattttaagcatatcagttgcatgagttgcagctgatggggatctcacccaggccctgagttcctccaggaattaggaaaggaaggagagaggactgttcttcctttcagctcccaggctggggccccagtgccaccttacttcgggaaaaaggtgatttatgggagtgtacccattactactggaattgaaaccttccctgattcagttcttccagagatacattatgtctcacatatttctacctctcctctgattccatattatatataataactggtgaatttggtctttatttctactcttgtcaacagagaacattcacttagaatccactaagtaccagacagcattcaaagtgctattatggagaaatgtaaataacatgatatgcatgatccctgctttgcaggagtttagaaggaagcaaaccagcatttattgccaggcagtgagtattattttagcttctctgacaaggacacttcgaagtgggtcttaactttattttataaatgaggcgtctgaggctcagagaaataaatctgccaagatcacacaagtagcaagcgtctgggccagatttctccaaggcctaccgtgttctaaagtccatgctctttccactctactccattacctcccctgatgagaaaggcaggacacatactaaaaaggaaaacgaacacagatattaaatattaaaggaaaccagccaggcgtggtggctcatgcctgtaatcccagaactttgggaggccgaggtgggtggatcacaaggtcaaaagatcaagaccatcctggccaacatggtgataccctgtctctactaaaaatacaaaaattagctaggcatagtggcgtgtgcctgtagtcccagctactcgggaggctaaggcaggagaatcgcttgaactcgggagtcagaggttgcagtgagccaagatcgtgccactgcactccaacctggcaacaaagcgagactccatgtcaaaaaaaaaaaaaaaaaaagaaagaaatatatatatacatataaagggaacctacaaataaataagtactagaaactcgacagactgtcctgtgtgcaagagtggccaagtgcctggagcaaggctagcctgtgagccgattctaaagcacattaatgatacaatctggaaaaaagaaaggtggatgccagtcagaaaacaattgtgttggaacaaagaaaaattatagtctgggtgattaacacttttaagaacgaaagctacaatgcaacacccatttgtctttctggattcagagtctttgtctctgtggccctgggaagcataaaaagacttttgtctttttatggaaatttgtaagttgctgtgattttcacagacccatcttctaagcacatacaagagacctgtgttccttgttagtgtattgccaacctcattacactcagtattaaatattcctttccacatagcactcttcagtatggtgaatgggaaccatttttctcctgacatctggggttggtttcattgaggatttacaggggaaaagtgaatgcacgtggcaatgttttcaagcctttgtttggattttctgttttctaggagatatacgactaaggggtcagacgggggttcgtgctgaacgccgtggctcctacccattcattgacttccgcctacttaacagtgagtaatcaagtgtacctggaaaggaacaaacgttttcttcaaaaagaaaaaaaaaaatcctcatttccctctgaacttcgaaaccttctggggtctgccttccttcctgaatctctcttctgccaactagaacttaaccctttgtctttgagtttcctcacaagtgaagtaattctggccctgcactgcctctcagagctccactgagggtcaaatgagatcaggtcagctttaaaagtataaatctctggccaggcatggtggctcacgcctgtaatcccagcacttcgggaggccaaggtgggaggattgcttcagcccaggagttgggcaacagagtgagaccttatctctacaaaaaatcaaaaaattagctgggtatggtggcacagcctgtagtcccagctacttaattgggggctgaggtgagagaatagcttgatcccaggaggtcaaggctgcagtgagccaggattgcaccactgccttccagcatgtctcaaaaagaataaaattttttgtataaaaagtgtaagtctcaaaaactgtgatgccctatacagggaagctactattttcattttccagcacattctctctaccttcagccagagctagactaggtgagattccattttgtttttaaaaccccacagggaaacctcttctacagttgcccttagtaacctacctgttatggaattctcacttctttgtctaatataaatccttgaggtctattcttgccttcctggtaaaactcttcaccagggcaaaatccaaagcacttgctgctttctcccttgaatcttacaagttcattgacttctaccttcccctccctaaactgctcctcatcagtagttttgctcaacctttggtccacaattttcttaatcttaggtttctttgcaaacccaaaccagtgaccagtcatccctccagatttcatgccttataacgatcataatcatccttcactgtagacttgtgggggaggtggaagagcaagtggataaatttcacaatttgctccaaggttttcagtgtttggttctcatatcacttcccatctataaatttcaaagtgctagattatacccaaagaatattactttcctttgacataaataagctcagctaaagaggcaatttgatttacttcaacccctggaaattactaggagaaattagaacctgttatttctgatccttcgatccttgagaggccaatagtaggtggcatgtttgtatttctcctggcttgttaatctcccatatcaatgtgcaatgtctgttttttttagcastttcagggacacagagacttggagtaattctttccacactagagataaccttccctacccagaccctcaaaaatgctttttggaagaccgaattgagccattagaccaatgcaatatgggatacagcctgcgggagctctattggtctctctgacctttccttataccctgaatgggctgttccagctacccacggaagttacacctttgacagtctctagactgagtggatttccaggtcctaggcatgtggtttctccaagcaggacaaggatgagcaaggggttccatttcactgtttcatatagaccagaacgctccaacggcatcccattttgaaagtcggagggagaaaacaaccgaaaggcctcttttcaatagtagatgagtgttagttcatggtttctaatatgaaccacaaaggaattaggaaaataaggggatatttctgtttataattccaaagtttcattattttaaaaccttaatcccagtgttaataagcaactttactgctaatggtggttatgtttgcaggtgggacagtggaatatttaattatctacatcataggattctgcaacwtttttttttttttttttttttacaatttgcctcttttacttttgtaatctgaaaaacaactgcaaaaataaataacatttaaagagaaactcattgcagataataattcagtgtcatattgttcaccacgtaagagatcatctgccagcagctgctatcctgtcttccctttgctggagatcctccaggacttctgagcacctgggctcaaccccagcctcatttccctggccctggatgctgcctgcccctctacccccatttcaccccacctggtactcacaatcctccactcatcgagtgacagtgctggccatccacccggaaattccctttagggtctcctcagcattccattccggataactctttcacccatgtctcttactctgtaacatattgcagatgcaatattaattttcctttagcatattttcctttataggtggtctccagtttttttaatgtatcaaagacaccccaaaaagactataagatcctaaagacagtcttctctttatccctaaatagactatcagatcctaaagacaatcaattgctattgatcatttactaactatagttaactkaccaattattaaagggtctcctcgaaaacattatattaaataactatgaatgtaaatcatcccctgtgtttaactgaacaacacgggtaggaatgaaggcctctaagattttcctttgtgatacgatttacctcttggtataatgcaccaaagaccccattggtgagttgaaactagaacagataacattactgtggtcgccctccacggttcctaacttagtttgcaattacaacagcttgtcaccatggagcagagatgtatgaacatctgtgttatgcacagtcacataaggtatatatggcatatctcctactacttcatatactgtctatttaattctctttaatatcattcacgtccttgttgtggtttgcctgagttgttagtgtgtgctttatgcctaaagggaaacatcttgggacatttggggattttctcgtagaacttttctttttaccagctcattcttattctacactgtaagagctgaactagtttaaagtgattctttagatcacttaccttaattttgagtcaagtttttcccagtgtgggcacagaccccaaacttcattttccttgggtgcttgcagttttgttctctctcccacagtaaaatctaatctaggatttttttaaaccatttataggaaaaaccaaatcaccatagctgtcactccccagctctgcatccctgcagccttccttccaaaatgttagtgaaacccacacaactgccatcccctttccaaagtgtcgctgggtgggtgtccctcccccacccacctcagtatatgcattgaatcactggagcacgcaagagcagaaatgtatactaaatagtgaggcccatgcatttccccattggtcccattagtcacagccccagtttgtcacaggagggcagaggacatcagaattaaaatctaaaattacttgtcttcaaccagaacaaagtttctaggcgttaaaatggataactagaacagaagtggacaaatgactgtccacacaccaaatctgtcccctcctcctgcctgttttggtaaataaaattttactgggatattgctatgcccatttgtttatatgacatctatgactgctgtcactgaaacagtggcaaagtagttgcacagaaaccgtgtggtctacaaaccgmcccccacaaaccccaaaatactcaccctatggccctttacagaacaaggttgccaatccttaacttagatttttttaaacagatttaagagagctttttgacaaagccacaagcacattcagtccagtgtgtttatctttgttaatgtctttttttttttctgttcagtttccactgccatcactttactttcaagaatggactcacattgactaaatttttatgaacagaagaataaacagagagggaacctctgttattgatgcagattttaaattccaatttaaaattataatttctacttgcacattcttctggaagagattatttttgcggggaggggaagcacatgtttggggcagagggaaacacagtactaccaatttcatgtacctgttttctgcatataaggtgactcttggtttgcctggcatagtcctagtttgcacctgttgttcaggagtatttattaatagtgccatttttcattcccagagtgtcctgatttggacactaaattacaaggccaactgcttatataggttttcccaaaaaagagtatttaaatttaatgtttctcaaagatcacatgcaggaataagcttaaaagatctattgtataatattgtgactatagttaataacaaacgtatatttgaaaattgctaacagagtaggttttaaatgatctcatcacaaaaaataagtacgtgaggtaatgcataagttatttagctttacttagccattccacaatgtgtgtgtgtatatatacatatagatcttgaaatatgttgtataccataaatatgtacaattttgttaaaaataataataccatatcatatgcattccaggaataaagattagaaaatcattttcataagagattcatctagatcaatagaaatacataacactcattaaaagctaatttcgttccctgtttctattttacacaatttagaagagagtcatctctatgaacttcttgaagcttctctggataaatagcaggaaactgtggcctcagcactgtttgtgtgggacataggaaagatagatctttaaagactgttatctttacacctaagcatagagagccagaacagagagaaaagggggaaaattgtttttattccagatgatgtcctaacacagagaactggagggacggaaaagtaacggctgtattctcccaatgtcgatttcctatagatttatttcatttactaattctgtttgtaggggggaaacaaaggaggaaaaaatgtagagaagagtgttctgagacttgtggacccagaggggagagttgcagaagcaattacaaccttctgcagagcaggcggctccagcagccccgtctacagctctgtctcctgatttaatataatcagcagcctgagtagataatgactaggttgagatgttcccgtggcaaccatctcagagcaacacaaagtgatttccacaccggctcagcagaggaagtgacatacaaagaaaacgtgctcagggactgtggagcttgaggaaaagaaacagcttcagcctgaggttttagggcaccaagtatccactgctasagagaacccagagctccagaccagcccctgggctttgcagtagtaggttaattggctatttggcttttcctgactgttaatttgctaatcttgatctttaaagctctattccttcagacttgactctcctgtcagggtcatcttaactgcacaagcatgaggtcattttagtagagctacaaaaatatttccctttacttattatttcccaaatggaaccaatatatacaaacatatatattttttaacctttctatgaagaagtgacccagagactcaaatatttttttaaagctgccatctaaaacatattataccctgcagccattctttctttgacatataaaacacactctctttgacatataaaacacactctcgatgaaggactgttgaacaaaagccactcagtatgctggaaatcatctggccctaagtgatagccccatcttaaagatggagggacagtttccttccagactccatttcctatgagagaattcttggcagacagttacagccttttagtaaccttacagataccttttcctgtcacctataagaactacacaaaatgcaaagaatctgaactaaaatgtcattggatgatttgaattcagtcatgctgagaagatgctatcccacccccagccctgtgttccccaagcggagaagggaggtgtccgctgggacttgttcagacttctcctcacacttgtgagtgccaaggtaacaccctacaatttcaaagttcaatatttaccttcctctagaagaaaggcaaggcactggctgtggtagtggtgctttctggctcagctggatcttgctccatgatggtgcactcagggcttctggctgcaagctcccagcacttcagctgcggaagtgccagggcagcaggatggttaaccactgaaatgcccactagcttgcagaagacagagttggcgatgtcccgactctccctattactacccctcgacggagcacctcctatggtaggcattgtaccagtgctggagatacaaagatgaatgagacatggccactgcccttgagggatttacagtagcataagctactgtatctacaatttatttacaaatacattttgatgtggtgtgatacaccaaataatacatgcctgtataataacagcatacataatatgagaaatatatgcatctacgggattcagaggagttcgagaagggaataattaactctgtcttggaaattaaggaagtcttcctgggagaagttaaaacacaagcagattatggaagcaacagtgaaataaaagagggctgtatgctaaggtcaactattagggccattataaaatacgctttaagacttaagaaaccaggaaaacattgtcaacaagtttgctcaactagataaaagtgttattgaaagacaaagtattctagtgggatccaagcagagaagtcaggaaaaattatacaacatatgtctgagaaaaaacatattcaaaaagaaaccattttcaccttctacatctaaaagtgaaaacagccattgccttctgttaacctgtctgacatcatttaatggattactttttatctgaaggatgaaaaatagaaaattgagttagggagtccagtacttcctctgggttttcattcatttattcagtcaacaaacagcacctactctatgccaagaaggccatgaaacccaggtgctctgagccacaccaaccgccacaggactgagatagccttttgtatgatggctaccttctgtctcagacagcagtgggactggggtctaccagagacaccaaacaaaaatatctgaacaattccttttaagtcaacaaggaccggggagatgggggagaaacctgctatatgctatatctgggcagaaaattctgagggctagaaaggaaactatgagatattctgctaccctcaaagagcaaacaatctcattacatagacaaggaaaataaacattacaccaagtaccatacaacaaagtaaatgatctaattctaaaataagtaacaataatcagagacaagagaaggcagagattactgaagtaacctgagcagaagaaggctttatggtcttgtgctaaacactgaaagataagacagtgttgactgattaaggagttgcctataagggagactgacctacatatgaggacataacgtcattaagtaggaagaaggtccaaaaagtagcaaataaagttcattaactagagagaaaggcttggaatgccaagataaagaattcaaacttgtctcattaagaagaggatctctagagaattttgcaaaaaaggtgaaccgkataaaacactgtttgagaaaattaactaacatccatatgtaggagacacagtttcaatgaatccaaagaaatgtaatcaggctgcagactgtgatggctgtagagatgatagtgtaaatccacagatttcatataaaagaagacataaaactggaggatactgaatattgggagagccagagttggtctggccatctgaaaaattggagctgagatcaacagtcagaaaagttagaggatgagttaggggaaagatggtaagctccactgggacaggttgagtttgcaggagaatcgagtggaaatgtccrgaagaaagctagaaataatggactaaagtgcagaggagaggtctattttgggaattccacttgggaatcataatcattcatgagccatctggccagaacaggcgtcatgaagtcaaccaactacttttgttcaggggcccctgtatttttagtttataataagcttgattttgaaaagcattacaagactgtccrtgagaaatcccacaaagaaattagtttcctttagtgagaaactctaaatttttctctgtgagaaactatttagacataagagttcaggcaccacctcactccctcatgatggattctattgagtacaaaagtgacttgtgtcagatcccagcggatttgctaactcacctgaacacagcacagagaaatggccattttctactacagcacttccttgagcgaaactctaacccactcaaagtattttcagcatagtggcttctttggatttctggagacattaaaatatagagggaagcagaagtaaattaagttttttttactgaagttacctatgagtcactgagctaaaatgacttgtttgttcaataaaattaaattcaacctcctacccagaaacaggcagagcctatctctgtgacctcattaataaaccaaatgcagggctatttttttcattgccatcccaccttcaacgtttcagaatatctaagggattcactgtggtccccattctactgtatgtatgaaaaaccagaacatggccccatccttaatatcttttgtatgttttcaaactgagatctcagggttcacacacaagatcaaaaagacctttttttctttctaactagcagaccaaattgccttggggcatctgggtcctttattacttttaagtaagctggggaagaagggcagaagttatggaggaaagtcccaagaagaaggtggccaatgccactatatctaacaacagccaccataacagctctagtctgagaggtgcttaaccccaggcacaggatgtacaaggccaggtgtgcacccctcttaggcaaggtccccaggctataggtctcttggaagcctggaagcacaggaggattgctgtgaatactaaaaataaaaatgagtcccttcacaaccaaaccacggctgcctctctgcctcttctaccatggttgccccacccagagctccaagctcactaagtcatcatcaatagaggagcccacagaaagaccatgagctttgaagttagacctgggtttgaatcctacttatactgtgagcttgaaaaagatgcccaaactacttaatgttcacatacatgcaagattttaatttgattgggttgtggtgaggagtaaatgagataaatgtgtccagaagcctgccttgcttataataggtccataataaatacagttgagttttggatgtcccttctctctctgctgagtacatccctctccagccacctcttctcctaggaagcatctgttcacccttcaagccctggccccatcattatgtcctttgtgaagccttcttcaatcctcccaaaggagtgaactcatcattctctctgcactcccactacatctcccagaaagcattatcacattgtaactgcgaagtcattgaacctgaatttctggaggtagagcccaggatattttcaaaacagcctcaggcaacctgaagcaacaagcctggctctgggccttccaggaatatttgggaaccactatatatgtcaattatggcatacaaattatatctatgctttgcacagttagactcatttaatccccataaacaccctataaagtagccactactattacagatgaggaaactgagactgaaagaggagaaataactcaaccaaggtcacccagcttgtaagccagaatttaaaccccaaatatataatcgcagagcacaagcttttaaccatagtaaagtataatcctttttatatatgaattttaatattcaaaggcaatatatgatgcagtatactccttttacaatgaacatatatatgccaattattccttttaaatattttttataaattatgaaaattttctttttatagtacatttagattatttccttttggtattaaatgacttcagtatcattgaacaaatattcctataactgaatgagaaaatatgagattaaacatctaaaaaatcagattttgcaatatttctactgtattttctaatattcctgccactctggtggaagacgccaaatgacagactgcacatttcatcgcctgaccttgtgttctttgataagaaagaaaagggcgtggtggtgacaactgaggatacttgtaagctgcccccaaagaagaaggaaatggaatcgctattgtgacaaattaaagtcagatttgtagctgccaccagttgctttaatttttctcaagggggagttggttatttcctgtcgtgcaaaccatgaatcgctgaaagaaacaatttctcaaaatgtttataacatattagataaaaagcagaatagaaaagtctatatccaaaaagaagatctcagttatgtttattaaaatatgccaaaatccgaacaagggttctttctagatgattattgttcttctggttttctatttttttcctactggaagcatgtattccttttataatcagaaaaaaatgagattttatttttaaaaatttcaatgtccgccagaaaaagaacctttatttttcttccaaaggaatatcaagatgcagaaaatgaaattgcagccataggccagaaaacattatttaacaggcctaaattggaaaattggttggaaattgtgaagttgggtgtttctcaaaagctatgtaagctactttgcttgtcattttaaagtgaaatttattccaaagagcacaaaatcaaagttcttattcacatttgaacagcactttagactttgcaaagcttttaaatgaagacactcaaaaaatcattgagcccagtttttcattttataagcaaacaaaaacaaaaaacaggccaagtgattcaagcaaagctatgaaagagttaaccagggttgggctcttcttacattctgtctttccactcaaccatataaggcttccttatataagccttaccttcaagatataaaataacttttaccacttgcaaaaagagaaaataaaacaccaggattccccttgaaggtggttggtgttggctccagagccggctgcctgggtttagattccagtagcagttgctacaggactttgatctactgacccctggtcctctgattcctccgggctagaaaagacgattcacaagtgcacatctcatgggttattgtgggaagtagtgagtaagcgtgcttagagtgctagtgtaatacctgccatggtatcaattattttattattacagatattagtattcccatttaagaagggcataggacacataacaatataaagtacttgacttatagtgaagtagagaatggcctattaacccttttcagttttccattctatagttttatcttttttctgacaggtatttactgagctccccctacaatgcctgcagcattgctttccaacatgtggttgttaataaattggtagagagactgatggctggaaaagtgaggctagggaaggttgttttgttttgtttttcacaagacattgaagcaagctgaaatcatggtgagaaggatctagttgagaaagaaccatggaatagaccagaaaaatcataactgagaataaagtgtcctgagaagatgggaggggatgactggcctgagaaaaggaggcaactctcctaacagcaggtgggaagaaggaaagaagggatgcaacgcagggggtttggtaggtttcatagcagaaaagtaaggaatttcccatctaacaacttctcgtttctccatgaagtagcaagccaggtagagaacagtagagatggggcagcccgaggggccaccagagcttggtggtcttgcttttgtggcactatatgtcagtatagcccagagagatagttctgtgctccacctggccaccagcagtcaatgtcatcaaaagcatcacagggaaattccatcagcagtgtggtcgcctggctcagccttggtcatctaagtctttaccattgttttcagctttcccctcctcagtttgggctagtatagacaagcctaccactattcccaccctcccctacatgtccacatctcccttagcaatgcacactgaaaaacaagaaaaattataaccttgtgtctgactcccctctccttcctgaactcatttgtgctctgtgggtaatatcatctataaggaaggtctagcagtggaaacaagttttccctgtccctcggtgtctgggccctggcacacccaccccatccacatgatcatccactactggtcactcatcacctgaagccagctgtgactgcagctagttcacttctaggcaggggttgggagatgtcccctccttgctttcctgtgattctggatcctataatgctaatcttttctcccaagagatgccaagaaattaggcaagtagaagcccagtatccccttccctctcctacctaccatttttcgacaattctttatgtgtaaggaaaagaattccccatctcccatcttcttttcccattctttcatttcatgttctaccacattagctttattttctgttttggagagaattcttggaaaagaccagaaagctaaaaatrtatttttagaaagtcctccttggaagacctaagatcatcccttttwaaaaaaaggagaaagggtaaactagattacactattcacatttattgagcaactactgtgtaccaggccataagtgctaaaagaaataaaggatgaacaaaacattttgggaaagggctgatacagaactcactagaacaccagctaaattggcaagtgtcacgaggttctaatggagaaagcactggacattctagtgaaggaccttgtggaaaggttggcattggcatttggacaatgactggatttttgtaagtagaagtttttttaaagtgcattcaaaaaaagaccaggtatgggaaaatgctgaatacgtttaaagggtgagcacctcagattctgcggtgaatgtgtagtgctgaaagggtattgcatagttggagggacggtaatcagaattgatgtaaaattaggctgaaacccttactaaatgttaagggttggttagaaccagaccagtgatggtcttgaatgccaatttataatcttttttttttttgagacggagtcttgctgtgtcacccaggctggagcgcagtggtgtgatcttggctcactgcaagctccgcctcccgggttcacgccactctcctgcctcagcctcctgagtagctgggactccaggcgcccaccaccacgcccggctaattttttgtatttttagtagagatggggtttcaccgtgttagccaggatggtctggatctcctgaccccatgatccgcctgtctcggcctcccaaagtgctgggattacaggcgtgagccaccacgcccagctataatttaatcttttttaaatggagatttcacttagggcttgtgagtatagacaaacgcattttctttccctcatatcttatatagcaagtggttgctcctgcttaatattaaaactaagttacaaagaaagagtcagtttttcctgggtatacagtgaaaacacattccctcttcaatcccctaacccaaccttctatgcctaagatcaagagtgcttttacaatatgctttataaaaacctcaaaaactcatctcagtattcaattatatttcaaaattgttgcctggaaagcccaggatctcaatccattattggtgtacaatctataattgtatattggaattctaaaattagctggtatctattgaaagtgttctatgtgctaagcactttatatgtataacattatttattcctctcaaaaatgtgtagattctgtaaattattatcctcaagtgacacaaggggcaacagaagcactaaggaagtagagaggttcagtagctgtatgggagcatagtcaggttgcaaagcttcatggaagactctagagatcatcctctgtatctctctgcaggcagctcccatcaccctccctgctgagatggatgctcttcaggcaagcctccagacacactaagactgctgggatattcttattcattcatttattcactccattcgtatttactgagcacctatgtgtcaggcgctcttctaattgcttagctcttacagtggaaagtgaacaaagttctttcatttgaaaggcctcttctccatctaggtgcggtggctaaggcctgtaatcccagcactttgggaggctgaagcaagaggatcacttgaggccaggagttcaaaaccagtctgggcaacatagcaagactctatctctacaaaaaataaaaataaaacaattagctgggtgtgtgatgacgcgtgcctgtagtcctagctactcggggggctgatgtgggagcatttgagcccaggagttcaaggctgtgatgagctggaagataccaactctataaagtaaaagacctcttattttctctatcacaattatgcctcttgattataacaataattattcttttagaggaaatattaggtctccaaaatgtcaacagtgttcttcatatcactgccaaactatctcaacgttcacatagaaaatcatttttacaggcaaatagattataacatctcagaaggaaatgtcttcaaagataagtgctgcctaatatattaaaggacaagcaagttctagttggtcaaatggtctcttcgctgggaattgccaaacaaggataacctgttttgaaagaattatagcataatcaaaaactcctaacacaaaagctatttgaggcataacttaactcttccccagtgactcatgacttctcagaatcttagaatgtttcagagtcaattaatttaaacagcaattattaactggaacttcaaaacaatctttgtgaagagtttagctttcttattgttgcaatttccatttgctgaaccaattaaggccagtggtaccacctgagattttgaaaataaatcagtgggtttttatttcagctgtttggaaatgactaatagagtaatacaatagattaattttatctaacattaatagctggatgtataagaaacacccactctctagaaattaagacatgtcaccatagtcttatgacaagagtgagtctcttatttttgaactttctattgaacagttctcaccatcttaaatcaccctttgttatgagtttttaagtgtcttaagtagagaaggttaagaaaatgaatacttatactcctttaaatactaattaagaggccctggtaaccatttatcagtaatattaatggcatgaaaawtgaaaaagtatgactcaaaggtgaattcagggcaatttaaattatatataaaaaataaaaacttaggtggaagaatttaaaaattttaaaattctgcccaaattgtggagtgcaattttatacactgggaagaaaaatgacagcaataaaaattttaaaaagatgaaaaatattttttaaaaaattgtgcaacccaattttaaatgggactgagaaatataagcaaagcatcgacaaaatagtatattgttagaaaagctatgcaaatgaaagaacattaaaatcactttgctatataaaacaatgtcaaatgacagtatcaagtgtccacatcccctgaggccaagtttcagtcatctagtccatatggagagtaatgctgtgccctcagctatttccttcttaggactaatggaaatcaaattagctcccttttcatattatgtgaataaaatataagttccacaaggaaaaggactttattttgttcattgctatatcctagtccccagaacaatgctttttttcacatagcaggatcttgacagatatttgttgaattaataaatattgaaggcatttattcaaaatgacttgttgctatggatggcgtattttatttttactaaagttaaattatatataacatgctgacaacagcagctggagagtttgccctattgtgtgaagtttttccaagaagagtttagcaaacagcatatttgtgaagattatcaatatgtggaatgggtgtgatattacatacatatcaaattatttgtatttgtgataaaacaaatatttaaagtacaatattgaggattttagtaaaaggagaatttgtcttttctaaacaaagaaaattatagggtgtgactagatcatcctttatccttaagtcatattttccaaatctttaatcctttatagcaccatttcccaaagcgtggtatgggaacacaggcgatatttttgttacagaaacaaccttttatcttttactataatcgttacatgtatattttaacatgtactagagaaaatgtaattagcacgtcaaatctgttttttattgatactaattttatataagttatatgtaagtaagggcccgggcatggtcactcacactcgtgaattagcactgtgggaggccaaggcaggaggatcgcttgagggcaggagtttgagatcagcctgggaaaagacatctcttaaaaaaattaaaaaattagtcaggcatggtggtgcacacatgtagttccagctactcaggaggctgaggtgggaagatcacttaaatccaggaggtcaaggctacagtgagctatgatacaattgctccagtgcactccaacctggagacagggcaaagatcctgtccctaaaaaaaataaataaataaagaatacatatatatatataggtaaaaatgaatttatttgattttttaaaaaagatattatgtaagtagtggtataggcagatatggtaaaaaccctactaaaggcaagagcatgactgaaattgaggaaactctgaccttagtttctacttggagcagtgagactcagagcaaatactccattcttcttgtaaaggtgttcccaggcttcagacaggaacccattacacaacagccttcccggggcgtttttacccagcagaaagacttctaaccctctcagacccaatgcctcctttttatagcacattttataatctttactaccttgatagatcctttaccctcttgaaaggaaatctacagcctacttattctcataagttaaaaaaaaatcataataaggccctagcttttaatacacaagaaatacaagaaaagcaacttatgacaaataatgttttcaataagtaaatacttgggcataatcacccttgaaggcctacggatatggtctatattgcacccacatgcagaatccctgtgaatgtgacagtccagtgcagatcgatacaggtgtattatgttggaaatgcagtcaactatcataagcagtcttgccactggtaatttcctaagaaggcgaacaacttctgggaaagtcatgtccaccactccctcctctcacccacaaccccccaaaaacaacattctttccttagtttgcatagtagttacatttctgaaaagggaatacttgtattaaaactgtacaagagaacaaccactatggaaaacagtgtggagattccttaaagaactaaaagtagaatgaccatttgatccagcaatcccactcctgggtatctacccagaggaaaagaagttattatatgaaaaagatacttgcacgtgtatgtttatagtagcaccatttgcaactgcaaaaatgtggaaccaacccaaatgcccatcaattgatgaatggataaagaaactgtggtatatataaatgatggaataccactcagccataaaaaggaatgaattaatggcatttgcagcaaactggatgggattggaggcaattattctaagtgaagttactcaggaatggaaaaccaaacatcgtatgttctcactcataagtgagagctaagctatgaggatgcaaaggcgtaagaatgccacagtggactctggggactcggggaaaggatgggaagaggttgagggataaaagattacaaattgagttcaatgtatactgctcaggagatgggtgccaaaatctcccaaatcgccactaaagaaattactcatgtaaccaaataccacctgttccccaataacctatggaaataaaaatttttttaaaaattatacaaaagaatactttgtgatctccatgaatatatacatacctactatgtacccacaaaaattaatgattttaaagaaaacaaaactttgagcttacctatcagagaaatggggttaggttctaggttcagatcattataaacaggcttttcacccatatgaatacctgaccagccattgaaaaattgaaggtgatacaggacaatcctctgttgtgtagaagagccccatatactttgcgacatcccacatccctggctcccttccattaaattctgttctggccatttctatcatttgacagccaagaatgcccccccaacatttccccaatgcctcctaggaggtaatgcctcccacattgaactcataaatcccaatagcactcaaggatttatttttattttaagctatccattactatctgacatgtagtcattaagtccctttgggctttttatttatcagtgatagcttttggttccaaagtgtcttaaacgtaagagatgatggcttctaaggctattatcagtaatattctactattattacagaagtgttattgtttatggcttgttattaaccacaaagtttctcttttggcttaaagttggtaaaaataaatattgttaaaataaatttcagaaagtttggttgctcttaagaaaaacactcaagagttaggggctcctgaaaagtctgaaattcgatataattagaaatctggttactgaaaaccagatactttaaaaattaagcctctcagggctgcaaattttaacagcacagttttaaaagcagattcttggcataatgttgagggggttttgaccaagtcatgctgagaaatttgcaactgcagcattcactggggtgaacgcaaaagagaaaaaaacacattaatgaaaactttccaggatgaaagaccttaaacttagcttaacttctgaactttttgctctgctgtgatctttctgacactttgaagaatgattctggatgggctccaaatagcacactcctcactcctcattcttaaacagtgtgaaatctgtcaacccaatcaggtcatcaagagggcagactgccacttgtcattactgagaggggtgttctctaggacactgaaaatgtcgggcaggtcttgctttttaccaagagctagggcctggcattttgagaaagacacttatttccactcattgggaaagctagcttagcacccgtgtgcaaatcaagtatgccctattcaatttaccagagtgatgctttgacatcattccccttaacagaaagctgacaatcaacaatagcccacagggctttatttgcaaagatggaaagctcaaaacagttgcctcagctcaagatggaatctaattttttaaattaattctaatgcatgagacaaagaaacaatatcagttaatgagaagcatgggaactgtttgaatgcctgttcttctacttgttacacgtgttttactgagtgtcttaatcttttggtactctctttctctgcttataaacctggaataatgataggtattattagctctggttattttgttgtgagaactgggacccccccacccctgggcaaaattaccaagtggattaagttttcctttgacttttaccccttccttactcacaccattgagctaagcactagggattataggtaaataaggcataggccctgccctcaaggaactaacagtttagtgggtgagaaagacaagtaaatatgataacgcatatatggctgaagaactgctttgctgaatataattagggtggggttgctttggagcccagcacaaaacactagccaccatggggaaaagactaggaagactttccacccaatcaccttctttctcctctctctgtccctttgtcccacctttctgctccccccaaagccaccaccccatgacttcccttctgagatagaaccccaagctttagactgttccttctgcccccttccatcagaacttatccatccagcattgcctacctaattgcaaaytaattcaagctaaggcattcattgattcattaactctttctgagtgatatttgcattctgactggagctgtccttacacactctaccaatctgtattgggcatataccatgtagattcatttcaatcttttacctaaaagactgataagtggaagaaccaatccttgaacctcattctaggccaagtatccttttctcagaaatagtttcttattccatttcatcacagtctgcaggctctgcctagcttgtcagcacctgtagcagagactccgtgtacagcaataggatggtgctaagtctcatctatgtggagatgagacatataccagagagaatggagaatactgtcatggcaccatagctgctcctggaggtcccaaccccatgagggcactgcttagttatccagccacactacttgcccactagaagggcagctggaagtcccaggagagggcagagatttcctccaaccacacccctccccactccccacccgaaggccactgtttttggctcttgctgctatggaaggacaggagtgagctcccgctcttgacaggaaactctccaggagcagaagctgtaacttcctcatctttgcatcatcagcacccagcccagtgtctgagccaaagtaaaccctcagttaatgtttggagaaggggaaggaaaggaagggaagggtgagctgttgagacaatcgaggatagttcttctctttggccattctaaaagtactcagctaaatttattctaaaatgctaggtctccaccttctgcttctctctgtcccctccttcagacacagcaattaaactcttcattctgagcaatccagtgttaacctaggatgagagaaggcargagaaacctcagtgccaacagtgcacatccttttttgtgcatttctatgccccctcactttcatcccctgccagttgcatctccacaggtcccacctgagtgggtttctctgtggctttagcacggtatgtgtatattcatattttttccaatataggtgtatgtaagcttgttctcagagctctatagtttccatagtcgtaagaataaaaacatttttctgaccgaccactccatccctgccatgatgctttacctcatctggaagggtgtgcaggacccagtccattaccagaaaggatacagtctcatagagcgcaactctcaagcccatatgggattcagagggtggcgccaaaaacttcttacatttcctctcagactacctttcactggtacagaaacctcctccgatgggtgcttgaatgtctcttctctcttgatctcccttcctcattccttttctactgctctgtctcctcacctctctacctgaccacaccccctacatatataccaggtgccatcttgcctctatgccatgtggaaagaaaggcttctgactccatcaagtgtgagcggcaaagtagagcatcactttcttgagagcagagcacccgctagacaaatgatctttctttttcttgctcatattttttgctttatacagtattttaatttctaggcacttttatactaaaaccttccttacctgccacagctgaagtggaaacataagtagtgaaggggataaagagccaatcccatcaccttcctctgggtagttgaggacagaaacactcacttaaatcttcttgtatgagtccgttttcatgctactgataaagacatacccgagactgggtaatttataaagaaaaagaggtttaatggactcagttctacatggctggggagacctcacaatcatggtgggagatgaaaggcatgtcttacatggcagtggcaaaagagaagtgagagccaagtgaaaggggttcccccttatcagaccatcagatctcatgagacttatttattaccatgagaacagtatggggaaaaccaccccatgattcaattatctcccaccgggtccctcccacaacatgtgggaattatgggagctacaattcaagatgagatttgggtgaggacacagccaaaccatatccattctgtatattcaggtaccacaatgccttgcacagagcaggtgttcaatggatatttattggtggaggcttcccagtgttcatcagactacaaaaaacaaatagccaattcattcctcacctgcttccagttcatttgacaactaccaaaaaatattatatattatagccattcctaattaaaacattatgcaaaattatcaatgtaggtagagatatttagaaaacmcataaaagacatatgtgttttytagagggaaggtaagaagaaaacaatgcccatgggccatgttaagcagcaaggaaaggttttggattatgccctgacaccatgactctatcaacagatgtcccttcaggtaaaatttcaggagactataaggcttggctccaaagggttaaacacaaggcctgtatgcatccctgtgcatcctggcaggkttttttttttttttttttttttttgagccgcctgtttgcccaagtaactcccactytttcccttccccacaagctgctgctccactctatgtacacaacaaaaatatttgtcttttccaaagctgggggcactaaccaatgtctgtgaatttctttgtataataacataataatcaaatcacattaagtcagtgtcaagtgaracatgtgttttcaattttaaaacccacaagkgattatttattccttaatacttcatttgtacatttagkgagagaaataggaaagtcacacatacatagaatcgcttccaacctttgctatgaagttatttctctaggkgttttctagttattttacaagttgtctttcactattagcattacagtatttctcactctcttgttcactgataccaagtttaattttcagcctttacaactttattgatttttaaacactcgtatttatgaattacacggttagaaagaatgaataagaaatgtcctcttattggttttgttttactatactttttatgtggtaaataactcataatatgagatctaccatcttagcaaatttttaagtatatagtacagtcttgttaactgtaagtacaatgttgtacagccgacctctacaattttttcatcttgcatgactgaaactccataccccttgaacagtgatttcccatttccacttcccccagcccctagcaaccaccattctactttctgcatctatgagtttggctactttactataccttttttttaaagtaccaaaactttaaatcctttgggtgctgatacatcattttggatccctataccccagagaaaatagggtcctctgctagactgccttatgtctccactctttgccctttcctgtaaagagcaggatataatgagcagagcatcatcttcaaggtcagaaagacccaggttccatccctgctctgttacttatccattgcatgactttgggtaaattattaaacctttccaaactcatttcttcatctgtaagatgtacctattttaatatcaacttcacaatacctacttttatgaaaatcaattggatcacaaatgtaaattacctagtaggtgctcaatattttgattccatcaccccagctgcaaaccctagcctcgtatggattgaatacatggaataggagacccagtgtgtttgttctagatgaaatacatgagatatgtctttgggawccattcagacatgcaggtggacactgcagtagtcatctaaaacaattctttcttctctctgaactagttcaatgtgaaaatatayagctttccatgccctgttaatgtcttaatgaaacctgcttccttaagagtgtcctgcaccaagaatacagacatgattagtcctaaggtgccactacaatccatagagcgccgtgggcactaagagagaaatctcaatgcacaggtaaatttctcaagttctctgaggaactaaggatatttacacttaaagagttatattccaaccacatataaaaaacacataattaaatcacagaatccactccagtgaaatataattcaagcagcctttgtaacctataaagaaaaaggaattagcttccagtgctttccctttctaaagmataaagcataaagcagcatggcacatgtatacatatgtaactaacctgcacattgtgcacatgtaccctaaaacttaaagtataataataataatattaataataataaaacaagaaggggctgccaaaaaaaaaaagcataaaggttttctttctggaagtttttagagatcaaagtttctatctaggcctctaccaatgagtaaagttagtactaatctaccatcattctaaagatgcacttataatcatttaggaaaatccaacaaattcagaaaagaaatagaggttcaagttcttctacacaggggatcatccctgttatctgatgtgttagatgagtgaatcttgcttgttctggacaattacttcaattcaacaattacatggtagcacctatcatgagccagataatgtactacaatagacagaagaacagcttacacttcaataaatagtcatctcattccttcattccttctttcagtaaacaccttttcggtaagctaggcaccataataataataggtaagacatggtcctagcctaacagggtttacagcagcgtgcagcatctgccacatagcaagtgagctaagttactgcaatactaggaggagagctgaatgcctctgaccaggagcccaggaggaaatacttgaggtgggctgccgaaggacagatggcatttcaacaggtggggagaatattcaattgagaaggaatgtgggaatccagatagaaacagaaaactctgggggatgtggcataaaaacagcaaaagcagagatctgtttatctgcagggtacttttgggagataaaaatggaaaagtaagttggcctcatattgtggagggccacgaatgtcagaataaataatataaattaaggagacattgtgggggccattgaaggacttggagcagggggctgacatggtaggagttgtgcctgaggaacgaatccgttggtggtaggtgagatagattgaaagggatgactaaaggccctcagaggggttaatccaatatcctgggacagggagtaaactagcagagacactgaaaggagagaagcagttgtagtacgttatggcacacatctggaacttttgcagtcaaatttgacagtccaaacatatctcccagataaaagaccacacttgctttaaatgtatgctgagaactacagagttaatgcagcagtttttaacctctggagacttagaatcaactcaaagtttggtcacttcaatttgctcaccacaaaccgttgccctcaaaactctggatttgctgtaacatttcaaactctgagaagcggagggttcaataaaaccacattgcgcctggcatgtatttcttctttaggactgaggaaacttgatctgcttcttactaattcatttaaatttcattcaaactgggattttgaaaaacgtttcgattgcccagagaagcttaagagcttacttttaaagccttttttcccctccttacaaaaaggaaacaatagttttccaaccaaccctgaaccccggatgtcagagattcaacccattcgttgggatggagtttatggtaggcaaaaaaaaaaaaaaaaaaaaaaattgactaaaaccagcagattttgccaaaaatccgtgtgttgcatggttaaggagacaagcatttgctcctcttgaacacctacaagcgatgcagcaggggtgcagacagtcagctaggaaggagctcattctattccatgactcaaatcagccatgttggttttcccttcactgtcaagaacataaaggaaaaatggcaattgaaaaaaaaaataagcatgttaaaaaggagagtgagagaaacaatttcactctgccttaaagaagactttcctattcctccccctgctcctcccacttggtggcaatgttgaaacaaagctcttcttctagtgacagccatcaagaagtcgtgagtattttttgtacacagaagagctaatgacataaggctttaatacattctattcaagacctgagtttggagaacttaaaataacttttgagttcctttaagctcaaacagattttccaacttcaaattaaattttaagatgatggtttgctttattttggtttaggttttttctccctttcttacttttttcctctttttggtggttttattattgttgtagatgttttgttgtatgtgtttttgttttctaatagttacaactcatcttcttttctattaaaaactaagcctagcaaatgccctaaatgttaagaaatttgtttttatcttaaattgctcagaatttcaaagtcatttataatgactttgtcttaaaartatgtccacccatgtgaggaaatctccacacttgatgatgttaagggccaaataatatatttggttgtcatcagtttctacccatcattttctgaccactgagaatagacacagtaagaaataaacaaatatggcctcttatgaccactggtgatttctgaaagactgggggagtcatagtattttattttaaaaggttttctggcagctattttatgaataaatgaaactttaatgtctagagatgctaaactgtgaaagggatgatttgaatactgaagtcattacaaccaagtctaagttattaaatttgctaaaagcacgtgaaagtgaatcgaagtgtttaatacattgaagggagcactggtctcatccagagaatgacatccttagcacctcgtcaaagtccrtactgtaagttctggaaatgactcaatattgttttctacacacaacctctttaaatttttttaatttcttaaagtagtctatataaaaattatttttacagggcaactgcatcttaggctaggttacttcaatcttaaaatcctcatgtatgctttcaagaaaactgtcatcctagacaacactaaccttttaattttacagggatcctgaaccctgaactagtagaatgtgtgaaagagtgaaagagctgtgctgtaaatctgctacttctgcttcaggacactgtcaaactaattaacagtttctcctgttttttaaagctgcatattgaaaactagaatttcaccctgctttctccagagttccgcattcttgaacttagatgagagcacacacatcaggaaagtaatttaattccatcaacatgtatttcacacctacaacctgcaggactttgtggaaattcaaagaaaatttaacagaaatctggtctccaaaaccttacagcataataagaaagtcagatatgtgaataagagtgaactttgcaaccacacgaggcacaactgagtgttacagcaaaagtcaaaacaagcaaaggacaaagagggtgactagggtcaataataattgtacattgaaaaaataactaaaagagtataactggattctttgtaacagaaaggatgaatggttgaaggtatggataccccattttccatgatgtcatattacacattgcatgcccgttatcaaaacacctcatgtaccccataaatatgtatatacctactatgtacccacaaaaattaaaaataaaacaattataagaagtgaaaataaaataaataatgaaaaaaaaaaaaagcaaaggacagtggcagtggcaagagggcctggaccctggaactccattttgaggttgactcagaaaatgattacaatgtgtatgtataagttttagcatctccacttaacaaattggcttattgttcaaaaagagcatttaacagtgatatttctgtaaatgaagagaatttattccaatttaatcaacaaattttttactgtttccattacatgtaagattattatacactagataccaggggtcagaaaggytgattaaatggtttctgactttggggtgtaatagttgttcaccaataactgtagtacaagacatatgaaaaatcctgtaacagttgggtgtagtggtacatatgtataatcccagctaccctggaggctgaggcaggaggactgtttttagggcaggagtttgaggttgtagtacactatgattgcacacctgtgaacagccaccacactccagcctgggcagcatagcaagactgtcacttaaaaaaaaaattcctataaaaggaagataaacaaagcctatgaatagccactaaccaagcaagaaattttattagaattactagctcaataattatcaaagtagggcttaataacacattattaagaggttcagttggactgatgctcgaaagtgctaatattaggtttatgtagttggatctccaygggtgcttaacagtcagctctgctcacttaaacacaaaggctttctttgttctcagtatcaccctagctacttctgcaccagttagtcactactcgacttctggaaacagttgacatagacctatttcagggaaccagatatacagttgacagaaacagccttataatatggatatatttacagctttcttaaatctcagatatttattctagatttaaggtttctcctggtaccaaaattaatcagcccctatacagagactattccataaagaaggtactcaaaaatgaaaataatttttattaacatatttttgcatttaagccaaccccaacttgtaaaatttaacaattactgtaccagcagtgccaatacaaactttgtattcctaaaattagcaccaaagtagtgcaaaaatgtgttaatatgtagatatctgtgatatttacaaaagaaaagtgaaaagaaaatgaatttcacagttcgggtcaatgctcacatggattaggcaatgaaacattctggaacacctttttataactattccaaatgagaatttggaaaccataaaacaataaaatccaaacaaaggtgcattaggataactgtaaatgcctttaagtaatgatttgtaaaattgtatragggtcttaartaaacctagcattttattaccaggcacactgttaacattccccagatttttacaagaggaatttagcgagctatctgtaagatttagcttagctaatcatttacgtttctacccagaaatacatatcaatacattatcaaagtaaatatggtagctatgcactgggagtccttttggaaacaaatatatcagatctttatcaataattgattaacacatttaaatacttcaaaaaccaggaccttgtactattatacagagggtgctttattcagattgttatatgaatttttttcctcccatcttcagcttcttatatcttcgtttttctttatctcacaaaacacaaattgctccctaaataacactcgataagttattaatgttagtttaaataaacttattttttcttggattgttgcacgttcttcccctttagaaagctaccttgaggattttttttctggttagctttatgtatgtcctcaaataagaaagttaagtgctattgttttcgcaaatggctatgtagcattggttctgaatcatttgcttgttaattaaaggataacccagatagaagttaaacggagtagtcatggcctgccttgctattttagaaaatattggccaccagttaacactgcaacttgtcagatatctacttgcccatctgagagggcaggtttgaaagtacacaaataaagaatacacatcatgatgaccaattcattcaaaaactttgaacatttttagggggaaagacattatatgctacatgttttaacctacaaggcatcatagaaaattaactatgaaaagatttgttggctagctttatttaattactggatttttttgttgttttttattatactttaagttttagggtacatgtgcacgatgtgcaggtttgttacatatgtatacatgtgccatgttggtgtgctgcacccattaactcatcatttaacattaggcatatctcctaatgctatccctcccccttcccccgacgccacaacaggccccagtgtgtgatgttcgccctcctgtgtccatgtgttctcattgttcaattcccacctatgagtgagaacatgcagtgtttggtcttttgtccttgcaatagtttgctgagaatgatggtttccagcttcatccatgtccctacaaaggacatgaactcatcactttttatggctgcatagtattccgtggtgtatatgtgccacattttcttaatccagtctatcattgttggacatttgggttggttccaagtctttgctattgtgaatagtgcctcagtaaacatacgtgtgcatgtgtctttagagcagcatgatttataatcctttgggtatrtacccggtaatgggatggctgggtcaaatggtatttctagttctagatccttgaggaatcgccacactgacttccacaatggttgaactagtttacagtcccaccaacagtgtaaaagtgttcctatttctccacatcctctccagtacctgttgtttcctgactttttaactatcgccattctaactggtgtgagatggtatctcattgtggttttgatttgcatttctctgatggccagtgatgaygagcattttttcacgtgtcttttggctgcataaatgtcttcttttgagaagtgtctgttcatatccttcgcccacttgttgatggggttgtttgtttttttcttgtaaatttgttggagttcattgtagattctggatattagccctttgtcagatgagtagattgcaaaaattttctcccattctgtaggttgcctgttcactctgatggtagtttcttttgttgtgcagaagctctttagtttaattagatcccattggtcaattttggcttttgttgccattgcttttggtgttttagacatgaagttcttgcccatgcctatgtcctgaatggtaatgcctaggttttcttctagggtttttatggttttaggtctaacatttaagtctttaatccatcttgaattgatttttgtataaggtgtaaggaagggatccagtttcagctttctacatatggctagccagttttcccagtagcatttattaaatagggaatcgtttccccatttcttgtttttgtcaggtttgtcaaagaccagagagttgtagatacgcagcattatttctgagggctctgttctgttccattggtctgtatctctgttttggtaccagtaccatgctgttttggttactgtagccttgcagtatagtttgaagtcaggtagcatgatgcctccagctttgttcttttggcttaggattgacttggtaatgcaggctcttttttggttccatatgaactttaaagtagttttttccaattctatgaagaaagtcattggtagcttgatggcaatggcattgaatctataaattaccttggcagtatggccattttcacratattgattcytcctacccttgagcatggaatgttcttccattgtttgtatcctcttttatttcattgagcagtggtttgtagttctccttgaagaggtccttcacatcccttgtaagttggattcctaggtattttgttctckttgaagcaattgtgaatgggagttcactcatgatttggctgtttgtctgttattggtgtataagaatgcttgtgatttttgctcattgattttgtatcctgagactttgctgaagttgcctatcagcttaaggagactttgggctgagacaatggggttttctagatatacaatcatgtcrtctgcaaacagggacaatttgacttcctcttttcctgattgaataccctttatttccttctcctgcctgattgtcctggccagaacttccaacactatgttgaataggagtggtgagagagggcatccctgtattgtgccagttttcaaagggaatgcttccagtttttgcccattcagtatgatattagctgtgggtttgtcatagatagctcttattattttgagatacgtcccatcagtacctaatttattgagagtttttagcatgaagggttgttgaattttgtcaaaggccttttctgcgtctattgagataatcatgtagtttttgtctttggttctgtttatatgctggattacctttattgatttgcgtatgttgaaccagccttgcatcccagggatgaagcccacttgatcatggtggataagctttttgatgtgctgctggattgggtttgccagtattttattgaggatacttgcattgatgttcatcaggdatattggtctaaaattctccttttttgttgtgtctctgccaggctttggtatcaggatgatgctggcctcataaaatgagttagggaggattccctctttttctattgattggaatagtttcagaaggaatggtaccagctcctccttgtacctgtggtagaatttggctgtgaatccatctggtcctggactttttktggtttgtaagctattaattattgcctcaatttcagatcctgttattggtctattcagagattcaacttcttcctggtttagtcttgagagggtgtatgtgtcgaggaatttatccatttcttctagattttctagtttatttgcgtacaggtgtttagtattctctgatggtagtttgtatttctgtgggatcggtgctgatatcccctttatcattttttgattgcgtctatttgattcttctctcttattcgtcttgcgagcagtctatcaattttgttgatcttttcaaaaaaccagcttctggattcattgattttttgaagggttttttgtatctctgtttccttcagttctgctctgatcttagttatttcttgccttctgctagcttttgcgtgtgtttgctcttgcttctctagttcttttaattgtgatgttagggtatcagttttagatctttcctgctttctcttgtgggcatttagtgctataaatttccctctacacactgctttgactgtgtcccagagattctggtatgttgtgtctttgttctcactggtttcaaagaacatctttatttctgccttcatttcgttatgtacccagtagtcattcaggagcaggttgttcagtttccatgtagttgagcagtttggagtgagtttcttaatcctgagttctagtttgattgcactgtggtctgagagacagtttgttataatttctgttcttttacatttgctgaggagtgctttacttccaagtatgtggtgaattttggaataggtgtggtgtggtgctgagaagaatgtatattctgttgatttggggtggagagttctgtagatgtctattaggtcctcttggtgcagagctgagttcagttcctggatatccttgttaactttctgtctcgctgatctaatgttgacagtggggtgttaaagtctcccattattattgtgtgggagcctaagtctctttgtaggtcactaaggacttgctttatgaatctgggtgctcctgtattgggtgcatatatatttaggatagttagctcttcttgttgaattgatccctttaccattatgtaatggctttctttgtctcttttgatctttgctggtttaaagtcttttttatcagagactaggattgcaacccctgcctttttttgttttccattttcttggtagatcttcctccatccctttattttgagcctatgtgtgtctctgcacatgagatgggtttcctgaatacagcacactgataggtcttgactctttatccaatttgccagtctgtgtcttttaattggagcatttagcctatttacatttaaggttaatattgttatgtgtgaatttgatcctgtcattatgatgttagctggttattttgcccgttagttgatgcagtttcttcctaccctcaatgatctttacaatttggcatgtttttgcagtggctggtactggttgttcctttccatgtttagtgcttccttcaggagctcttttagggcaggcctggtggtgacaaaatctctcagcatttgcttgtctgtaaagtatttaattactggggttttttaaacaccatctgagtttatgtttcaaagactggcccaatatggtagctcacacttataatcccagtatttatggtaggcctaggcaggaggatcacttaagcccaggatcatcagccctggcaacacagtgatacccccatgtctattatattttttttatttaaaaaaaaaatgcaagacaggctagagkcaggggaatgaggcactagccttacttaaaatttaggggaataccaaataacttggtgatcacagtgtatcatatcttaatgtaatatttttaaaaatcaaaattaaaaccaaaaaaagtcatgagaaacaatatatcaaaaatttaaataaagatccaaagaggtctgcattctgtcatgttgctgaactaatgttactattattcatttgactctaggtgaaraaaaataggtaaggaatcatgctgttttcttctttgttgtaaagataaaaacagatctaaacttaatatctccagctcatggcatcattagtttagtaatattttagtcaaagttagtgaatagtaaccattatttcctatcatctacacttaggatatgtcacttaatttcaatgtcattatcttaactatgaatcttcctaaagtactacactacttggaaaactaaagggaagtttaagaagtaatccatcatttcaatttgctacatttgtggcatatttccatcattcagggctattttacttgcttctgagtttattatataaatataggtatactctcagctacataagacattttcttttagtattttgagatgggggaattttaaagaatatgaaaaaaaggaaaagatcatctatattttcttttagattttccttatacgtaacataggaataatttatttattgaataattgatttcattctatatagagctatcactacatttctttactttcctatgtagcaaaactccttaaaagagtggtctacacttgatattgtttcaaacttcttcttcacattttttctcttcttaaattttttatcataaaataacttcaatttatcaaaaatctgcaagaatactcatatactctttctcyatatgcaccatttgttatattttgcaatctttgccttactgcacacatttttgcttaacactttattgtacatatgctactttatcactaaatatttcagcatgtattttctaagaatgaaggcattcttttgtaaccmcacttcaattatcagacattcaaataatgtgtttggggtatttctggacaatcactgtgatgtcaacattcaagttttgaaaggcacatgtgaaatgagtattaaaatatttataaatactgtctcatgcataaatccatatccaaaattgtgctaataatgtcatttatgacattttttctgatacagaatccagttaagggtcatgcattgcatttagtgcactgtctctggtattcattattatgaaacaatacctaaggctgtctttgtctttcatgatattgacattttttaagagagcacaggctgattgttttgtgaagtgtccttcaacaattttttctaatgtttcctctttattagaatcagatgtgcatttggggcaggaacacaatatgtgtgaggttgtatcctcagtgcattacattaggaagagcatgatgtcagtttctggtggcattaactwgggttacttagggaagatgatgccccctccacatttttccactaaaaactacccatttttttcttctccaattaataagtcttctgtgggtaaatgctttgatattgggtaattaccccattgctttttaaacwttcatttaataattttagtatccattaatgattctggcctgaatcagtcattaccatatcggctgcaaaatggtaattttccagctctattatttcttctacatttatcagttggcacattctacaaggaagagatttcacttttccttattyatttacttatttaccttatcacctgtatgaactcattggttcttacttcagccaatggtttataatccattctttcgttattcattttgagactcaaatttcccgtattttctcagagagatcccttgatgttgtcacttctgtcatttttaaatgattccatcattttttgagctcccccttattctctagtataacaaggtgctacagttcatctgatacattttccatccctgccctagaattggccatttcaccaagataaatctggttcctattagcaaaaagtcctatttaaaaaccagaatctgggtgctagaagtgctcgttgctacttctaggcacttctagagtgttgctgcttctaggcacacaatacaatgtgctcaagtactgtgaatagttcatggccaactctcagtcttcatggtacctgacccattagcagcatttaattttaatgatcgcatcttcctcccagcaatacaatcttcatgaagcttctaggaaatgatgctctcttggctttcctctgtccttatggaatacttcccagtcctctttaattttccctacttttctctaaacccatctaaagtcaaggtagagtctagaactcaggactttttgatccttttctcatctgtatctatacttactccctaggtaatgtcatctgacaactttcaagtttttatctcaagcccagtcttctccctcaagctctggattttatatccatttatttctacttagcaccttcacctgaatctctgatagatgtctaaatacaacatgtgtaaaaytgaaccactccagacctggtccacctatagcctgcccttgaattatgcctttgcaagcataatgcagcctaaataacaaactgattttggtcactcactgccatcagggagcacccattgtttcctctgcctctgccatctgttrtgatttttgagttccacagaggaaagggggagatgggagaaggtaggacagaagcccaaattactttacatatgagccgtacatttcctactagactgttaaactgactctacattcaaaattggcagcagacgtcactaatgtggccttagagtgattcatataatttcagctgagataagaaatatcttgacagacattcaaataatgtgtttggggtatttctggacaatcactgtgatgtcaacactcaagttttgaaaggcacatgtgaaatgagtattaaaatatctctactggcaagattagatttttatggcaaccagtaagagagaatacaccattagaaagtaaacactctctgcttcttctcaggggcatccaggtcactttttgtgcaagattattgattcctttgccaattatgttcctggaatattagaaaccatttcctcatgtgtaaactggtgtatttacaaccctcctaattcaggtggaaaaattcatcatacaagtaacagtgtgggatgagaacttggcctaaatgtttgagtctcaattctgctgtagtagaaaaagaataactgctcatttcaaatgcaggcagaagtgtgtgaatttcacttagcataccagcatcattaacaagaaaatgaaattcttaattcatatatttcatggccttccaaaattacattctgaaacaccttgacattttagtaaatgtaatatataagaaatactagttaggccgggtgcagtggctctctcctataatcccagcactttgggaggctcaagacgagcctgggcaacatggcaaaaacttgtctccacaaaaaatataaatattagctaggcatggtggcacatgcctgtagtagcatctactcaggagggtgaggcgggaggatcgcttgagcccaggaggcagaggttgaagtgagccaagattgcaccactgcactccagactggatgacagtgtgagacccagtctcaaaaaataaataagtaaaaatwaaaaaaaaaacaaatatcaggtatgttcatgaaacatttcaaatgtagagttcaatagaccatatttttaaaagtatagaaagcatcttttaaatttctcttcttttaatgcatttatttttacagagtggagaaaattggctctcttttaaatatataaatttcttgacttgatgactttccacaggtacaacatactcaggggagattggcaccaagaaaaaggtgaaaagactattaagctttcaaagatacttccatgcatcaaggctgcttcgtggaattataccacaagcccctctgcacctgctggatgaagactaccttggacaagcaagggtaagctgactgccccatctcctcacagcaggccagtggccaagagcatgtgcctcagctgatagcactggtgttggagtcctactctgcctctgaggagctctgtgaccctgagctcattattccatacatctggacttgttcctctaatagaaaatgaaattaacagaaacatcccccttatgaggtgcacgaagtaaaccatgtttatgtgctgaatatacccatgcctaacacatactagccattttcatttttataaaggtacaaaacatatttgcacgatactaagtaaagcaaaattttggactggcagattactaatgagggaataactaatttttttaatttattaaattagctcatcgtaacagctacactaaaaataacccaatcactatcaactcttaattctactttaggctattgatgcactgcattttccttttcataatttttaattcatttgaataaattttaataactctacaattactttagtaatacattgatctgactgagggtggaaattaatgtgtgaccatctgaaaaaagtgttcaggttatgtctaccccaaactgccaaaggaatttaaatttcagcaataaatgccccagtttaaacagaagtcgaagatagattttacagcttgcatgctaagtgatattatactatttatatactattatgaaatatataccactggcaaagcacagtgcctcatgcctgtaaatcccagtactttgagaggctgaggcagcaggattgcttaagctcaggaggttgaggctgcagtgaggtatgatgatgctactgtactccagcctggggtacagagtgagaccaggtctcaaaaagaaagaaggaaagaaaagaaaagaaagaaggaaaggaaagaaagaaggaaaggaaaaagaaggaaaggaaagggagagaggagggtgggagggagggagggaaggaaggaaggcaggcaggcaggcaggcaggcaggcaactaatatatgccgttagaaaatgaacagcaagtaatgtcaaaagagctaattcccaatattaggcctccaaaaggataaaaaaatcattcctaacagcttaaggtctgagattgggaaatttttgaatgtttgcttgtttgttgagaggagaacaagccttaacttccccagccctggaatgtcactgacagagcactcttggcggtgtctctcctctaagcagccacctctcaagaaaggtggtgtgagatgtggaaaggacagagggctggaagtccagctatcacaggccaagtcctagggctgtctttaatattgtgtgagttaggtaaaagtctcacgcaatctaaacctcaaaaataacctaatatcccttcatttttckgacgtgttgtgacggtctttttgtgtcacgctgaggcatttggattttattgtaggacatagggaaaccattcatttgcactagatggtagtatgctaggattttcaactttttaattgtttaatccactatatcccaaagtaaatgtttgagtctccagtgtgattcatttgcgtgctgttttttgtttgccttttcagcatatgctctccaaagtgggaatgtgggattttgacattttcttgtttgatcgcttgacaaatggtaagttacccaaaagaattctcactaaaatatacaccataaagtgggattaatttcatgaaaaacaaaatttatttttaaacactgctattcctttttccttctttccccattttcataaacctacagctactgaagaaggaccggggtaagggaaaatcaactcagatgaaaaataaggactgaatttgaccttagaatsttaggacagtttccttgtgaccttgatcatcccagaggaatttagaaaccacagattagattcttttcttgcagaatattttggccacatccagaagtaaggagttcattgttagttgatgaaaactagaaacaaaagcacatctgatcagccctgacttttacagggcagggtgcttatgcagttttattaagtgagctaaatctgccctgttgcgggtattgctcaaatgtgtttgacatcatcagaagaaaacaattgccgaggaaagaatataaaagcttaggctgcagccaaagggaaaagcaaacatcttcactggtgtcacttcttaagtttttgtgcctataaagaccttccttaagaaaataataaaaaacctattatatttttatctggccattaaacaaatgctgatgagctttgagagccaatgaaagacatcacatttaatgctgatgttgataggtctcttttaagtcattatatatggttttctcatcattctattacttggcaaacaatatgcagttgagagaaatatagcctaagaccacgaaatggacctttacagtgtggaaagaaaactagatcatggagagaagaatcccataattttgcatgtcattttgttcaaatcaactgagaaacgggtactggtaaactaagttacctgtgaacaaaagaacttgttcaatggtatttgtttaaaagagaatataatcatgaccctcatagacatatgaaatgaccacatgacagagattttctttaactcaattaattagagatccagtaagatgctacaactagttcaaaggagaagtcaaagagcctcacaagtatatgaagtatataccacacatatctaagaaatgctgaaattgatttataagtagccgcaaaatcgacagggggaaataaattgtatttccacctaactgatttcatttcctgtatgttttcttccagtagtttcatagtttcaggtctcatgtgtaagtcttaaattcatttagtgttgatttttgtatatggtgagagatgagggtctaatttaattcttctgcatgtggatatcccactttcccagcaccayttattgaagagactatcctttccccaatgtgtttttggtgcctttgtcaaacattagttggctgcagaagcatgaatttatttctgggttctctattctgttccattggcctcattgyctgtgcttttaaaattcaaaatcattattcctaaataaacagtatttcttgaatgcttacaagtcattacagcttcaattttgcatctctgccgacttgaattctaaaatagctcatagtcagatctcctcttgagtgattttccataggaagaagaataggctgtgactatcaagcaatatggtggtttagatacacctgtaaatggaatagtcaattggaagtgacttaaggaacatttcaagtggccataagctctgtctttaaaaaaatacacatatacacatgtgtgtgtgtgtgtgtgtgtgtgtgtgtatgtgtatgtatccctgacacctcagtaggcagattctttctaactcttaatgtcttcattgtctttggtgaagggagaaggtctgagctaattttacttgtacaataagaaaaaacctaggatcagatcatagtaataatatgctctatccttgaataatttcacttctaaaggggaaaaaaatattctatcacagaaactttattacagagactttaggtcttattgtcaatcttgatattttagtggtgatcaaaattagttaaaggaagtgactgttttcctgcaggaaacagcctggtaacactgttgtgccacctcttcaatacccatggactcattcaccatttcaagttagatatggtgaccttacaccgatttttaggtaagtcctttttttcacatttctagccccattctcttgaataatrgcaatgcataatactctttaatataaagtggtaagatccataggatgatagatgcagacctccaattaatcttaaatggtctcatcttacttttaaaatatggcttgttcatcctaaatcatttaaaaattgtttacttgattacagttgatcccaaacacttgggggttaggggtgctaaccccctgtgtagtcaaaaaatctgtgtatagcttttgactctcaaaaacctaactactaatagcttactactgttgactggaagccttaccaataataaacagttaattaacacatactttttatgttctttgtattatgtattgtattcttataataaagtaagatagagaaaagaaaatgttcttttaaaaattacagggaatcctagcactttgggaggcgggcgtatcacaaggtcaggagttcgagaccagcctggccagcacagtgaaaccctgtctctactaaaaatacaaatcacaaggtcaggagttcgagaccagcctggccagcacagtgaaaccctgtctctactaaaaatacaaaaaaaaaaaattagccaggcttgttggcaggtgcctgtaatcccagctacttgggaggctgaggcagggagaatcacttgaacccgggaggtggaggttgcagtgagccgagattgcgccactgcactccagcctgggcgacagtgcaagactctgtcttaaaaataaataaataaataaataaatgacagggaagagaaaatgtatttcctattcatcaagtggatgtggatcatcataaagctcttcatccttgtcatcttcacactgagtaggctgaggaagaagaggaagaggaggggttggtcttcctgtctcagggtggccaaggcagaaagaatctgagtacaagtggactcacgtggtttaaacccatgttctcaagggtcaagtgtagttatgtttataataaattrtatataaagaaaaccatcaggaacataccgttttcaaagaagatactggtctgctgacatattaacaaacctccagcagcatgcgcctcaaataattttaatcaggacatgagttgttgaaaattttcaataggctttttaaaaaataataataactaccatttatgtagtgcccactatgagcagagtacttttggcaagttatttctaaccatttaaacaaatctgcaagtaggatattattatcaccatttgtcccatagtttaggagaggtacaaagaggtttcattacttgcccaaggccaacagctagtaagtggcagaatatgagcccaagcctagctctgtcgacttgggagtccaccatctttccactgaactccatcattactctgtatcaaaaggcagcctcagttcttatttaaatgtgtgcatattcttatttatctgccagtgaatttttcaggggacatttctaatcaccaaatgactttcctctgccatttacatgtttctggcttctttttgacttgccacatggctgtactttgattttggaggctgacttaatgccatcagaagaaaataacaggcgtgacaataataatgggagccacaaccaggtttctatggtgcttacatctgctggaagctcttccaaggacctgcatatattaataaacacatttaatccttactccactttgagctcagagctattgctatccccattttacagaggaggaaactgagggaacttgcagttaagtaacttgcccaatacagacattaaagtgatagagggtttaaatataattgtcaaatatacctgctgaataaaaagtatgtgcaacacaacagaaatatttgaaaccagccacaacatggctaatttccagaaatccaaataacctcaagctgattgtatttcaattgattgagcaaagaaatggccatgcatagggccaaataattttgatttgtctgaaaagggagatacagatatagatactttggacacgtgtatctacccagaaaatatataaagaatacaaagacttgacaacagaattaacactgtaatccagagccagattcatagcaatgggctgagagaatctggccacacttgcaaatcaggacagtctatacacactgaatatattgcatcctaagcatcgccttggttatgagctgaagcaggttagcgtcttccataaaaagcaaaccaaaatcgccttgcctgtgtctctacttggttccaagagtactctaagccttacattagactgcaggagcatgaaagatgatactctaacttgaataaggtagaaataaatccaagaagtccacagttggatcaaggcaataccctgaatctctgccctaagaggcccggatttgctttcattggtatttgttattcaagtgttaaaccagtctttggatatcagtattcwgatgctacttgggctctttgaaggaaacctcatttgtggcatattatttataaacagcagaaactcaattaaactatagtgtgagataaagttgtgcttttcctacatatttatttttcctatgaatgacagcctttatgaatgtcagaaaggggggatttatgaaggaggtgagaaatcccaacgcttcacaaatccttttggcctttctcccctctgctgtccatctctgctctctgctaaaaacagcctagcagaactgccaagcttgcaaaccacgtttatttttaaagcatctctatgctgcacattttggaggcactgatatttttaagcaaaaagcacccacagtaagtctaagctagtataccactcctatttgggttttagttgattgagttatctgtttacctcccagtcatggttcaagaagattaccacagccaaaacccgtatcacaatgctgttcacgcagccgacgtcacccaggccatgcactgctacctgaaagagccaaaggtaagacaagacccagctgcctcctcagccacctggaaatgccaaggaaactacctgctaggcccaagttacccaacatatctgagtaactatgttatgtgtcattaacaatgtgaacacaaattattgatattaaggttccagtatcagctctgaaaatcttacaatgttcacgaaaaaggatgagactcatctgaggttttctttcatattttgtatatttttgaggctgtatttggacaaaaaaaaaaaaaaaaacttcctytctatggcaatctacatcttagataccttcaacagtccatagaactagctccgtgccttagatctttgccacaaacagcaccagcattgaactttgttgggaaaagtctcctactgcatgagttttgatcaacaaatggaatcaaakctcctcaagtctgatgttctatttcctactgaaccaactggatatcccgattcagggcccaagaaaacttgtgaatgtcaaagacctcttagcaagcatgttctgatgcaataaaccaacccaaagttaaaaattaaaaacattgtaataatgctcaatactcaacattcaggcagtccttagactgaaagtctgttggtacaaggtacaggatgagttttcttaaggtttctggaaaattatattctaagactgttgagttcaatctgtttttaacatccccctacatatgcggatgctttgacagcaacaactaaatattcagatgtcaaacaggcactctcagggcaaagctgggtgggtgcctcatccctgcaacatatcccaaggacattaatggctctgttttttaatttccaagtagtctaaacattgtactatgtcatacagttgtatttttaaagttagtattggattcccgtgtctctgcttattttcctagctaaccagaaaatcacagattctcatacattctcccactatttattacacattgaaaaaaatgcagatcttgcaagtcggcccacttctttcaaagtggcaaagatatattagacagttgaaatacacaaatgatttttaagtaggtccatcatgtgaccaacttttttcttcatttacacatttctctaggagcaaggctgatttcaggccctgtcttctacctatccacccaacagcactgttgccaaccagcaatgccatcacaacaacaaaacaaaacagagtggaataggaagaaggggataccagaataatctacacartttgagtttacccaatattttccacacagtcctttcctttttgcctgtgatttcatgtgactatcacctcatttaatgcttcaaagggtaaaggtctggctgataggcttaaacaatgccatgatgattcattgtgtttgatttagccaaaatgattatgagcctatttgtgaaaatacaccaatcaatctcccaatttgtttttttaacagcttgccagcttcctcacrcctctggacatcatgcttggactgctggctgcagcagcacacgatgtggaccacccaggggtgaaccagccatttttgataaaaactaaccaccatcttgcaaacctatatcaggtaagggagcccaacctggagccagccacagtatggtcaatcgccttaggcccggtgctcaagcctgaatcttgcccatggagaaagccttgttttagggtcctagaagttcaaagacgaatgaaacacaatctctgccctcaaaaatttgttcaaactcagatgctcaaaatgagcaaaatccaagcaaacttaatcccagtttgaaagaggtttgaggaattagctcatgtcgatacaattgttttttaaaatctctaaagagtaaatacttgtgctgttctttgtatccaaagaccttactagaataaagtgagccgctgtttttcttttcccatcagtaaatttattctctaattctctggccttgtccctgtaaggaaagagaagagagaatgatccaagtgtgtgtgtgtgtgtgtgtgtgtgtgtgtgtgtgtgtgttttcagaaacagggtcttgctttctcacccaggctggagtgcaatagtgcaatcatagctcactgcagcctggaattcctgagctcaaacaatccctccacctcagcctccctagtagctcagactacaggcacgtgccgccacacctgactaattctgtttttcatagggacaaggtctcactatgttgcccaggctagtctcgaactcctggcctcaagtgatcatcccacctcagcctaccaaaacactaggattactggcatgagccacctgggactacaggcatgagctaccatgcccgaccgagaaggatctctttgattatgactagggagaaattggggtataggtctagggaccacattcaggatactacctatatcagtcacctgttcaactggtcttaggatctcttggaggctatagatccatgtcttttaagatttagggacaaagttgaaggcaaagcaatatcacatagtaccatacagatatcttcagtgtcctatagctggytagaaaaaaagctgaaacttttcttagccaaattggtgcttgtcaatactgaaaataaaaattgtttaaaaggacttgaaaataataggaaacttcaattttgtcaaaaaattgtgatccctttatttttggctatataccatcactattaactatactaaggaacatcaaaaagatgaaaaaaatttcttttaaaaagttcagttcaacaaactgtttaactaacctttattcaacacttactatgacccaaacactgtgccaaatgcctttgatgtagtatattattaatcttcacaatagcccagtgaggtgagtactattatcatacctattttccacagaaagaagaattgatacttgggaaatttaagtgtttttcctgaaaataaacagataattaatagaactggaattagaactcaactttttggtttccagagccaaagtgcctaagaactatgcatcctgcctctgaaattcatattgatcacctaccgtgtaccagaaactaacagctctcctacaatgctcctattgtagtaaggcagacaagagggttctagaaagtgatcgaggcctggygcagtggttcacacctgtaatctcagcactttgggaggctgaggcaggcggatcacttgaggtcagtagttggacagcctggccaacacggtgaaaccccgtcyctactaaaaatacaaaaattagctgggcatcgtggcacatgcttgtaatcccagctacttgggaggctgagacaggagaatcacttgaaccctggaggcagaggttgaagtgagccaagatggcgccactgcactccagcctgggcaamagagggagactccgtctcaaagaaaaagcaaaggaaagaaaagataagtgatctaaagtgtgagaggcttgatagatactttaaagtatttagctacaaacaaatgtgatgggaagatgggggaaggagaaactgattctgcagatagttgcagcgggaaaaaaaagaacatagaaaaagaatgctataaactgggccttaaagtgtgagtaacattaatagctgagatgaaaagagggcattagagtcaggatgagctgatgtacttttgggattaaattccacaactccagaataactgaaaatggaatgtccggtggcctttagctgagtatggtcctgccatctacagctccgtctctgatcagtgtgttgtgcatatcatgattcagtgcatacgctctcttttgtagtaacttcagattagttgtacaggacatgacctggatcaagaaatctttactctgcattaagttatagatgaggaactggcagaratcttcaagttttcagtatcaaaggaaaaaatcacgttacataatatataagctgagcaaacccattaacgacacatggtatttaaaaatctttggaaatgtagccttttagcctctcaagggcccgtttgctgagacacaaatgggctttcagggagctatttgcaaattttcataggatgtttgcatgcacattttcctagggagagggtctataagttactcttatcaaattttaaaataagttgcagattctgaaaatgttaagaaccatggtaatgaatgaaaaaaatatatgtacatatacgcacaaaaattatgcatgcgcacatgcacatttggtcaacaagaataccgtagagaggatgtgccaggaattatgtggcttggggaacaccctgtgcgtgactttgccacaatccagacttactataaatgagataaaatggaagagggcttcctctccctccttctgttggctgtgctcttttagttctaataaataagaggatcattgcataacatccagcctgttattctaccctgagataaagagagagcagggcagctggagtgaaggccaggtcagagggctccctcccatggtctgttctctgggccggactcactcgctgaactgccaaccaagttcaatatgaaggcactgaaggcacttctacttggcacctctctcatcagactggaagcagtccaggtgtccagggtggactgggaggaaaaacagcatgtgagaaatagaaccaagaatttactttctgttccttcaccctccaaccccacacatacaaatttaatggtgggcttagcaactgtgcaaagtaagcattaagttacatacaacgttggtgattataaattgtaaaggaataactttcagttcaattttaaattcaactcctttcaatagagtccaacaacatggactctatcatttactcatgacacagcatccttaaaataatgactttaaaaaattgtcccataaacatttattacactctataatgtcttgcagaagtttataatcagctttcttagtcatttatcacaagcacttagaggggggtcagcattttgaaccacttgttattcttaatgagtctgaatcacaaacatgaagttgacccagccaggaggaatattccttccacgtggtcctatgaccccaccccgtcctcaaacaaacatctgcaaagactaacataagctcacaatttctacagtatgaaaggtgtttttggaaagtagtgctaaaattataaaaggagcctcaaatttgactttctgttccataaagtttctgccatccccaatctgaaccccagccttccctgcagacagcaattggcatccccgctcccttctctcagctatcttaggcagatgcagaacaaacaagagaaagacatcttcaaacaggcattaaacaaggcagtgctatcgtttcttcaagggccaaggtcttgtttagggctcaaggagcttctattccactgagacctcctaggctggggctctcatagtgttaccaaggagaccattggcttgttagggaagaactcagcagcctccattatctcctaaagtcttgcaccttgtttcatgagcaattaaaaatgaaaacacagacaatgttcctgttgtttttctttctgtatcctccggatttaaaatgttcaattaactctggttcctggtaccccagattcagtttatcatcatcatttgaagtattttaatcaaagaaagtgtccaacaaatagaggaaaaaaacagtttaaatctgccttgtatgatagcaactctgctctgccagattctgtttgccaaataccctcttgacttaatttgaaaacctgtgttggtggtgtattaaagaccaggtgtgctattagcaaacaaagggattgttttgtttttagggtgaaaaatacttgataattcaggcacaaagggaaacgaaggttttgccttagaagttggaagggttttgtttttttcaaattaaagttctaataggttttgttgtcacaaaggtagatgcttactccttcaactttaagatgaagattactcttaaaactgcaagtaggaagggtttgagccactagaacacattgtcatcaggataatgtgaaattactgaaccgatacttcttaaagatagacagacatrgtacctgatgtggtattctagaaccggttagggtttcaaaggatattaaatggtatcctctcaccacatgtttagatctccatgaccatttctgatgcttttcttctttttctcagtctacctttggttgatacgagtcactgagcctctgtgaaagatgagtctgtaggagtagagctgctttttgctagggaggatacagcattcttatctctggcaaktcactaagaaaccccagtgtatgcaagcctgctcgccaccctttgcctctcccctaggttcagggcacaccagcatcatcctctcatccacctactctcagccttgcctggtttcagccctttttccactatgaagacagaaagagtttcctgaaactcaaatctgaccacatcgattcctgcttaaaaccctaccatgcctcaggattgagtccaaatgacttaacacaatttaccatccccgttctgatctgacccctgccagtccttccagcctcacttcccaccattcccctcccaggcttctatgcattgaggctgaacttccagtttcccaaacatatcactcaattctttatccattcagcagatacatacggagtgctgaatacatgctaggtgcaggagtatagaagatgaacaaaacaaataaaaaagtctgcttttttctaagggaaacagaaaataagtaaaatatgtcctctattagaaagtgataattcatagataaaaacaaaacaagataaagatataaagtatccctcttgcttacagatcttcacacccatgctcttccttctgcctatttgaataaaatgtagtattccatggtatattttactcaaatataatatacaatagagtatgttgtctgtactctctaattcctctcttacttgctcatccttttgatctaaatttggacatatttccctcctgaaagtcttctttttctctaaaaatccatcttacaagcccctcctatgagattttccagtactctcttacttcccttatcacagtatgtgtcactcgaatcgctrttgcctgattagatgtccacttcccagacagatagtacatttttggtcacctaactcattcactgtgatatcctcaataccgagaacagttctgatgtccagggaatatttaatagcttctcctgcttattattgcagtcttactaagaatacacagagagtacaccatgcagaaggagtagcaatgattaaaaattcttggaatgatcttctcattgcatcttggaattgacaaatgcaagctgatacatgttatttcttgagtcctttacctaatcttggttgtctgcraatgagtagtgggagggaacccattgcagtaataattttaaaatttctttggattttacctaagtctaaggatttcactacacaagatcctaaatctggcttctatcagatattgaccaaaaattcaaataggactctttttcttttaacagttcttttaacttttgtagctactgaactttggggtttggggtatcaattactcagtacccattcaacaaatatttacctatttaagtggcactgtgccccataccatggcacaaagatgaatacaatacgctccctgccctcaatagcagtcacgtagggccacagttttcacacagggtatgtgtgcccatggggatatgtgaagactttccaaggggtacacaggcataaatagtgttaacagaatccatttttaggtccttaaactgacttgcctggaatgtgcttgcggggcagtgaagccagttccacttttccacttaactttcacagtcaccctgtttccactttacaaaagacagacacatgtctgactcattctaagttatatttcatactgacctaggtataaaaatagcaagcaactatattagtccatactcaacgctgctataaggacacatctgagactgggtaatttaaaaaggagagaggtttaattgactcacagttctgcagggctggggaggcctcaggaagcttacaatcatagcagaaggggaagcaaacacgtccttcttcacatggtgacaggaaggagaagtgctgagcaaaagggraaaaaaacccttataaaaccatcagatgtaatgagaactcatgcactatcatgagaacagcatgggggaccacccccatgattcagttacctcccatcaggcccctcccatcacatgtagggcttatgggaactacaattcaagttgagaattggataggaacacagccacatatcattctgcccccagcccctcccaaatctcatgtcctcacatttcaaaacacagtcatgcctttccaacattccccaaagttttaactcattccagcattaacccaaaagtccaagtccatagtctcatctgagataaagcaagtcccttttacctaggagcctgtaaaataaaagcaagttagttacttcctagatacaatggggtcacaggcattgggtaaatacacccattccaaatgggagaaattggccaaaacaaaagggttacaggccccatgcaagtccaaaatccaatagggcagtcattaaaccttcaagttccaaaatgatctcctttgactctgtgtctcacatctaggtcacacctgatgctgggctcccatgccttgggcagctccattcctgtggccttgcagggtacaacccccttcccagctgctttcatgggatggcattgagtgtctgtggcttttccaggtacacaggtgcaagctataggtggatctaccattctggggtctggaagacagtggccctcttctcacagctccactagacagtgtaccagtggggactctgtgtgggagctccaatcctacatttctcttctgcactgccctagcagaggttttccatgagggttctgcccctacagaaactcatgcctggacatacaggcatttctgtacatcctttgaaatctaggtggaggttctcaaacctcaattcttgacttctgtgcacccacaaactcaacaccatgtggaagtcactaaggcttggggttgcaccttctgaagcaatggcctgagctacactttggccccttttagccacggctggagctgaaacagctgggatgcagggcgccatgtcccaaggctgcacagagctgggggccctaggccctggcccaggaaaccatttttacctccctaggcctccaggcctgtgatggttcgggctgccatggaggtcttagacatgccttggagacatttaccccattgtcttggtgattaacatttggcttgttacttatgcaaatttctgcagctggcttgaatttctccccagaaaatgggtttttcttttctattacatcatcagcctacacattttccaaacttttttgctctgcttccctttgaatgctttgccatttaggaatttcttctatcagataccctaaatcatctctctcaagttcaaagttccactgatctctagaacaggggcaaaatgccaccagtctctttgctaaagcatagcaagagtcacttttattccagttcccaacaagttcttcatctccatatgagagcacctaagcctagactttattgtccatatcactatcagcattttgggcaaagccatacaacaagtctctaggaagttccaaactttcccacatttcctgtcttcttctgagccctccaaactgttctaacatctgcctgttccccagttccaaagtcacttccacattttcaggtatctgtatggcagcacccaaatctcagtactgtattagtccattctcatgttgctataaggacataccccagactgggtaatttataaaggaaagaggtttaattgactcacagttctacagtgctggggaggcctcaggaaacttaccatcatagcagaaggagaggcaaacacatccttcttcacatggtggcaggaaggagaagtgccaagccaaggggataaagccccttataaagccatcagatctcatgagaactcactcactatcatgagaacaggttgggggaccaccaccatgattcaattacctctcaccgggtccctcctgtcacatgtatggattataggaactacaattcaagatgagatttggatggggacacagccaaaccatatcaagagcaattaaaaatattaaaggaagtctcctgtaactgagatatgataactcccccatccatctcataaacagacacacggccaataaattattattcttgagcataattattctttccaaatttgcaataaacatgtgttttgaccaatgagtttctggtaaggattatactataaactcaagctggaaaagtatttagtacttagagcctgatgttaggaaatttttttaaaatcaaatttcaatttagactttcattgcagagaaatatgataggatgacaataaaagattttcacatataaaattatattacattaaaataaaaatctacagagaaatagaatgaaaatacaaactctagagggaaaagaatttaatatttctgacttaaataataagttaaattattcatgtggatttttttcaatgggtgctgaatgggcattaaatgccattgttattaggttcccttagacacatttaatacccagaagagtgatatagtaagtttatattaaactaccaacattcactaatacactggacattacatcttttgtaaccacttatatttatgatttttgaaagtttagatatcaactctgaaaagtgtgaggaaagtatagtttttcaaaattcactgaatgagcagaccactgacatgtgggagcaaggccagtgaacaaagttgttataaggtgttgtagacactaggatagaagtttcctgtgggtgtagaaggtctggaagaggaagctgtcagttctgttgagagaaccaagaaaggctttccaagcagatcaatgatttgtctcagaaataagtagataaggtcgtgtgtgtgtgtatgtgtgtttccaactttattaaggagattctcctcactcttttttggagttatgtaatcctttattatcatttcctatgcccaaaccaagccttattataaatcaagacattgaaaaggccctctctcattagctctttcaggatgacatgggagacaaattaactttaaatcaacttggtgtatttgtgatttaaacaagatagaagtttattcctaaccttcataaaagttgggcagttggaagtccaaggaaggcacaatagctccacaaaacattagagacccaggattcttttagttctacaatctgtcatctcttggtagggcacttgtcctcctcacccaaggtatctgctggaggtcaaaccattcctgctgcattccagtgagaagatagaatggggaaaagcaaaagaaacctctctcagatgactccacctttggtttaaacaaccttcctggaaatcccacgcaacacttctgctaacatttagtagatcagaacttcatcaaatgatcccacctagttataaaggaggctgagaaatgctgtctttcttctgaatagccataagcccatttaaaaactgaggttctgtgagtaaggaagaaaggaaatcagaaaaatgggatgaacaaacaggagtctctgtcatacgtgatgcttaatcttaaacctaaggccatcaaaatgatgacttggtgtgatccttccctttatgtaacattcttcctctaacccaccaattactacagcacttacatgaccattgtgttttccttttattgttgttactgcttaggttatttgatatccccactgtgctgccatgtgtctaatggcacctcaaactccacatgtcccacactgaactctacacctgctccactgcagctttcccgtcacgattaatgggcactccatccttctgtgctcataccagaaacaatggaatcatcctgcagacccagaaatcaaccacctctgatgctacctcccccatccacatctccatcacctcttacctggatgagtgctattgtcccaaacagccttccacttgtatattagttccttctcacattgctataaagaaatacctgcaactggataatttataaagaggtttaattggcttattgttccacaagatgtacaggaagcatgatgctggcatctgcttggcttctggggagaccttaggaaatttacagtcatggcagatggcaaagagagtaggcacctcacacggctagagcaggagcaagagagagagtgagggcaaggtgctwcacacttttaaacaagcagatctcataagaactcactaccacaagaacagcatcaaggggatggtgccaaatcattcatgagaaaccacactcataatccaatcccctcccaccaggcctcacctccactattggggattacaattgaacatgagatttggctggggacacagatacaaaccatttcaacctgtttctccccttacccctaccaaagtctgttgtcaacatacaccaaaagtggccttatttcaatgtaagtcataattttactcctcccaaacccttgcagtggctccttatttctctcaaagtaaaaaccaaaatgtttgtaattgccagaaggctgtgcctggtctggtgtctcatgacctcactgacttcatgtcttcatacttcccctctctcgctgtgcattgacctcacagctgttagctcctcccttgaggcctttgctccagctgttctctttagaatgctcttccccaggcaggaatgactaactccctcctgccttcaagcttttgctcaaatctcacatttccccatgactaccttaccagccctgactatatctgaaagtggggactctcagatgcccactattctgctcttctctccatgcatttactatcttctaacatgctatccaactctttccagcatgaaagtatttattatgtttattgtttattgcctgtctctccccatctgatatggtttggctgtgtccccacccaaatctcatcttaaattctgtgtcatgggggggaacagtgggaggtaactgaatcatgggggcaggtctttcccatgcccttcttgtgataataagtctcacaagatctgatggtttcrtaaaggggaggtttcctgcacaagctctctctcttcacctgctaccatccatgtaagatgtgacttgctcctccttgccttccaccatgattgtaaggcttccccagccatgtggaactgtaagtccattgaacctctttctttggtaaattgcccagtcttgggtatgtctttatcagtagcatgaaaacggactaatataccatctctaccaccactagtttcttgtctgttttgttcactgatgtattccaagcacatatcacagtgcctagaacatagtaagtgctcaatatatttgttgaatgaaatcaagtaatttgttctcttacttagcaaatttatagaaactctgtgtgaggcatagatttgagtggatacaaaaggaacaaggtcggctgcctactcatacctagcttataatgtagtaaaagataaagaactctaatagacatcaatgggactgagtttaataggacacaggacttccggaatgccagagaaaaattcaaaatgagtataagactcagaagaaagcacatttgcctttgcctggaatgattgcagatggccttgtggagtatttgaagtgaactttgaaagacaggggctggtttgataagtgaacatagagaaagaggtgtttgcagataataaaccaccttggaaggtattagggttagcaaaaggaaaggacaccatcatatattaataatttaatatttatgtaagttatagtcttgctaacatgatatttatttggactataagagctttgttggaaaggagaggtaaaggtattgagttatctcaaacatttaggaacaaagtgatatttgggacaatttcataaagcattgaacgtcaagctaaggaatttgacttaatttgtcttacagggatccgttgtggggtttggaacagggaactggggcaggtggatagcatgatcataccagaggccagcaagctccttgagagcagagattttgtcttatttatccttggatccccagtgcacaccacagaacctggcatattagtgggtgattgataaatatttttgtttcaaccagtgattagggagaatgtaaaaaattttgtcaaataaacaggtcacattctggcagctgtaaggaggatgacttgaagaaaaacaatgaaaaaggatggtaaaactctgaaatagggtggcttctatgaaaggaatgattgggcacaagtgacactatgtaggaaaaaccaaaaggattcagacactgattgcagatgagggttgagagtgaacaatgagttctcccccaagacgacctaaatctactcaatcattattcaaaccacaagatttttagcaatagaaccagattcagaggtaaatgcaagaattccaatgtgggtttagaaactaacatctaattagaacaatcaaccttagttttttttgagcaacaactataggtaattttggcaaattcagtataattccaggtatttatcagcttgtaaatttcaggcttctgatgcttggatgtggtagcacagagaaaattcttgggaggcagcaagggctgtatgcagagcttaggtttgagtctgcaggcataagtgaggccttcctcagctactcactagctctgtggcctccctaagaaacctgagttttttatgacctatgaattcatgatcaaaatagtggaggggtatgtgagatttagatgagggcatggaaagtgcctggcacagagttggtgtttgataaatgttagtctctcctctctatgctgttcttcttttcttagtctctggaatccaccatggtgcccctatttccaccgcggttctggccaaaacatgctttcatgcataatgactcttccacaaaggctgtgtttgcaatcatctactctattgtcttttaatctgtaccagcttccaagctaacccaattttctagcatttccctggtgctcatctccaaatacagtttcaccagcaaatttcctaagtatccttttattctgtcttcaggaagattattaatgaagatgttaagtcaggctggcatacatcaccatgcttaaggccatcttccagacatttttgttccactacatggggatatggtgtcatttatcattagatcttgttacagctttctggcccttgaaaaactcatgggagggcactcatgtccacatctacttgaattagtcttgcaagtgaacacgtgagcgactgaattaaatgtcatcacaggattgaacatctgttacatcacactaatctatcactcttctctcctaaatcttttcaatcaaaacaaattagtctagcatgtgattttcaatcagccttctcttttgttgtgtgtagctcatgcccaaaaggaaataatagaccagttgataaaagtaacaaaatttcattactgcttcaaacatggtcaagtggtaaataaagaataatgactccttggcaattagtgaaatgaatagcaataggacagactctacagaagatggatatgagactcagtcagcctcatgaaacttacctcataacaaagccttggagataaatgagtgtgtggttttagaatcaagaatagttttagaatcaagaatagttgcagctttcctgacttgtgttttcctaatggagcattgattgtgtcactaacaagagattctccttcctcatttgctgaaaaagttgaacatcgtatgggtggctcagatacagtaggggcataatataatgggatggtttttagccgcacttctgactccatttcgtcaccaaattattttccttgcttcttttcccttactttttgtttaattgtggtaaaatacatgtaatataaaatttaccatcctaaccattttgaagtgtacaattcagtggtattaagcacattcataatgtgcaatcatcaccactacccaactctagaactcttttcatcttgtaaaactaaaccctgtgcccattaaacaataattccctgttcctccctccccttagtccctggcaaccacccattctactttctgtctctaagactgtggctactctaggtacctcatacacatgaaattatacagtgtctctcactttttattgaatgttattgtcttagtccattttctgttgcttataacagaatacctgaaactgagtaatttacaaggaagcaaaatttatttcttacagttatggaagctatgaaagtcaagatagagggggctgtaccttggtgagagtcttcttactagcggaaactctgtacggagtcctgaggcatctcatggcatcagagagggggctgagcatgcacaagtgttagctcttctctcttcctctcttataaagctaccagtttatcttccatgataacccattaatccattaatccattaatagattactccacaatccaatcacctcttaaaggccccacctctcaatactgtcacattgtggattaagtttcaacgtgtgttttggaggggacattcaaaccatagcaactatccttttatatgttttgtaagattataactactcttgaaaccaaatggagactgaataaacaaaatattgcctgaggtcaagaggagttctattctgtatctatgaagtcaatggtacagacataatgtttcctaattagaacaaaacacaattgagtataagaaatattcatcatttaaatggttaattgttcagataaaaagcatattcaaaataacaggtcaagggagagaytgaatataacacaggttccctcaaggacaggaatgttaagataattgagcaaggaagcaattgtagattccaactcacagatttaatcagctaaatgccaaggtgctggtcacaaagattaccggcagagctgcctgcaaggtaatggttctcaaaccttagtgtacatatgaatttattaccacaagcctatcaaatcagaaccataatgactgcgactcaggagtctgaatgtgtcaccagctaccctggtggtttgggcttaggaggttcttatcagcgttgagaaatgatggtcagtgcagtagattagaccagagattgtgaggcttgcctccattcagtttgctagtataatcttggattatgttatgactatagtgacatggtatccattactacctatttcactgcttcactttttttttattattattatactttaagttttagggtacatgtgcacaatgtgcaggttagttacatatgtatacatgtgccatgctggtgtgctgcacccattaactcgtcacttagcattaggtatatctcctaaagctatccctcccccctcccccgaccccacaacaggccctggtgtgtgatgttccccttcctgtgtccatgtgttctcattgttcaattcccacctatgagtgagaatatgcagtgtttggttttttgttcttgcgatagtttactgagaatgatgatttccaatttcacccatgtccctacaaaggacatgaactcatcattttttatggctgcatagtattccatggtgtatatgtgccacattttcttaatccagtctatcattgttggacatttgggttggttccaagtctttgctattgtgaatagtgctgctataaacatacgtgtgcatgtgtctttatagcagcatgatttgtagtcctttgggtacatacccagtaatgggatggctgtgtcaaatggtatttctagttctagatccttgaggaatcgccacactgacttccacaagggttgaactagtttacagtcccaccaacagtgtaaaagtgttcctatttctccacaccctctccagcacctgttgtttcctgactttttaatgattgccattctaactggtgtgagatggtatctcactgtggttttgatttgcatttctctgatggccagtgatggtgagcatttattcatgtgttttttggctgcataaatgtcttcctttgagacatgtctgttcatgtccttcgcccactttttaatggggttatttttttcttgtaaatttgtttgagttcattgtagattctggatattagccctttgtcagatgagtaggttttgaaaattttctcccattttgtaggttgcctgttcactctgatggtagtttcttttgctgtgcagaagctctttagtttaattagatcccatttgtcaattttggcttttgttgccattgcttttggtgttttagacatgaagtccttgcccatgcctatgtcctgaatggtattgcctaggttttcttctagggtttttatggttttaggtctaacgtttaagtctttaatccatcttgaattaatttttgtataaggtgtaaggaagggaaaaatcacaagcattcttatacaccaataacagacaaacagagagccaaatcttgagtgaactcccattcacaattgcttcaaagagaataaaatacctaggaatccaacttacaagggacgtgaaggacctcttcaaggagaactacaaaccactgctcaatgaaataaaagaggatacaaacaaatggaagaacattccatgctcatgggtaggaagaatcaatatcatgaaaatggccatactgcccaaggtaatttatagattcaatgccatccccatcaaactaccaatgactttcttcacagaattggaaaaaactactttaaagttcatatcgaaccaaaaagagcccgcattgccaagtcaatcctaagccaaaagaacaaagctggaggcatcatgctacctgacttcaaaatatactacaaggctacagtaaccaaaacagcatggtactggtaccaaaacagagatatagatcaatggaacagaacagagccctcagaaataacgccacatatctacaactatctgatctttgacaaacctgagaaaaacaagcaatggggaaaggattccctatttaataaatggtgctgggaaaactggctagccrtatgtagaaagctgtcactgcttcactttctttcttacrtttagcgtggcctgactgagctattggaagaggggcagaggcaggagtgaatgatgctggaaatagatcctcattcaaccctgcagcagagggtgagccgcaggccctgctgttctcccatcatcatcacagccttgagactagacctcatggttgttttatcttttgggtttttttttcctggtctgcctctgggtcatcaagtacaaactggagggaaaatgctagcgtccgtggagctgtgttcagcatgaaagatcagtatctggcttccctctcatttataactcttattttctttctttctagaatatgtctgtgctggagaatcatcactggcgatctacaattggcatgcttcgagaatcaaggcttcttgctcatttgccaaaggaaatgacgtaagtgctgccgagatgaaacatactgatgtgcatgcagtaaagataagccactttctctagggcaggcttgggaccttttgcgtgaatggcagagagccccccggctgtacttcctgcctgcactgagctgtctatcagaggagatttggtgtcagttacagcaacccagaaaccaaaatctctctgtgtgctttgaaagggccttgcagagtcaatgacctacagtcaggaaaagggataataaacagctctcagttttcacacgcttcagtatcagtgctcgactttgccaaattcccgacctttagtttagcaaaattgtccttccatgtagctccaaatagtaaatatttatcaagaaggaacccaggcattctaaagctagagttcaaaaaagtatattttgtaattgctagtctcagcaaaaatagaagtcagaaattcttttctaaaatgtcttttgctaagtaattgaaatggccctagcatttttttcaccaattaatttaccttacgtctcttgcactttaaacagaaggggagacactcattttctggttcactatttgatagccatggtatgtaggctgagtcccactaaatctgaggccattgtttcattttcctggtggccccaagttagctgctaatactgtcttccaaggccaccattaattctgatctgtttaatgaacacgtgcagaacccaagaaacctaggtgaaaagagtacatagattgctgtacccttcttcaagacaagcacataacttgaggtcaaggaccaagtgctgtctcccaactgaacaagcagtatactctgggttgtggattgattcctggccctctgatttgatctcatgctgtttcctagcacccagaggaatgtgaaatttgcaggaggaatttcagttctgataaatttttactccctggaactaaataaaaccagttctcgtgcatggaataaaaacttatgcctcttactagaataataaattgcaaagattgaaagaattaaatgcaaaaagaactaaaaactagagcaaaagatcaagtgagaagaagaaaagaggaggtaaggagagagacaaggaagaaagaaggagaaggaaaggaagaatagtgaggacaggaaagaagaaaatgcaagggaaatgggaaaggactctggggtgaccagacttctcctggtcagtacctgcattcatcctgtttgttactcaatatttctttcctaaaatattcatttcacatctatggattccaatgaaaaatatatttttatgtgtctttgtggaacacagtgttataaattgtttttgccagaagaataattgttatacaataatatatgtgaaaactttattacaaaagccattatcataatcattattattccttctatcacaggtaaatgctttaatgtcatttttctgattttaaaagtagggcaggttaattgtagaaagtaaggaaaattcaggaaagtgttagtttgaactatgtgaagttgctctttttaagggccaaaaacaggagacttttagcactttcatatgtttcagcttgatatgaaagagaaaactgaaactgctagtaatcctgccatccaggtatagttcatgttaacctggctagtttattttcttttagtcttttttcaatacaaacttattttaacaaaatatgattatatttggggaacttattttacagtttacgtcctgaaattttttatttacaataaagacttttttccaaatcattaaacctgttaaattaaaatgattttgtcagccgtatggcattattgtataccactactgcctttcatttggaattcaaatggtttccaatatcccaaactttgatactctgttttctcaggaagtatttgtagataaaaattattggtcagaaaggtctgaacttttaagtttcttgtatattatccagttgttcttctaaaaggctgtatctacctgtattccaactgatggattgtaagaaaatgtaccaatgtaccatcaccaaaattgagtttatttttatctttttaaaatatttgcaaatttgacatatatgtatgtatatacacaaatatatatgtaaagtggttttcattaaattagtatgcatcctttacttacaaccaagattgaaatttttcgtatatttgctgatcattgctatttctttagagaacacatttttatatttggtctcttcctattttcctatcagtgttattcatttgttagaactctttgtatattaactacagtaaccatttgttatatgtggtaaatattacttgaagtttttagtttgccttttgattcatgaaacatttcacctaattaaaataattttattttccaattataaattcagtaagtattcatatcttcaaagaattcatataattttgagaagtataaataaaatatcaaccataatcccattatagatcttttcagtttattttctgtgaccatagagatcatgctttacatgctttgcattttgtttgtagcattaaaaagatgacatttttcaatgtcaattactatagctgtacattgtacttcataattgcacaatatgaatgtaccatggtttatttaactaatctcataaatttttgtgatttttttcccccacggaatgcttcattattgtaaataacaatagaatacgcatccttgtaacatatctttactaattatatctttactaacatgttaatgttaatttgtagatggactgttggtcagattatttatgttcatcaaatgctttttccactaattcctaaattaccctccagaaacattgtactaatttatactccctaacaaagaatgaggggaaccatttttctcgtactattgatagcattgggtattacaatctttcaataattcagcaaattacttagcagttacttttaatcctcaccaataaaaatgggagaaataatatcacattgtggttttaatttgctttctgctatactaagaatatttaatatcactttattttttgagatattttgtatttctcttgtgaattttctgttttatataattttttatgttcagaactggattaaagatgtagtatggcttaaaaacaaaaatgtttgtggtgaaactataaagcttttagaatatgatgtagggaaattttcatcagagttgggaaaagtttcttaaagaggaaaaaaaaaactagccataaataaaaagatttatagattaagctacattaaaaattaagacttcctggtggcactgtggttcatgcctgtaatcctagcactttgggaggtggagatgggaggatcacttgaggccaggagttcgagaccagcctggtcaacatagtgaaacccccatctctatttataaatttaaaaataaaattaaaatgataaaaattgagacttcatcaatagacatcataaagacagctaaaagacaaaccacagacacaatatttgcaacacgtagctgacaaaggaccagtatttaaaatatgcaaagaacctcagaaacaataagaaaaagacaacttaatagagtagacaaaaactagagtagaaacttcacaaaagaagtacaaatggccaataaagacatgaaaatatgtctagcctcattagtaaacaaaattcatattaaaactacagtgagttgcatgacatgcccatcaaactagcaaaaaatgtaaagggtaagaatgtagaacaatgagaatctcatctgctactgctgggagcaaaaatttataccatcattttgaaaataattggcattatctagtaaattgaagataaacataccctgtcatccaattattgcattcccaaatatagaccccagggagacttctgcacatgcgtaactagaggtatataagaatatttactgtggcttttttcatagtagccaaacactagaaaaaactcaagtgaccatgaaaagtagaatggataatggaatggatttcattatcaatggaattttatacagtggcatacactgtaacaaaaaaggatcaactatagcctacacatcatgaaggaatttcaaaaacataatgtttagctaaagaagtcagtcactgatacataccatataacttaaagttcaaaagcagttaaaattaagttgcgtggtttatagatgcactcacaggtggtaaaatcataagtaacaagaaaattgttaaaacaaagagcaagaaagtggttacttccaggcttgaaaggaaaggggatgtgatgagacaggcaacatgacctctggggtactggcaggcagtgttcttgacctgagtggtggttacaaggtgttcattttctayttattcattaaattatgtatgtattccctatgcattctacttaaatatatttcatttttaaaggtaaattttacaaatatttatggattgttcctttattactttttatatgtgagggaaagctcyaacttgctttacctttctaagatatcccattttctctataccatttgttgactaatatatctcttgcccactggtttgtaacagtgccttaattagtttttgtgtttgaagttccagaatctcttcctggcctatgtattgtgttccgttgatggatctttccatcccatggtaccctttactattattgtcttcatttttattactattgttatgcccttttctctctccgtgcacatcttcatgtttgaactctaaaaacacaccgccaatctcatgattctacaagtcttttgtgtcctccctaaaacatgcatttctatttggctttcagattttttcacccatagaaatgtctacactaccacaactttgtttttcaaggtttcaatcactttatacagttcttggcatgcttcctgtccaaggacgcaactggtgggtgggagacttgctctcaggcagtgaaggactggcacattgtgtaataaacagaatcaaaggcagaaattagattacargccacctgatgatgataaaatcaatcaccctcatcaaagggatttgctttgtgtgtgtttttctctttcattcttgtggatgcagacaggatattgaacagcagctgggctccttgatcttggcaacagacatcaacaggcagaatgaatttttgaccagattgaaagctcacctccacaataaagacttaagactggaggatgcacaggacaggcactttatgcttcaggtaaacgaaacaataaaagccattctttttgctgagtgaaaacactcagctgggctgggtgtggtggctcacatctgtagtcccagctacttgggaggctgaggcatggggatcacttgagtccatgagttcaaggctacagtgagctatgattgcaccactgcactccagcctgggtgacagagtgagatcctgtctctaaaaaaacacaaaacaacaacaacaaaaatccactcagggccatgatcaataattttagcacatttgagaaggagttatctccgatggtatgagttagagcagtgacctattttagtaaaggctttgaaatgcatgaaagttataagtggttcccaactaagcaaaatctgggttttaggtcaacaagttgataaagctcatttttcttgttcagtaactgatttatcacagagtaatcccgctggatgcagtaaaggtctaccgcatttggtggcttggtataaaatcagctactgcaatacccacacattttaaaagactgtttctgaaacacaaaagcatattatattaactatagtacatacaaaaattggaaaacaagtgacctccctttaccttaaacctatttaacctgctttatttccttttactacctaaacttctattttcatctgagtcttaaacatttttatctggtcttatttttaggcagcaaaaaataaaattgaactgaattgaattacattggatcaagtccattcctttctgttttactccayggcaagaagccatttgtgacatgacaaattacatcagggcagagtggatgtcacaaataaaaatgtgacctggtatccaaaccagaaccttctttcttgatcttccattttctcttgtcttccttcttttcttttggtgcaaaaaaacatagtgaatggacctagactcatctagatagatgagatggagctacacctggagattgaatggtgcagtcttttttgttccaggctttcatgctaccctttgtagctgtccaaagtgctccatctttgccaggaaataccctactcccagcagtagaactatgactccttccttatttctttccaaactaggcttctagtccctgaatgccacaaggatcaaccaggtgtctgatttgagtgactaaagccaagttgtgaatagctgaaagatttggccttgaacacttgcatttcgaaagaaagccttgctaactcaaatgcattccttaaggcagaggctggaggaggcttctctgacacttacctctacttcaacatgtactggtacccccactaaccaggaaataaatataaacaactaaatttrcaagttgatatgatccaaggstcttccagaccccaacattgctatctgttctgtgatgccaaggaattgggtcaaaccaatggacactgctggtctcttggtagcaggtggtggttaaaagagaatctgcttctctgggaattcaaggtaacccycatagggtcatcattactgacaaaaagctggcatctcagatccagaccagtgtgargcaagtcaagaaggccctaatttagctgtgcaaacaaagcattcctgggtttgatacgacttcattccctgactggcagtctgagcttacacatgcagacataaatgccaacacacataatttaagtgatgtatggggtttgtcagtgtggctactgtgagagtgaggtccagatgacctcacttgagcctggccagggaccatgcaacctccctgcatgcaggaggtggagctacagaaggagccaggccatggctttccttggcctgcccacccaagtctcttccagcaagctccatgtccttggactgtggctcttctctcctcactgctataaagccagcattctcaatgcaggctttgtatcatggtgaataagtgcagtttcctgaagaggcatgtcagggaggtactctgtaaatatgggcctggtactgtgagcagactgaacagcttgatagcctctttggcttggggtrcttttgcaactgaaagaacatcctctcacaatttctccccgccctgtcatttctcagatcgccttgaagtgtgctgacatttgcaatccttgtagaatctgggagatgagcaagcagtggagtgaaagggtctgtgaagaattctacaggcaaggttagtagtgatccaacagctgagatttcattgccctgtcttcttttaggcatttatyctaataaaacaggaaatggctgatctatcatgacatttgttctctcatcaactcttgttatcctaacctttctcttttactctcttggaactcatccaaccctttttcggaaaaagttaaaaataaataacattgacgtattgacttactacagaaacaggtagtaatgaggcaaaataaaaatgagcaaaagtgggacattgattataaatggctctcctctgtggatataagaatgtgtgggatagtttgattttgactttgaccttcattttaatgagctgagtgcagcctaaaggctaaatgtcatttgaggtcaatgttttccactctgacagaaggacttaractccttttgtattccttctccttgctttcttaaaaaaaaaaaaataatgaaattggacacagctgaccaaaaagtgagttcttcctttcaaatatagtttcaacagtgaggtaraaggattttgctgtgaaaagacaaatggccctgaattagggtataatttttaaaagattaacctcattcagaaataaagcaatgaattagcaagcaggatcttgatgttgggtggggtatcaacctttaaatacagccttgtttcttcaggctgggtttcaatgtgcaggatgtttgttcaggcatcaacagtgccctcaygctagtgacagaatcaggtttgagaggctgagaacaaataaagcttgaagtgtcccacataccagctctgtggggaggtcaaatagcaacagtgagccttttggagaaggcaccattgaaagatgtgtcaatgacatcgtgatggccccaaagacagaagaattgattgagctcatgtggggccagaagtctctactcactgtatctttctctcagaataaaagtgctcatgtaactcctacaattctgtatataatttcacttgaattgagtaaaagtggttagaaatcaaaatctcagctctagttgcccctaaataaaatctccaaggaaggtaagacaaaaggaaacatgatgaaattggagctagggggctttaaattagatataatcaatattttctttactgtttgatatgttgaatattgaaatagcatagtgagagaggggctaagatctctgtccttgcaaatcaaacaatgaaacagaggaaagagtctactctagcccacttggttttgactcaatcatgcccagcatgattaaagtacacaagtcagcatcgactgcagtgtaaaccttttattttctcatcttgcaccttatttggattctgagcaccttggggcaggaccatgtcacttatgtagatagtaaggcccatagtgccagtaaatcaaagttgtcaactaagtacagtaaatggtatcaaccaagaaatgtaacctataagatctcttttcttgggcctggtgcagtggctcatgcctgtaatcccagcactttgggaggcttaggcaggtggatcacctgaggtcaggaacttgaaaccagcctggccaaatggtgaaactcagtctctaatcaaaatacaaaaatcagccgggcgtggcggcacaacctgtagtcccagctactcgggaggctgaagcaaaagaattgcttgaacccaggaggcggaggttgcagtgagccaagatggtgccactacactccagcctgggcaacagagcaagactccgtctccaaaaaaaaaaaaaaaaaaacccttttctcaaaactgcttattgtcctagtaatatatgcatgcattataagatggaaaaacctagaacatttgtaacactgatctctaaaggcaggcttccatgtaccttcctctggcatgtttcctggcagaggaagaatagaaagtatatctagtcctttttatttaatagccttatggtctagtagaaattctgcttgttttaagagaagattataggctgggcatggtggctcacgcctgtaatcccaagactttgggaggccaaggcgggcggatcatgaggtcaggagatagagatcatcccggctaacacggtgaaaccccgtctctactaaaaatacaaaaaaaaattagccgggcatggtggcgggcacctgtagtcccagttacttgggaggctgaggcaggagaatggcatgaacccgggaggcagagcttgcagtgagccaaggtcacgccactgcactccagcctgggtgacagagcgagactctgtctcaaaaaaaaaaaaaaaaagaaaaagaaaaaaaaaagagtagattccctggtcatccaaactgcctgtcctccctactgaattattatttttttaattctataaggatgacttgtgtcattttgatttatctttcagtttaagatttggactcatctcagctcattccagcctgctcctggcaggcaggcttccacagactactaactgtcctggacaaagtacctttaatgtgattcatgatgttaagcaaaggaaaacccttaaaatcaaggttgaggacacagggggaaaggaaaacaagamcccatgaattagaaaaactgtttcattctcagaacagagattaggactccaaataccatatatctccctcctctccccgaaaaaaccttaaaaaattagactttgtcctcttgtaactacagattgatatcatctcaacctagtttcctagaacattttattgaacatctgcttccagccttgtctaatcctcaacaaaactgattatcctatgtgcaaagccccattggagatattatgaagaatgcaaagaactacaggtagtctatgctttgtactctcaaagtactaattagtatagtttccagaggaaagaaactatgcaaatttcccctttatattctctacattggttagcaaagtgtctgaaacataaacgtgttgaataagtgaatgaataaatgatctaattggaaaacctctaatgatagtggtcacaggagaagatccagtaccttgaaaggtagaatctgagctcagttttgagtgatgtgcattgttctatactttccaatatggtaacaagacacatgtgactggttaaatttaaattaaaagttaataaataaaaaatagagttcctcagtcttgatcatatttcaaggggctgccacagtgggcaacgtagagaacatctccatcattgcagcaaatcccattagagagcgctggtctagatagaatggaatggaaaccactgaggccgggatgcaccctgccttgtagaccagctcagtctcatagaagataagaacgagaggattgtggaggcccctgggcaccaggctacagtagagaacatgacaatgggagttatctcagaaagtgcatttagggcaatatatacagttgaagtggaagaagaattggaggaagaaaactagctaagaagcaacaactaagaataaattatcaacacaccagaccaggttaaagcagagtgaaagggggcaaaaaaagttcttctaagagggagaaacaggatgtgaaacaagatttaagaggaagaaacaagcagggacccttgcagggtccccagccaggctcagatgagatggagggtgaagggaagggagaagtcaaagacaactcctccaaagtgtcacacttgactgaaaaatcactattaacagaattacggaggtgaggagtgaaactggctgtaggagagtttgtcttaatattatatggtgttctggcctgccctcagaaggctatgatcatctggagttgaagagttagggtggccagactgccctgaaccactcaggttaagcccgaatgatttcctcacttcagccttgaggattaccaggcacaagagaccccaggaggcagactacagtcttaaaatgacagaactgcagcctctgtagggcttcagctcaatggttaagtgcagacactttgaagccaaacttcctatgctggaatccaggctccccactttactagtggtgtgacctactagcaacatactgggtcagcatttaaccctccctgtgtctcagtttcttcatctgtaaaatggggattataataaggttgttatttggattaaattaattaacatatgcctgggaggrgggctcacacctgtaatcccaatgctttgggaggctgaagcaggaggattgcttgaagccaggagtttgagaccagcctaggcaacgtagagatcctatctctatttwaaaaaaaaatgaacaaaacaatattagccaagagtggtggtacatgcctgtagtcccagctactcaggaggctgaagcaggaggatcccttgagctcaagcgttcaagggtgcagtgagctatgatgacaccactgcactctagcctgggtgacagagtaagagcctgcctcttacaaaaaacaatgacaattttttattaacatatgtaaaatgcttagaacgtgcctggcacacggtagtcactatataaatgttgtgtttttatctcttctactttagcagagtagattcataactgaaccttccactcattaaccagattgttttttccaacacaaaaattactcaatttgttatgctcaggaaggactgatgaagtatttcaataaagttttgtacaatacatttctcctttgatcttctattaggttggtgcaaatgtaattgtgggttttgccacggaaagtaagggcaaaaaaaacacaattacatttgcaccagcctgatagctgaccaaggcattaaaaaaaaacattttgagctgggtgcagaggctcacacctgcaatcccaacagtttggaagatggaggcaggaggatagcttgagctcagaagattaagactagtctggacaacatagcgagacctcatctctactaaaaataaaaatttaaaaatatacattagccgggcatggtggtgcatgcctgtagtccaagctacttgggaggctaaagcagaagggttgtttgagcctaggagtttgaggctgcagtgagccaagatcatgccactgcactcaagcctgggtgacagaatgagactctgtctcaaaaagaaaaaaagaaataccattctgacctttatactttttttcaccttcagttgcattaggtaaaattctaaggaatcagaatgggagattctgattaattttgtggttacagagtgaggtgctactcagatgagatctttctagtccttctacctcatttcctacctacttactgttcctggttgtcctcaggtgaaacaagactagggtcaggcagcgtgaaagtagaggagggagaaggaaggacaaaacctgttttcttaacctgtcacttaaagccataacttttatttcatgtgaggaaatttctcatttgttttcttgtttttgtaggtcttgttcaaaagtttattctagtcccagagcacacctactagcaataagccattatgaacggtcattggcactgtggtattttaaatttttacggaaactactgaagtaaggcagagcaagtcggtgctgaagggtccctaagggataacaagtcaggaaacagtaattcccagaataacttcttccgacgaggtcattaaaattattaatactcattttataagttctagattaccaatgtgtttttttctttctttctttcttcttaggkgaacttgaacagaaatttgaactggaaatcagtcctctttgtaatcaacagaaagattccatccctagtatacaaattggtgagttgaattcagtgttaattccaaataaatacctttggcacatctcacaaaagtgacaaagaaaagatctaaacacagctttcaaaagatcagcactggaggtttaatcaacatccttttgaatggctgagtccaaattaayactttaatcatgactaatctactagctaattatctattgagaacttatgaaacctaggatcgaagctttgttataggcccttaactaacttgtattattttaatttggtagtttagaatagaatcaaaaccaaaaagagtagaagaaaagtaacaggaatcaactattcatactctctgcagggcttgaaggtgggaatcagcagaatctgcctttaggacccttccaatctgggtygctacccctcatccctaatgctcgctcccaagaacccaatctctaggcctagagcttgtgagccatgctatcccgccgcatcctgggattcccagtttcactagtccttccttcaaaacttattttcaggttattctcctaaaaccacactctctttcaagtgtcactggtgggaaactgttgaagtatgatgccaatgcatccaaaataattattgctttatctaattaagttatgcattagaccaagaagcaaatcaaactgtggaaattttaggcactttagcggaggaaatatttttgcttcggtaagactttctatcacaccttaagacactccatcacgtccacccacctttaaagcaagtctttcttttccttgcagttcccttccattgaatccgaactcagaactttaactcttttccttataaactctgaccctgacatgtaccagttcatgttttatacctgttcctatagacttcagacagctgaacgcattcacagtgctacagacctttgcaaggctcaaagtttaatgctttgacattggtagggaagggggtatctgaaaacataagctgaaaattaagaaaaccagggtaagttagaattacataatatcactgaaggtcaaatctaatccaccgtcccacagtggagtcataaaatcatcctcaggaaataaggacaaaataaatctagctataaagatttcaatggaatatacaactattaaaataggtatgttcgattattgagcatttttttttttcaaattgtccttaatattgttatgtagttttcacaatcaaaccaattcctccaccccaaagctgggagctggggatggtggcatagaaaaaatacaacccagaaaagataatacagagttgctgggtggcttgcaagggaatatcagcaacagaaatgcagcctcagcctcctgggaggcaattctctcctatcaattgccttagccatggaggttctgcagacgtgattcaaaattagatgctaaccaaagtcctaatcctgaggctccctgtgttaagctccagctggaaagaaatttaccaggcaactgtcaatgacattttgaaccccccaaacaaaaggactcacgtggttcagcacacaacctggatttgtgagacagacctgatttcagagattctgtcctgttgttgtcatgagaacacacttattttgtcagatcatatgtcctgattttcagctcaggaaaatgtggttaccatagatacctcttttaaaaaggggctgggggttgagtgaatagggaaatcctatggatgctacaccagcacaccaataataaagagaaagggaaggtgattataaaacaatccttagtacatagatctttctctgcctttgctccacatctgccagctcgtagaggttgagggttgggaagtggggtggcagggacagatcaggctaagccagaaaaatccaaagagataaatggaacttggtggatgctacaggctctagcccccaagacaacaatttttccagtgggtcttcagtaatgcagctatttcctctgtccttattcctctctgactgaaatgttcccctgtttttcctgcctcaatccaaaatgagaattttctgagatctactctcaggcttagatctgatttttctttttaagtaatttatatctacccaagtggaactagggcttaatatctcctccccaactccacgcttccctctctctaccaaattctacattttaaaaggaagatattagccaggcggggtgactcatgcctataatcccagcactttgggaggttgaggcrggcaaatcccttgaggccaggaattcaagaccagcctggacaacaaggcaaaaccccatctccacaaaaaatacaaaaaaataaaattagctgggtgtggtggcatgtgcctgtagtcccagctactcagaaggctgaggcaggaggatcacctgagcccaaggggtcaaggctgcagtgagccatgatcatgctactgcactccagcctgggcgacagggtgagaccccatctgttaaaaaattaattaattaaaacaaaaaaaggtattaaatcaaatgaagctctaattggtgaaatctatagaaggctaaagagaaagaggttttccttcaatccttgtctactctgaggctaccattcctccctactcccccttcctccccgcaaccccccgtcaccccaccatccctccaggaggacaacagcccagcaatgtcagctcatcccttgagaaaagggaggttggcagaacacactgatggaacaggtttccaaatctgataatgtggaagccttccttaatttgaaaaactgcctcttggtgtctattcagactttaaaatcagtttcctacctagcataagaagtctttatatctgaaagtataaatacagatatagtgccagggtcacttaagaaaatgaggcttttctttttttcgagttggattttaaaatgttggatatttaacttttttatactgagataaacttgataaatattcacacyttgaacttcagaatagtataattttgcaaagcgtctttttagatatctaatatctcatctctttgaaggtgaatgatattagaaattaaatatggagattgtggaggaggtaaagaaaattcaagaacagcaagcaaaacgtgaaatcctcatctgctgacaccctgtacaaccttaccaaaattccaaatacagacatcaagtcactggtttaactttccccctccagttcaggttctctactatgatctcacaatctttaaatcrtatttcacataagatgagacaatgcagaaatgtacaataacagtgtgtattgctgcatccctcttccatctctatggcattctcaaaggccaagtgtctgctgtttgtccaacagaaagataatcaaacctatccttgtaattcacatgcctgtaaacatacaggattagtgttggaaatttttgttaggctgaaaaacatttgcctttctccccacagctacacatcaaggaaatacaacaaaacctaaataagtccaagtttgtgatgattccaacagttcttagactgaaagctatcttttcataataaacaagtcatgtttattatgaaaagcacattaacgcggcaaaacgcgattagaaagtaacaaatcttaaatatgtaagagaacagacatgcaaacaaagaagtctcatatcaaacaatcttatctagtcattaaagctggactttcatacaggtaaaaatctgtattgaaaatgagtgaactttaaacttagttatttaacataactgaaagcaagacagaactgtaaaatgatcatcttgaaaaagatatcccacagggtaagggtatgaattatgcagctgatctaaattcgtgaggtgtccttttctggtgtcatttgccctctccatcccttctccgcctgccttctttagctccagcatacacttttttttttttttttttttttttacttatatgtctttctccctctgcaagtaatagccagtattcactgggagtttactatgtgccaagagttttctaagcattgtacatacattaagtcatttaattgtcataacaaccctacgagtttagtattctctttagcgtctttttgcaagtgaggaaactgaggcacaaagccattcagggacaagcccaaagtgacacatcttatgctcctaggctgagggtagccaccattatcttgcttgcccttctggccccagagctggaaatttttattaggctgaaaacatttgccatttctcctcactggtacacatcaaggaaatacaataaaacctaagtaaggccgggcacagtggctcaggcccgtaatcccagcactttgggaggccgaggcgggcgratcacttgaggtcgggagttcaaggccaacctggccaacatggggaaaccccatctctactaaagatacaaaaattagccgggcrtggtgggtccccagtcatgctcgggagggagtaaggagcgggtttcaccacgctgtgatgctgagccttgacttgcctgttctaggtttcatgagctacatcgtggagccgctcttccgggaatgggcccatttcacgggtaacagcaccctgtcggagaacatgctgggccacctcgcacacaacaaggcccagtggaagagcctgttgcccaggcagcacagaagcaggggcagcagtggcagcgggcctgaccacgaccacgcaggccaagggactgagagcgaggagcaggaaggcgacagcccctaggggccggcccarcttagacgcrgctctcctccggcagggcccycagagggcagaagcagcgtggaggggccctcacgcagcagcccagccactttctgagtgttgtcctggggctctttggaacgccatcttcctcccacttacctgcctcccctccttttcgcaaatgtacagaagccatttgtcacctcagcattcgctgccgaaatgagcaactccattcagtaacgtgggagctgatcccacgggcaggctctccctgctccaggagaagactaggaggaagaatgaggtgctcctgccgtgtccgccttgttccgggtcgcactggaacaggcagcaattcctaagtccggagcgtttgagcgtttgctatctgactgctgatctgcgtgacagaaacaccagcatatttgcaacgccaaggatattggtcttaagtgcaagagcacaaatgagagtgtgagagaaagtaccttctattttaataataatattattataaaaataataaatctttttaacttttatattttatgcactagacaatggatctgcaactttggactaaggtcattcaatgtacccaaacttgaacagggggttcattgttttgctattgactttattatgccactttggggcagagacttggcatcttcgcagtttaagaaaccacgtttcctatccaatccgaagggaaggtgctgtacagttcattcctttgcaccattagccaatctgtcttttatggattctgtgacatgtttatattcacccatgtacattttctgtaaataccaaacgctactgattcccatgccaaaatacatgagtattatgggattgctacctgtataaacaatggcactgtgaaaatactgttagttttaatacaagagaatgcatttgtaaatatggtatagagtttattaatatactattgtttgcagataaaggccttaactttaaacatctttcatcttctgaaagctgcccaacttaaatcctcatagatgtctttctcaactgccttcccatgttcatctgtatgttttccagctaaggtcacaaaccaaaactgaataaagtctttgaggaaacattttggaaacttcacatgcattccgcttgagaccatagtgtttaatctatggcaccaagcatcgtttcctcagattaatgagacccttcaacaagcctgaatcagtcacttttcaacacagcgatgttttaacaagccagctgctaagcttgtgtttatgtgactcttgttacagatcatggcggtgcgtcagcctcacaggagacatagcaggtctcagaaaccttctatgaccctgtcatctaaccatcagggaattccctgctcccatgccacacatttgtctattatggctatagtaccaaagtacttttggtgtttggttggtgtgcatttctttagtgtcgatagtaactggatttttctttttccttaatctcatgtgaacaactacccaactgtttagctgaagttcatattatttaagtaaagaaaatatttcagttttataacagactttaccttcctggcaggtcattgtagttaattatgtctctagcttggagtgtcaccttggaatttcgttgccattttttctcagacacctggccgtaaaatcagtttgttacagcattcttctctaggctgctaaacgctgtgcattgaaccttttctttagaagtttcagcgtaactaatgttagatgaaaattgttgatgcccctttctttttactttaaacaatgtggtagtgggagaatgactgtttctgccactatcaacctgatcctcatgctgatagaatgacagctagcacttatttcctaagtgcaactgttttagagatttttctcctaacatgcaaaggaaatactgattggcctataataagttcctatagggagactgaggcttgcagaattaaggttcaggggaaattttggaaagttggttgtattttcattgaagtaggagagattatcagatggtgctaaagaaagtgtgaagatcttatgaaataggtggatggtaagttgaaattattgatgtgggtaagaagggaggttgtggaaagttaacactagctttgtatttttttttctgtaaaactgtgaactgatatattttcctttatcactttagtattctgcagttctcagcttggtgaggctccaaaagagaatatgtcagatgtattcctacttccaaacctgtcttactttggtttgatggtacacatagggcttttgaacagtctatttttaatgtatatgaggtcaaatcaaggaaggcaattgctggggacaagaaaagtagaggtaggaaagaagacactattttagctaatggggtttcttgggactaaaaaatggctttgtttaaattataattatataataatttaaataaatgagattggaggtattcttagtagttctgagttgatagtttacattacaattaggtcttgaagaagagctcacagagaaaaaactaccaaatatccaatgggtaagcccatgatgtagccactagtacaataaaaatctgaagtaaaatgaggcataaacttgatgcagctgcctccctcattcaactggggagttcttgagttcctcatttgttggtaaaaagaaaaagaatgtgaaaatgtctctttttttcttggctattagtggctgtcttgcaatatttcaataggagtccaattactagttaaaacactggcggggtgcggtggctcacgcctgtaatcctagcactttgggaggccaagttgggcagatcacaagttcaagagatcgagaccattctggccaacatggtgaaaccccgtctctactaaaaatacaaaaattagctgggcatggcagtgcgtgcctgcaatcccagctactcaggaagctgaggcaggagaatcgcttgaacctgggaggtggaagttgtagtgaactgagatcgcaccactgcactccagcctggcaacagagctagaatccgtctcaaacaaacaaacaaaaaatcccacagctattggatcatccacagattttttctttacaatcttgttctccttgtccatggaccatcaatagttgacttgccaggtttaattctttcattgcttgagaagaaaggaatcaaaggactgtgtgtagtaagctgacggtaaagttaagattaaattaagacagagagagaatacatatcactgccaggcctgataggaaaaatctgctcttccttttaataacagtgatgaattgtcaggaccttatttaggaaaccctgacctacccataactccctgctaggctaagtagaaaccaggttatttctccctgcttatggctccccgcaaagggacttgcagcgtgtcctgcaactttgtcttcagatagtgcttcctacaaaactaggtcttgttttgtaatcttttctcgtgttgaatcagatctgcttacttatttaggtttggttatgagcttgtatctcactgtatttctcatgctttgttcttttaaacaaatcctttaaactgtgtcattttgtatacacatgtgaggtttgaaaaaaaaaaaaaaaaaaaaaagaactaccttgtgagttttgctcaaaatgtggcctaagtagccattggcatgtctagatgaacaaataaaaataaagataatttctttaaaatatcacaagatgaaaatatcctaattctcaccaggtaacatgttaccagtcaatgaattggattcaataaaaggatcccactgctcaggagaggaaacattcgaggaaagaacacagatgcaaacatggcccacgtgactcattccactttgggggctacagaaacgcccatgtccatgaaggtatcacctgctcgttagtgccaagttagggaaacagggccaccattcagctttacatttccccagagtcctgatatttttctgactcatatttgtcaaactcatatgaatgagaatgaggtacaatgttttaagttgtaaaaacatagccaactcagggcaagaattatttgtgaaaaatatggtctcacatttcaggattactggccatgaagaacaatagaacagttcaggcagaactgttctattctaaatctggtattctaaatccatctggaaatagagaagaagaagaacactgccaatgtttccaatgttttcttgtatctttatgtattctcccatattcattttattaagatctgtgttcagaatctctctgattccttaatgactcccatgtttgaatgcaaagctactttttcatttgtggatgttctatatcacaaagctaatatcaaaagagatgccccactagtatttcatgtaaaggtcaggcatggctttcaaatgtacacgggaacctagctgaaacactgtcaaataggccaagcctacatgagcacttagatttcaattaaagaaatacttattgaggagctactatgtgccagacattgtgctagatattgggatttaaaaagacccagtccctccaggagcattcagacttgtgccagagactggtgttacctgtgaacacttcttagagaatttgtgaacagctatgattgctcaaatgcagctaaagctccctcctggcatacaacacaatagaaagcagatacacttccaacacagaaatggatcccaatcctagttctgtcactaacttatcctctgactagacagaagttactaaaactgctataaaattatttcaagacagctgggtgtggtgtcttatgcctgtaatcccagcactttgggaggccaaggtgggggggtggatcatggcgtcaggagttcgagaccagcctggccaaaatggcgaaaccccatctctactaaaaatacaaaattagccaggcgtggtggtgggctcctgtaatcccagctacttgggaggctgaggcaggagaatcacttgaatctgggaggcagaggttgcagtgagccaagtttgcgccactgtactctagcctgggcaacagagcaagactccgtctcaaaaaaaaaaaaaattatttcaagacaatattttttatagtattgttgtggcaattaaaagagttggcatacaaaaaggcatcaagcctgctcgctggtacatggtagatgctcaatagatacaggttctcccttaaattacaaacaacttgccaaatagccgttcttgcatgaataagaatggggagagtttacagtggagaaaacacagtaaagagttggtttcacattaggaagtcaaacttctaattaagccagagagattattagaaaaaaaagtttaagttgtagctgataatggtttgaaaatgtaagattggcttgtcttagtcatctaagcaatgatgcatcattgattccattgcctgaaattcaaattctcatattaaatgtgctgatataatctttagtattttctttccttttaaggaagcagtgcagtagggttttaaaagcattgtcagggcacagtggctcacatctgtaattgtagcactttgggaggctgacgcaagaggattgcttgagtccaggaatttgagacctgcctgggcaacctagaccccatctctacaaaaaaaaatttaaaaataatacataaagtgttggctttggactgggtacagtggcttacccctgtatcttagcactttggtaggccaaggtgggaggatcacttgaggccaagagttcaagaccagcatgagcaacacagcaagacccctgtctcttgctgtaaaaagtaattaaaaaaaaaaatgtgggctttggagtcagaccagaatttaaatccctcattatcattaactacctaaccctaggcgatttatttaatctctctgagcctccatctcctcatgcataaaatgatagtaacatcaacctcctgggtggtcatgaggatgaaagtaaataacatacataaaatatatagcataatttctagcaaaaagggagtactcaaaacatgtaaattcctacatcacttaaggaaaaaatatctacaaagtggaagttaggatgcatctttcactttctatagattgtgccaatttttgtgcaaatgaaaacaagttgcattaagagagactgacagtgactctatctacaggtggccaggtcggtcataaaaataatccttgtattatggacaaaaaaactattttaaaatgtgattcaagaaaaaagacagtgacccagaggtgctaaggatacactggtaagaccaaggacaaataagggactatttcttgtggttttaaagtaaatattcctcagctcagcgagagagaactagtccatctggttaatctaagactttcctggagttgacaagaatacaaccctggctagacagaagcattagttaaataagcaaaacttgataacctgtcaagttttcatgaagtccattcaaatcctacaattcctatccatcagagttcctggtagccctttcccttgccacctcttcatcagatcctttctggccactgacaatagaggctgaagactcccaggcagtctctgcaagtaggtggccctgggcaacataggaagaccccatctctactaaacattttagaaaattagccaggcatgctggagcacagcggcggtcccagctacttgggaggctgaggtgggagaatcgcttcagaccaggagtacaaggctgcagtaatcta

SEQ ID NO: 95606 - DNA, 29770 bp, Homo sapiens
gtccatggaaaaattgtccctggtgccaaaaaggtctgggaccactgccatatggactatgcccttgactctcccaaaggaacatttccccattcctcactcgctggggtacctcgctgggaaagtatgagaagccccagcggccaccgtcacgtggggataacaagatatacacaaaaaagtgagcttccgccacgggaattcaggcctgatgcagtctgtgatgtgaggatgtctcaggcactgccatgcagatgagtgggaaatgaaggggactgatgggaagtgccctgaggtgacaggagggagcagttcccgagggagccacaatggtcagggagggcttgggggattggcagatagaagtgggccttgaaaggaaaataagagttgtacaagcaagaaggagatagaaacggtattccaggtgatgagaaaagtatgcccaaattttggaagccagagagtgggatactccagggagagtgaaaagacagcctggctagaggaaatgggtcctgaaggagagaaatgagagatcactctggaaaggaagtctggggctggttcctgaggraagtcccctgagatccaacatcttcttctgttctttctacccacaggtcaggaattacacagatattgtttgctctgcagacctgagctgcctcttaagggtgctgattacacagccttcttcatctcagcctatgtccagatggatcacagaatcctcaccacaagggagctggccagcctgacctggaaggtgggggctttcctgccattggtgcctattgctttgggcttgcatactcagtacaggttgacacctaactctaatgccacctgctatgccaacaggaccatccagaaactcaaccaaggcaccacagactgctggggaaaggttcttgctgttttaaataacatgtccaggccgggcacaatggctcacgccagtaatcccagcactttgggaggccgaggaaggcggatcacccgagctcaagagttcaagaccagcctggccaacatggtaaatcctgtctctactaaaaatacaaaaaaaaaaaaaaaaattagctgggttggtggcacacacctgtagtcccagctactcgggaggctgaggcatgagaatcacttgaacctgggtggcagaggttgcagtgagccgagatcacaccactgcactccagcctgggtgacagaccaagactccgtcttaataaaaaataaataaataaataacaagtccatcatcagttaggccctgaccaaatgggctaggggacatgaggacagatggggacggggaaaaaaaggagcagataccttagctcaggtcctcatccccagctgggttcccttctcctccaaggaatcctttccaggagtggagaaagaggcatctcagtcagacagccagggtccctggaggccagactttttcatcccctttcacatgtgaagaggctgaataatcatcttatccccctgtattagctcattctcacattgctataaagaactacctgagactgggtaatttataaagaaaagagatagagccaggcatggtggctcatgcctgtaatcaaagcactttgggaggatgaggtgggcagatcacctgaggtcaggagttcgagaccagcctggccaacatggtgaaacccagtctctactaaaaatacaagaattagccagatgtggtggcctgcgcctgcaatcccagctactcagaaggcttaggcaggagaatcacttgaacctgggaggcagaggttgcagtgagccaagatcccaccactgcactccagcctgggcaagacagtgagaccatatcaaaaaaaaaaaaaaaaaaaagaaaaaaaagaaaaagaaaaagaaaaagaaaaaaagaaagaagaaaagaaaagaaaggaaaggaaaaaagaaaagaaaagaggtttaattgactcatggttccacaggctgtacaggaagcatggctggggaggcctcaggaaacttacaatcacggcagaagatgaaggggaagcaggcatgtcttacatggctggaggaggaaggagagagagtgaaggaggaggtgctacacactttaaacaaccagatctcatgagaactcactcactatcaagagaacagcaagggggaaatctgcccccatgatccaaaccgtgtcacctgcctgtattatctctgtgtgtgtgtgtgtgtgtgtgtgtgtgtgtgtgtgtgtgtgtgtgtgtgtgtgtgtgatggggtctcactctgtcacccaggctagaggagcatgatcatagctcactcactgcagcctcaaatttgagggatcctcctgggctcaagctatcctcctgccttagcctcccaagtagctaggactgtgcctagctaaaataccaaactcttgatttcagctccttttgtcatcatttgtccatttcttctacaatcttaaatttttttgactggggtttctatgttgctgaatttggtgacattttcactaacccagaacacacacacacacacacacacacacacacacacacacagccccattaaagttctttccttcaatgaaattggcaaaggggcataaagaaaactggaacctaaggacccagtgaggaagcaaagttccactttccactggaaactggtcttttacaataatcccattgcacctaggagctggaccaggctgttattttagagtttaaaagttgtcctcccttcttctacctggctactggcttggggctttaggtgggtgaggcctacctccacaagaaaaatccacagtgaaaatggtgacagttggagggtgctggagttgagcttagccttcctcacttcagaagagctaaatgcatacaggagtgcaacagaagtcaggaatctattgccagaggggccagagaggggcaagggccttcctgctctagggcccttccccagaagatgttagctatgggtcaagtctctacctcctccccaacccccattctccattgcatccttggaaccaggagcccagaaacctgccagcccagatgaccaggaccatgtttgagatgcataaatttggtcctctggatccttcaaaagtacactgtatttgtcactccccgtagaccctcatgcaataagttcttcatgctctgtacatcgattctttttctccagcagttctgagcaatgcttcaaaaacgaaacatcagattccttgtaaagttaaaaggaacagatttttttcccacataccatgaatttctcattgattggtttagttacaatatctaatgtgtccacaggtatgttttaaaagttcctttatggggcagagagagcatttttttaatactctggtttcacttttttgcatttaaatactttctcacatactcaatatttataaaagggttagagttcattttaacaaatcccattaaataggcagggcttttcaaggtcttgcctatgaatttcctcatttcaagcactgtttagtccaggtaagctccaatagaacctgagaacttgggactgccaggccaactctaggtactagttcctgacatttctttgaatatttgggtggtcacatttgttttctttggtcatacttacccaactggacctcttttttgttgaaatgtgaactctactgctagccagttaaagttcattgtttttcagaactttgattttgaagatgaatatgactttaacctggccatcatgtactgctttttcatagttaattcaaaacagagcagaactctggggattagttcaatagaaacaatgtattcttcaggatctttctctaagtagaggaactttcttgacccttacacagcaatatatggactttttggactaccagctcatggttattcttaatgtgatccagaccccagggccatccccaggaaaaggaagcaaagcacctccccacagtaggcctgtgctagacacagtggacacacagtggaaacaaggtccctgcccaaagacctcaaaatttattgtgagagatgaattggtaattaaatagctgattattttaaaagccctaatacagttgtgtttcatgtacataactgtaaatgaatgtaaaaagtgctgtaaaatcacagtgggagggattcattcttgcagtgaggaagaaggatgaggattgaggaagacttcaaagaggtgagttttgaaatagggtttgaaggacaagtaagagtttactaggcagagatgcatggaaagaacattccaggcagcagagacagctaaaataaataaataaataagtcgcagagtaaggaaaaggatgggaatgagaagtggttcagtgttactacagcatagagcaagcttgtccaacccacagctcaggatggctttgaatgaggccaacacaaattagtaaactttattaaaatatgagatatttttacaattttgttttgtttttgcttattagctatcattagtattagtgtattttatgtgtggcccaagacaattcttcttccagtgtggctcagggaagtcaaaagattggacacccctggcatagagtattttggggtgacatgatgggagctggagaagtaggtaggggtcagaattcagaaggccttggacaccagcctaaaggcttagagttgctcccattggccatgcactcaccaaaggtgttcacgtccctcttttggctgttagattggatgggctcaatcttttggccctctgtctctagaatagagccgctgcttttctactgggcccactatttcttcctggtcctctgatccccttagcactacacagatctcgatatttgcctcgggtatcaaggctctgaaaatgatcaggatttagaggagatggctcattttcagaaagagttttatattctccctctggccttatacactacaggcaaatggcaccgatgttttggagttgggccagttgggccttttctcccctcaagagaggaggattcgatattcagtgtttctgaatttcatgcttagttcttaagccatttcccatttgccctaagaaataagagctggcagcaagctgcgctgtttttttctaaacgggaaatgggttaagcatttgtgatcaccactgaatgagtgccagagctggttagtgatcttcctgttcaatccgaggtcacctaactagataacaaagagctgaaactaaaagtccggtctcctgactcccaatccagtactctttctggtgtgctccagcttctggctctgcttagccaattatggaacagacagaatgtacttggctgccccaaacggctaaagggcagttctgttcccaaaatggaattctgttgtgcctcaagctaggcagcataattgtgtgtcttttggtaactccctgtcttcttctgtaaaatgggagtagagcctacttaatcctgcagctacttctaagatcagggattggggcgtggtgggctgttctgcagctgttttgtgatggatgagggatgatagatctatgttcaagtagcggaatcttagagtcaggagttggaaggaatcttggaggtggtctgtggtgacaggaagcctcttccaatagactgaacacggaagacttcctagagccggaggacaagggtttctttcctcttagcagtgagcttcttgtttttggaaatgctcaagccaagaatggatgttcaggcagaggggattccgctcggaaggggctttctgcactgaagtggtggccagcgggaaactccaggtttccaactcctgcacaaatcctttctaatatccatccactcaggtgagctggcagggcagtagctgtgcagggttcagggtcattatatgtcaatgaccttcagcacggattactaacaacagtaacatccgttaccgtttactgctttcctattaagcaccatgcactgtgcataacatgttatctttatctcatatctagaattttgggaggtactttgaatcattacgatctatctacttcttaggtgaggaaatagaggtttaaaatttagtccacagtctcgcaaggatggagcctggatcaaattttgggttatcagattccaatcacgtttcttagcttttcttttttttttccaactccagtttctgtcttgctccaaaaaaggggaaggagcggctgcggcgctcggtttcccgcctcctagggaagggaagggagacgagcagcgcggaggctggggcccccttccgggcggggcctactagtgggcggggcctgtcagtgagcggcccctgcccggaaggagccagtccggggcggagccgatggccttacaggggccggaagtggcctgcgggcggagaagtgcctcaggagtcctgacgcagtgtcttgggcgctaacggcggcggcggccttgtgtttagactccagaactccccacttgccgcgttctcgccgccgcaggctcccgggacgatggtgccccgcctgctgctgcgcgcctggccccggggccccgcggttggtccgggagcccccagtcggcccctcagcgccggctccgggcccggccagtacytgcagcgcagcatcgtgcccaccatgcactaccaggacagcctgcmcaggtgagcctggcctccgggtccccgccgcccgccgccgtcccaggatcggccccaacctgactgcagtcactcatgactcctctagtgaacccgtttccgcccccaagcccctaccatggaggctgccacagcccctaatctggaagtcttgggacttttcacartctcctagcacaggaacctcagaaccctcaaattctcttccagaacccctcgatgctatctcagattctccatcttgaacgcttctcagattccctctcctttaacctaacttccagccagctatcctgagtcctcttctccctgaaaaatgccagacctgcatatttccagcgccgctgtaatccctcgactatgktgtctcctgaagtactttaatgactgcctcacattcctacccggaatatgggtaggctgattcctaatacatcatggttaccattccttaacttctcccagcaccgccttcacccctgtcactcaggaccctcagccccacctcccatttctccagtactctgttctttcaccccccatgagcccccacaagcacagccctgaagtgttcacccttgtcctcaactgaccctcccccatgtttttaaatctttaatctcctaaatccagtgttcacccggaaacctttcactctctccaagccctcctcaacaggttcctcccctcaaaatatccttcctcacccacagtaccccttgtaagtgcagctcaccctcacagaattctagacaccaccctcagtaccccatccacactccatcatactcagatccagggtccacccaaatttctcttctcctcctcaccactggctaccctgccttcgaaacacttcacccagaatcgacttcccctctgaaaagagccctagtaaatcctcttccccttccctcccccagtactttcttaaatccagcttccagttcttccagccttcgaactccgctttcgtctgagttgccagatctccttcttcaatattagaaattttcttcaccctctaaaccaaacctaaactaacttctaacttactgagtgagtaactcagttcctggagccaagttcaaaatttgtctcaaagacccttctcaccttatttctcaccaaactgccctcagggattccccacactccaagagctagaggccaggcttcttccccatgtgtggaacattgtgtcacaggcctcacccgagctgctgggttgtttttctctgcatctgggaccacttaacccaacgtcatcactacataccctcaccctctcaggaggatcgagtgattcttgtgaaattacattttgtgcaaacatctaagacatgaaaatgagattatctacacgtggcaggagggaggaagaaaaaggggctttgtgcctgtggcataagcctggtacatgcttccaccctgtcaacctgtgtgtatgagctgagccagtatatgggtgaaaggtgaggactgacagaacctgtcttcacttgccaagttcagagtcagatggtcactgactttcaggcaggcctgggccccacccaggtttaagatcagagggattttctgcactttagaattggaaagctggaaagaatattcaagattatttattccaaccccatccatagcacagtctgtaggaatctggaggtaccaattcaaactccagttcaaatagtaccactagtcacctacgcataaccttaagcaaccaacctcccccagacctccattaccttatttgtaaattgggagttagatgagagatgagattccttctgtcgctcagattctagactggtaaaatgtataatctttcacactcactcattgatgtcacacttggtgaaaagccctgactttgaggtctggtagaatgtagttgcagattctggatctgcaagtctttagctataatttggggcaattctgttcacttcattgagccacagttttattttggtttttttgagacagagtctcgctctgttgcccaggctggagtgcagtggccctatctcggctcactgcaacttctgcctcccgggttcaaaggatcctcccgcctcagcctcccaagtagctgggattacaagcatgtgccaccacacccagctaatttttgtatttttagtagagatggagtttcaccatgttggccaggctggtctcaatctcctgacctcaagtgatctgctcttggcctcccatctgggaccacaggcatgcaccatcatgcctggctgattttttgtatcttttatagagacagggtttcgccatgttgcccaggctggtcttgaactcctggactcgagcaatctgcctgcctcggcctcccaaagtgctgggattacaggtgtgaaccacsgtgcccagcttcactccagaaatttttaagtaggacttttttaaatcaaattgccattgtctctaatctagaattttgtttaaaaggaagaaggtaaactttcatgaatattcctactgtaataaaactaaatcttaaacatatgtaggcaactggaattatgaggtagctgagatagtatttggaatttttctgagtaagtcagtgaatgtaaggggatctgtggtgttaaagtgttgtaaatgggtacttagtgcagtctaagtccataatggcagtaaataattgatttatttttgtcatattatggataaacatgcattacaaataaactgatgaaccacagtatatcttatattaggcttttaaactgctttatgtatcatgtttcagttttcctaaatgactgatacatttcagtattttgcatatcagtgttaattttgagttggtagaggcarcctaacaaactctgattgttttgctattaggggatatttccttcaataaaaccaatgaattgaaagagaaaatacacctcactttactgtccatgtgttttcatttcacaataagccagtaacttcatcaccatagccatctttgggaatcactagtagacagaatgataagtaggcaaattgctgttcctgttatttaagcacagggactatttggttcttcctaatggcgttcctggtatctgggcatggctcactggtcgattcctaccttttagtgactgtagcccccatatatggctggcccttggacagatctgtgtttcactcttatataattatttgttgtaaaatgcagaagaaaatttaaaaaatagaaccttttcattttatcctaggggagaaaaatgcagttgttcaaactaagggtagaattaaatcagggccaatacagtgttagcacaggtgttatcattgtgaccagaaaacaggaatycttggggcagcttctgcttccccattttgaatctattattgttatttaaaataattatatttgtattttacttaaagatttagttgttattttacttaaaagtagagttaccattgatatacttggcattagtaaacccattgattctgatttgtcagtcgcttctgattattggttttgggggaggaaattaatgatctagtaatcagttcattagcttgtaaagctaattaacctcttccatatactgtcagccttacactgaccctgctttctccccaggctgcctattcccaaacttgaagacaccattaggagatacctcagtgcacagaagcctctcttgaatgatggccagttcaggtaaacactgagaaccttgggtgagcatagttggggtggttcaagacaggctggcaagtagtggtggaccaagcttcagggaatgtctgtgacgtggctgggtctccaggaacccagaacctagttgtacatctgcaagttcaggaaatagattttcattcatgaaggactgaccaagccccgagagttcctctaaacaggctcaacaggagatagtttataagccagaatgccaaatgtgtactttcccttagcaggtgtacctgggaggctcgctggtcctggtcatttatagagagcatgtacccttggaagggaggtccattgaggagaccatacggcagaccagaagtctgcatcgtgagcatgtttattgagttggatagcatgcctccaaaatttatgccctttttcatgaaatttagtatatgatcttatttggaattagggttgtggcagatgtaattagttaagatgaggtcctactggagtaktgtgggtccttaattaaatatgactggtgtccttgtaagaagacacagagacagcggtgtgaggacacaggcagagattgtgtcctctgcctgtgtcaacaagccaaggcatgccagggattgctggcaacaccagaatctaagagaaagccatgcaacagattcttccccagtcttcagagaagatatagtcctactgacacctggattttgtccttaaagcttccagaactgtgagagaataaatttctgttgttttcagccacccagtttgtggtgttttgttatagcagtcctaggaagcaaatacagcatggaattggaaaataatatcaaatattgtcaaaaagtggattgcattaagctcttatagcctagtgtagtactctttttccataatggaaatttttctgtacaggtaactggcattgttgttggaatcacagaactcttcactggacagtgatggagaagcagatgaattatccataatctaggcctctgttttcaaatatttgttattagtcatttaaagtttctcttgatatggtaatagctaccagttattgagtattatgttttaggatattytaaatccttagctttataaatatttttaatcttgtaaagtggtattattatccattttacacatcaagaaaccgagactcagatcaagtaacttatccaagatcacacagtttgaaaagcaacagagctaggattcagacttaacttctgttgactccagagcttgtgtccttttctccatgccaaactgcctcctaggatatggattattttgtgagatgttgattgattttcctaatcattcattttaagaaggtagtctagattatcaattttagattgattcctgttctggttagaggtactttctgatctcattccaggttttagggctatgctgttggggacccaaaactctattatgagttcctcgccatgaacctaaaaatcatgtattccctaccatggtttgattttgtcttttcttgaatgttttaggaaaacagaacaattttgcaagagttttgaaaatgggattggaaaagaactgcatgagcagctggttgctctggacaaacagaataaacatacaagctacatttcgggtaggtaggctgggctgtgggtatgatttctcccagagccctccataatgaaaagtaaggcatattctctcctgttttggtctcagagatatttttggtgagaccagcaaatgaagtaayrtctcatcctcccttcctgaggtaaattaaggctgagtgtgttcctcctctactgaggtgttgacttgagcccatgctcaagaatgatggccagccttctctgtagatgggattgaggcagaacctaatcaatggtcctgtctgaaaaggatgcaggattaagtcctatgtcctatatcattctgggtccttcactgtcagacagaactgtcctctccagcctcttctctcaccacccaccctgacatacttcctgctaaactcctcattgctccctgaacccttagtctttcattcttttgtgcctttatccatgctgttcccactaccatttttttgcctggcaaattcttcttttaagatccaaggaggatggttttctgtgaaaccttctcagtcctttttcctttccattcagagttggttgcttccacctctgttcctacagcacttcttttaatttagtttatatatttaccaaggttatacatgcatatagtttaaagaatcagacagttctataaggcttgttaggaaaaacagcaacttcctcatcatcttatttcccacttctcactttcagctcctaaatcttttgttatatacccccgtatctctaaattagatacttaccttactgcatcttgatttttttgctttagtcattagctattgacatctcactgtagaagattagaattcagcagtactttacatcccaccacatatgtgggatgtgtatacacatacttcctatccccttattttcacagcatagggatttgtaattttgggtaactcagtatctagttttatgctattatgatcatagaaacactattgtcagctgactcatgtagcatattgggattgtttttcctttccagtacaaactttttgttttctctgaagttaataattgttccatcttttctcttgtttagttttctatgtgcttactaatttacccccagactcttcccaagctgtctgaatctcctctcaatacatgaaagcagattggacattctatcccttttggtcttcttgacgaaacttcttccagaacttgcgacatgctgtagtctggatttgtgaacctcttggcctactgtgaagctgctctcctgtgctctttcaccatcagctggggcatctgtcatctctctctcatgttgggactcgtgtttcttgtctttcatattttcttatttcttggctttttctttytctttttttttttttttaaatcagagcacatattccctgtactatctggaaacagaatatgggaagcaaaaattttaaaatggcccttatacttcattgataatttgtttggctgggtttgaaattattttcccacagaattttggaggctttgctccattgtcttttagcatccagtgttgctgttggtaaatctaatgttattctgagacttaatcttttgactacttcttctctctgcctttggaagctttttagaattttctctttgtccccagtgttttgaaatttcaggtaatgtgttttagtatgtgttgggccactctgtgagtcctttgaatctggaatctcatccttcaggtctgggatatttccttgttttatttctttggctttcttcctctccattttttttctctgttttttctttgtggaactctattattattcaggtgtagaatttctgggtctcatcctctaattttcttttctctcacatttttcatctcttactctttttgttacattttcttgggagacttacttaattttaatctctcaacctgtttttaaaactcctgctttcctattttttacttccacaagctcttttttcttcttatggtgttctttttaaaaatagtttatctctgataatttttttttaagatctcttctctcttcatagtctgttgcctccaagttgcttttcttctgtttgctttgcccttttctttcttcagatgcttcataatcctgtgttgtcttcgatatgagtgagatattaaaaagctcttggaagctatgtggatgggggtgaggcttgtcagttacaggctttgctctaatgtgattgatatggtttggctctatgtccccacccaaatctcatcttgaattgtaatccccacgtgttgaaggagggacctggagggaggtgattggatcatgggggcagttttccccatgctgttctcatgatagttagtggtttctcacgagctctgatagttaaaaagtgttcagcagttcccccacttgttcgctttctctcctgctgccacataagatgtgccttgcttccccttcaccttgcgctgtgattgtaagtttcctgaggcctccccagccacaaggaactgtcagtcaattagacctcttttctttataaattacccagtctcaggtggttctttatagcagtgtgaaaatggactaatatagaaaactggtaccaggaggggggcattgctacaaagatacctgaaaatgtggaaacaactttggaactggttaataggcagaggttggaacagtttggaggggtcagaagaagacaggaagatgtcagacagtttggaacttcttagagagttgaatggttttgaccaaaatgctgatagagatatggacaatgaagtccaggctgaggtggtctcagatggagatgaggaacttattgggaactggagcaaaggtcactctactgtgctttagcagagagactggtggcattttgtccctgtcctagagatctgcagaactttgaacttgagaggggtgatttagggtgtctgacagaagaaacttctaagcaacaaagcattcaagatggctttttctgaaagcatatggtcatatgcattcacagagagatgatgtgaaagtgggacttatgtttaaaagggaagcagagcataaaagtttggacaatttgcagcctgaccatgcagtagaaaagaaaaacccattttctggggagaaattcaagccacaagctgcagaaatttgcataagtaatgagaagccaaatgttaatagccaagacaatggggagaatgtcttgagggcatttcagagatctttacagtagcccctcccagcataggcccagaggcctaagagggaaaaatggtttcctgggccctgctgttctgtgcagcctcgggacatggtgccctgtgtcccaggcactccagctccagccatggctaaaaggggccaaggcacagctctggccattgcttcagagggtgcaagccccaagcattggaggcttccccatggtgttgggcatgcaggtgtgcagaaaacaagagttgaggtttgaaaacctcgtccggccgggtgcggtggctcacgcctgtaatcccagcactttgggaggccaaggcgggtggatcacaaggtcaggagatcgagaccatcctggctaacatggtgaaaccctgtctgtattaaaaatacaaaaaaaattagccgggtgtggtggcgtgcacctgtgtcccagctgctggggaggctgaggcaggagaatagcgtgaacccaggaggcagagcttgcagtgagccaagatagcaccactgcactccagtctgggtgacagagcaagactccatttcaaaaaaaaaaaaaaaaaaaaagagacaacctcctcctacatttcagaggctatatggaaacacctggatgtccaggcagaagtctgctgcaggggtgaagccctcatggagatcctctactagggcaatgcagatgggaaatatggggttagagcccccacacagagttcccaatggggagcctagtggaactgtgagaagagggccactgcccttcagaccccagaatggtagatccaccgacagtttgcaccatgtgcctggaaaagccacaggcattcaatgccagcctgtaaaagcaaccatggggctgtactctgcagagccacaggggcagggctaccaaaggccttgggagcccacttcttacatcagcatgccctggatgtgagacatggagtcaaagattattttggagctttaagatttaatggctgccctgctggatttcaggcttgcgtggggcctgtagcccctctgttttggccaatttctcccttttggaatgggagcatttacccaatgcttgtaacaccagtgtatcttgaaaataactaattggtttttgattttacagactcataggcagaaggaacttgcctttactcagatgagactttggcttgtaattttgagttaatgctggaatgagttaagactctggggcactgttgggaagacatggttgtgttttgaaatgttagaagtacatgaaatttgggagaggccagggcagaatgatgtggtttggctctgtgtctccaaccaaatctgatcttgaattgtaataatccccaagtgtcaagggagggacctagtgggaggtgattggaycatggggtagtttcccccatgcttttcttgtgatagtgagttctcatgagatctgatggtttaaaagtgtttggcagttcctactccttgcttgttctctctcctgctgctgtgtaagatgtgccttgcttcccctttgccttccaccatgattgtaagtttcctaaggccttcccagccatgcggaactaagtcagttaagcttctcttctttataaattatccagtctcaggtagttctttatagcagtgtgaaaacagactaatacagtgatccagctaaactgcttccctgggttgcccctaatggtagtgtagttgggttagcttccctagggaggcttttccagtaaactgccaaaaggttgctagtgttgtagaaggcagggtaagtaagggaagaaggtttgagatctcaactgtgattcaggtctcccagttttattttatttatttattttttgagacagagtctcattttgtcacccaggctggagtgcagtggtgcgatctcagctcactgcaacctcagcctcctgggttcaagtgattctcctgcctcagccttctgagtagctgggactacaggcacgtgccacgacacctggctaattttttgtatttttagcggagacggtgtttcaccatgttagccaggatggtcttgatctcctgacctcatgatacacccacctcgccctcccaaattgctgggattaccagcataagccactgcacccagcccccagttttattatctccagagagtaaaacttaagtcttctacaggagtgaggagggaatctcaggttgtggtagtggtgatataattgaatagtccttcaaccagatgtatctaggttgccaattactgagccctctgggggttctgctgtgcaaatcatatgatttcttggctttctctcctgccaatttaggattggctttcttgagtctgctttagtcattaccagttgcataagtgctttccagcttccagtatttgttttctcgtctcccattctcttggcctgactggtttatgtctctttgaaattcttttgctaaaggggggtcagaggcatgaatttatgtcttctttcatcaaatatatcttatccaccagtacttttctctcaccattttagtgcattgcgttatgttttaattatttgcctccttcaccagagtttttcagaatcaaagaccatgtcctattcctctctaaatcccctggaccaaggcctggcacagcactgattctcaagggatggaatgagtggatggaccaacaaatgagtaacagagaaatctgcatctattaatccttttcccagtgctatacatatgaacattatttgcctgaatgatagtccttatttatagagtttattcatgtttactaatcccagcaggaactttccctgacatattttctgataaaatattgcttctggaatttttacaggtaaaacatctataggaactcagagggctagtctgagtgatccatgcactgatatttataatagcttttttagtactttctaaacagggagtgtacaaatgtacactgtacatagaaggacaatgaagacgttccccccttatcggggagcaatcaagtatgattgttgcccctgaaaggagatgaagcaagagaaacctaaagagatggggtgggaattaactattctgttccagcatgaatgcaagtggagtgttaccatattttattcctttaaaccaagaaaggaaacagaagaggaagaaaaagcaattaataaacattaggaaaatgcaaaccaaatctgcaatgctatactactttacacctaccagaatatctccacrccacaagacatgtaacaagtgctgctgaggatgtggaaaaattggaaccctcacagacagctcgtgggaatggtgcagccactttggaaaacatcctggcagttcctcaaaggttaaacagagacttaccatgtgatagtagttccactcctagctatgtccatacaaaaacatgtataagaatgttcataacaacataattcttaatagctaggtgcagtggctcacacctgtaatcccagcactttaagaggctgaggtgagaggattacttgaggccaggagcttgaaaccagcctgagcaacataataagaccccatctctaccaaaaataaaaaaattagccaggctggtggtgtgcatctgtagtcctakctacttgggaggctgaggtgggaggatcgcttgagcccagggttcaaggctgcagtgagccatgatcataccactgcaatccagcctggatgatagaaatcctgtgtctcttaaaaaaaaaaaaggcaatrtaattcataataaagagtggaaacagttcaaatgtccattacctgatgagtggataaacaaaatatagtatatccatataatggaacattgttcagcgctaagaagaaatgaagaacttaaatgctacaacatggatgaaccttaaaaacattattaggaggccgaggcgggtggatcacctgaggtcaggagtttgagaccagcctgcccaacatggtgaaaccctgtctctactaaaaatccaaaaattatctgggcatggtggaggacgcctgtaatcccagctactcaggaggctgaggcaggagaatcgcttcaatccgggaggcggaggttgcagtgagccgagattgcagcactgttctccagcctgggcgacaggagcgagcctccgtcccaaaaaaacaaaacaaaaacattattgtaagtgatagaagctaaatgcaaaacaccatatattgtatgaccccatttgtatgtcytgaattattgcagagcaaaaacattcagggaattcttctctctggaggttgatgccatttcctttgtctatgcttgaattttttttcttcttcaaattttatttttagggacagcattaacattttatgttatttttttctttttattttttaggaccctggtttgatatgtacctatctgctcgagactccgttgttctgaactttaatccatttatggctttcaatcctgacccaaaatctgagtataatgaccagctcacccrggcaaccaacatgactgtttctgccatccggtttctgaagacactccgggctggccttytggagccaraagtgttccacttgaaccctgcaaaaagtgacactatcaccttcaagagactcatacgctttgtgccttcctctctgtcctggtatggggcctacctggtcaatgcgtatcccctggataygtcccagtattttcggcttttcaactcaactcgtttacycaaacccagtcgggatgaactcttcactgatgacaaggccagacacctcctggtcctaaggaaaggaaatttttatatctttgatgtcctggatcaagatgggaacattgtgagcccctcggaaatccaggcacatctgaagtacattctctcagacagcagccccgcccccgagtttcccctggcatacctgaccagtgagaaccgagacatctgggcagagctcaggcagaagctgatgagtagtggcaatgaggagagcctgaggaaagtggactcggcagtgttctgtctctgcctagatgacttccccattaaggaccttgtccacttgtcccacaatatgctgcatggggatggcacaaaccgctggtktgataaatcctttaacctcattatcgccaaggatggctctactgccrtccactttgagcactcttggggtgatggtgtggcagtgctcaratwttttaatgaagtatttaaagacagcactcagacccctgccgtcactccacagagccagccagctaccactgactctactgtcacggtgcagaaactcaacttcgagctgactgatgccttaaagactggcatcacagctgctaaggaaaagtttgatgccaccatgaaaaccctcactattgactgcgtccagyttcagagaggaggcaaagaattcctgaagaagcaaaagctgagccctgacgcagttgcccagctggcattccagatggccttcctgcggcagtwcgggcagacagtggccacctacragtcctgtagcactgccrcattcaagcacggccgcactgagaccaycygcccggcctccgtctatacaaagaggtgctctgaggcctttgtcagggagccctccaggcacagtgctggtgagcttcagcagatgatggttgagtgctccaagtaccatggccagctgaccaaagaagcagcaatgggtgaggcaggggtggggagcatgcccttgggtcttgtcctcagtgcttgggtaarcaagcctaaatcattctactccaaatctgatttctacccgttcactaggtttaatccatcgccaactccccaaatttttcttttctaccctagcagtctgaacagccacactagccactagggatcagaatgttcttgcctcctaagcaggggtggggaaatgcatgtgtctttgtcctcatttaaggtcactttcagctgtgacgcattaattcttttttctttcttttttttttttttttttggagacaagagtttccctccgtccaggctggagtgcaatggcgtgatctcggctcactgcaacctccacccccaggttcaagtgattctcctgcctctgcctcccaagtagctgggataataggcacccgccactacacctggctagtttttgcatttttagtaaagaaggggttttgccattttggccaggctggtcttgaactcctgacctcaggtgatccatccctctcagcctcccaaagttctaggaatacaggcgtgagccaccgcrcctggcctttttttttttggagacacggtctcattctgtcacccaggctggagtacagtggtgcaatcatggctcactgcaacctcaacttccttggctcaaacaatcctcctgcctcagcctcccaaatagctgggactataggcatgcaccaccatgcccagctgatattttaattttttttttttttttgagatggactcttgctctgttgcccaggctggagtgcagtggcacaatctcagctcactgcaacctctgcctcctgggttcaagcgattctcctgcctcagcctcctgagtagttgggactacaggcttatgccaccatgcccagctaatttttatattttcaatagagacggggtttcactatgttggccaggttggtctcaaactcctgacctcatgatctacccgcctcaccctcccaaagtgctgggattataggcgtaagccaccatgccgggcctaatttttaaaattttttgtagagatgaggtcccactgtattgcccaaggtggtctcaaactcctgggctcaagcaatcctcctgccttggcctcccaaagcactaggattataggcatgcaccactgcacccaacctttttctattactgattggttatcagactcacttttgaaaatttaggatttctaaacttacggccccactagcttcacctcagttgtaatgtgtctgctctctgtaaacaggttatctcagaagctcttctcaattgtcatccgtcattacctttttttgataaaattcaagacctggaaaggacctggagggtcatagttgtcctttcatgttgctatgaagtgctggaagtgaaagggacctccaagacattctaatcttctcttcctccattttatagggagaaaaccaagccactggccccgttacacagcaagttagtagtaagactgagattcgaaccctggtcaaacagactttccattttgttccactgactcartcttctcttttacacttgaatcagacttttagttttattgtagtttttgagtccatagctgtcttcctgtactgtcttgactctttgactaaactgatttcacatctttaaaattatgctttccttttaggctcatttttagctcagctgttgacagctatttttaaatgtaayatgacataatatatttcctaaataatttaaaataatctagcttgagctgctctgaaggttagtcagttggtggtgtgcatagaggtagagccttcccccactctcaaggatgctgtgaggggtattcctaccatgtggtgagttgggaggttttcctgaggtccttttccatcctgagactctggttttccattttgtttctcacagrccrgggctttraccgacacttgtttgctctgcggcatctggcagcagccaaagggatcatcttgcctgagctctacctggaccctgcatacgggcagataaaccacaatgtcctgtscacgagcacactgagcagcccagcagtgaaccttgggggctttgccyctgtggtctctgatggctttggtgttgggtatgctgttcatgacaactggataggctgcaatgtctcttcctmcccaggcygcaatgcccgggagtttctccaatgtgtggagaaggccttagaagacrtgtttgatgccttagaaggcaaatccatcaaaagttaacttctgggcagatgaaaagctaccatcacttcctcatcatgaaaactgggaggccgggcatggtggctcatgcctgtaatcccagcattttgagaggctgaggcgggtggatcacttgaggtcaggagtttgagaccaacctggccaacatggtgaaaccttgtctctactaaaaatacaaaaattagctgggtgtggtggcatgtgcctataatcccagctacttgggaggttgaagcagaattgcttgaacccaggaggtggaggttgcagtgagctgagatcacaccactgcactccggcctgggcgacagagcgagactgtctcaaaaaracaaaaaagaaaaaaaaactggggcctgtgtagccagtgggtgctattctgtgaaactaatcataagctgcctaggcagccagctacaggcttgagctttaaattcatggttttaaagctaaacgtaatttccacttgggactagatcacaactgaagataacaagagatttaagttttaagggcatttaatcaggaggaaaggtttggaaaactaactcaggtgtatttattgtttaagcagaaataaagtttaatttttgcttgaagatggttcttaatttcttttaacctaattcctaatcctcacaaagatctttccaacagcaagttcagtaagttcaggtaacagtacgtcaccattggcttctggctcattgagtgatggtgggatcgcggtttcatctctgtaaacttgcccttgactggggagataccatctccttaaaaatactcttcattttcctaaggagtgaactgctgctgcacgaattcttatttgtggagggagtagctgcctccttacttcaccttcatgcaccagtgcagcgtgaacaggggctttattgatggggcttgggaagctgtaataaagtccagcatgcagattgtgaaggtttcgtatagccaccaggagacaagggtcaaaggaacgagcctctgtgggctctgctgcttagagtactttgtcctttctcagttcttaagggcaactgggaaggaagagggatcagcacttcacaaactggtgggtgacctcatagattcccacagactcctgggccttttcatcatagtcagtccagtcctgggaaacaaaatggcattgttagcctcacaacgcagaatgcagccatgtggagagcagaaaactgggacttaaaaggcccagctcaggctctgactcaaataatcatgaacatgtatgaccctgaacagagccagatagctcaggcctgaattctagctctttcagttgtatgactgtgggcaaatcacttaacttctctgagtcccttctccgagtcctgtcttctatttaaaaaaaacaaaaacaaaaaaaggacaatggagttcatattgaatgttgaaagaatcaaatgaggtaacacatttaaaagcactcagcagccgggcgtggtggctcatgcctgtaatcccagcactttgggaggccaaggcaggtggatcatttcaggtcaggggtccgagaccatcctggccaacaaggtgaaacccggtctctactaaaaatacaaaaaatagccaggaatggtggcaggcgcctgtaatcccagctacttgggaggctgaggtaggaggatcacttgagcccaggaggcagaggttgcagtgagctgacattgcaccactgcactccagcctgggcgacagagtgagattgtctcaaaaaatacataaaataaaataaaagcactcagcatagtgagtgcctggcacatgtaagagctcagtagatgctagctgctgttattaggtgctgagcaaatgaaatgaagtttttgtccttccttcaaggcttgagcacaaggcttttctatctgcagggtagtaatatgtccagtaatacagactatttcttgttcttcatggtagttaggtgcagtaaagccaccacaaacactgaattagggaatactgaatgaatactccccggggaaatacagggttaggttcctatgagcctctggtcacattttcatcaaccaatcaataatctagctttatgtgtttctgtttaaagataacttatttaatatatattgttgattcatgaactcacagccagcagcactatagctcatgcctgaataaagcttatctaacacgtattctctctgtaaggggcatcatagctttctcatacgtaggaacattagaaagcactttagcactatacctgtggccatttcaacagcaaaatcactaacaaaaagcacaaaaatacagagttggctttccattgatgagccttgtccaccaaaaaaataattcccaccaggtgccctacagtacctcccaaagcccccaagtctcataccttctcctgcagattaatgtcactgaaggctgtccctgactccacaccttcagcagcaaacccagcctgcagggcacaagaaggtaccagttagtcttggcaaaagaaggcattgggctataagtaagggccggccaggctgctggctcttctcacacttctgggatggaggacagagatgcagtatgagtacctgtcttggaataactgctgagcttccaggacccggcagctgcctcagaactagagtggtggtttctctgaattacagccttggaccagaaggcagcaggggcagcgtaatcccttccactagccctggtttgctgaaggctcctgggcatgtcatttcccaggttggaccttagttattgataaaacggggatgaagtatttgctcttctgcctacctcacagatttgttgtgaggtgaaacatgcacaaataaagggggatgagcaccagctcaagtcagatagatctgggttgaaactatagctccactgcttactgtgtgaccctgagcaagttgcaaaatctcttcagttccttcctcatctgaagaacaggatgaataaattcatagggttaccataagaattaaatgtggtaacatgtaaaaatgatggcatgggtgcccaagcatacagcagccacttaagggacaattattactaccgctagaaaggagaatgtctagtccatggtatctgtaggtagcacagttctggctgtcacttcatacatcccctccccaaagacaaagattccccagaaagatacacacacacctgcggctggaaatcaactggttcaaggccccggcactcaaactccactattgtcttgaagttctcattgtcttcagcctagaaaggaagtgtgttgaggaggcaggcccaaatgagctctcaggatgaccccatggcccctctccttcctgccaaatgggcacttactgcccctggaggcctagtatgagacccaggaagaactcatccccttcttagaggaagcctgccttgggcacctgctccctatgaagctttctgtagacagcagacatggaggctgcagaagagcgtggatgctggggtcaacctgcctggatgtaaggtaagctctgcctatcttcccctctgggcccaagattcctaaactgtcaaatagagccgaggaaacctctacaattttactgtcagattttgaaatgcatataaagtgcccagcacagtgctcaataaatagtaaataaaattatcaacaccaaaaatatgaacaagaatgttaagctccaaagtctctagatcatccaaacagacccagtacacttaaccatagccttttgctgaccatctgccatgcagtaagggcagagggctgtcttatagcctttgaaatggttatgtatgtggagggggcacctcttggggggcaggtggccaggaaattcatgcctacctgacctatgggcttagggaccacaagtgccatgccctacattcagtctcatcctgtcattcactgtaaagtaatttcctgcacactgaccacatctctggcactggtaaggcacttctctgttagggccctagttcgattcttgttttttgtattttccactagattattatgtacgtgaaggcgagtcctcatttaatttctctttaacttcaggacaaagccaagaatttggcacaactcaagatactttaaataaataccaaataaggaataggtgaatacatataactggctttctttaaacaaacagatccaaagcacaccctccctcacctttgggctaacttgttaacactgatgatataaaggatgggatgcaccaaacgactaccccacccatggtttcagagaaagcttgctagtcccctaaaatgaagacaaggcaagtgctctcagtgatgcaaactgaacagctaggttgtgtcagaggtcccctgagctctcacagcccagccctcataagaaggcactgcaagaggcaatataccaagcactcagtgtacagtggataaatgactgagtcaaagaagaactaagttcatgagtgaatgtcctatggcaggtcactctgatgcaggcatgactctagaacccagacctactaactccagttaggatttaagcccaccatccctgccactacagcagcaaacttacattgtaaggcttgatggtgctgcttaaaatctctgaaatagaaaagagaacacaaagttgacttgagtccataccctcgccccagccaggtgcccacatgtggccctgaaaaagatcacgctgtacaggtgtcggcatcttaggcctgactccaccctcaggtaacatgagtctactttcagcctggtgccaggaagctgtgggccaccctggcagaactcagtacgcacagcctgacctaccgatggaattttctcttgcacacagcttgcacttctggaccatggaagcactgccacggccccccttcagtgccacactgtcctggcaaaaagcaaacagaactttcagtcacatatgaattagatgtacagtcctgaggagatcgagcccaccatttattgtccacttaaagagaccaagacccagaaagggtaacttactaggacaagactcctgggaaggcttcctgaggaaaataaaaaaagggcttccccttgattttgaactctgcctcatacctcaaagatgcctattgaatccagtgctgatcacactgacacctaccctcccaaaccacaaaaagcagggagcaaagaactggagagatgaaggccagtttccccaaatccctgcccagaagtgtatgtgtgtttgtgagtgtttatgttgggggttgggcggggaacagttaccatcagccggatgtactgccacttgtccgaaatctcaccacagttgccacatttcatctttggggaaaaagaatgttagtaaagcagctggctctgctgcacagacaccaaggaaagggtaagaacagtgggaggtgggcaggctcatgatctaccttcttgatggcaatctcacttcatccctaacacctgccccaacaaggacaaaactagaactatctctgggcaaaggataggtaaggctgtttcctatgccggcgtgcccaccctcctctatgaagtgctcagtgtggccggggattcaaggcacctgtggtgcagaaatggtttcagcggaggtgaggggggggaatatggagagatttgttagaagatacaaaattacagctatatgggaggaataagttctagtgttctatagcactgtaggatgactatagctgacaataatatatagtttcaaatagctaggatattaaatgctcccaacacaaagaaatgatacacgtttgaggtgaatatgctaactaccttgatctgatcacaatacattacatttatcggaacatcactatataccccataaatatgtacaattctgtgtcaattaagaaaaaaaaagagaaatggcctcagcaggcccccgacccactctgcttggttagctttatgttcccacaggccctgtatgtcactggtataagcacttatcactctattgttactctatttttctgtctccttcactcgattccgcttcttcaagccaaagaacagattctcccaagtaagccctggtattcaggcttcaaaatcctgggaaacaaaagtagtccggaggcagcttcccgaaaaacagggcttttgagaggtacagaaggatgctgggatttttgaccaggagtaaaacagagcagaagctctgggatctggaagagtgaagagcctcgaactgctggggaaggggaggcctctgtagaccatgccactagggtaccagctttaccagtgtgggagggctaaggaagggtggattacgcacaaaattaaactatttcacaataaagaaaaccaaatcaataaacgaaaggcgaactattcaccttattaaataatcacaagcgtcccttcaagtagcatttcgtttagtgtccatttacagaccacgaaatatttaacacagggaagaactacaaaatgaagctttccaagactgccaattagagataaaccaatacactttaatagaaagcaaacgtaaaattctaactaggaaaaccccgaacacttaatgtgcctggttaaatattttctcatactgccggaga

SEQ ID NO: 95607 - DNA, 18983 bp, Homo sapiens
ttggaccctatttggataatgattcaaaaaaatgtaaaattgggccagatgtggtggctcacacctgtaatcccaacactttgggagaccgaggcaggcgggtcaccaagacctgcctggctaacatggtgaaaacctgtctactagaaatacaaaaattagctgggcgtggtggcataagcctgtaatcccagctactcaggaagctgaggcaggaaaatcgcttggaccctggagcagaggctgcagcgagcagagtttgtaccactgcacttcagcctgggcaacagcgagaccccatgtcaaaaaaaaaaaaaaagtaaaattaataccattaaggaaatttaacactggtttgatggtttaggtatgaaatagtatggtggttggagtttttaaaatcaccttttatagatacaaatattttaggttttagtaggtatttcagtgtaggggaaaatactttggtttcttacatgataacaggataaaatgtttggtctcagaaaagttttccattaatccattttaaaatcagaataccaacagccattcaggaccaagaccaagttgtatagtgtgggaatttgttcagcaggtagacctgtagacaactttttctttctgctaaattgcatggcttctttaagcacagtactggttgaacagattgcacctgctgaaaggaaccaggccttactaagcctcatttgaagggaagtgattagcctaaactcaccctactaaaaacaggccagcttgggacaaggtcccaagtgtcctgactcctggacccattctttttccaccacactctactccttcaaagactatggggcaagttaagaacagcactgagatgtcagggttcctgactccagtgcacctccccctataagagtacttggggcaatgaagcaagttggtagtaaagtagacatcaaaaaaagtcactctaaactttaaagaagtgacgggacctcaggtgataaaagagtcttttgttttctgaggcaaaaaaaactttagtaaagtattcttggccgggtgcaatggctcaccctgtaatcccagtactttgggagtctgaggtgggtggatcacctgaggtcaggagttcgagaccatcctggccaacctggtgaaacctcatctgtactaaaaataaaaaattagtcgactgtggtggcgcacgcctgtaatcccaactactcgagaggcggaggcaggagaatcgctcgaacccaggagttggaggttgccgtgagccgagatttcgccactgcactcaagcctgggcgacaaaagcaaaactccatctcaaaaaataaaaaataaaaagagaccgggcatggtggctcacgcctgtaatcccagcactttgggaggccgaggcaggcggatcacctgaggtcaggagtttgagaccagcctgaccaacatggagaaaccccatctctactaaaaatacaaaattagcctggcatggtggtgcatgcctgtaatctcagctactcgagaggctgagacaggagaatcacttgaatctgggaggcagaggttgcggtgagccgagatcatgccattgcactccagcctgggcaacaagaatgaaactccatctcaaaaaaaaaaaaaaaaaacaaaagaaaaaaacagggtttggctggtctcaaactcctgtgctgaagccgtcgtcctacctcagcctcccaaagtgctagaattacaggtgtgagccactgtgcccagctgtctgtctgtctgtctgtctgtctgtctgtctatctatctatctatctatatatatatatttttttttttttttttttttgagacagggtcttgccctgtcacccaggctggagtttagtggtgtgatcttggctgattgcaacctccgcctcccaggctcaagcgatcctcccatctcaggctcccgaaaagctgggaccataggcatatgccaccatgcctggctaattttttgtatttttagtagagatgtggtttcaccatgttgcccctgaactcctgagctcaagcgatccacctgcctcggcctcccaaagtgctgggattatgggcataagccaccgtgcctggcccctatttatatcttatactgtctatgttttgaaaagttattatttttgataggttcatcttttagtcttgctactcaatatatgagtagtttacacacaattagtgttaaaatcttttgcatttgtctgtgtagttaccattcccaatgagttttgtgccgtcagacgatttctcattgcttaacatccttttctttcagactgaaaaacactctttagcatttcttgaaggaaaggtctggtgtgttgacaaaatccctcagcttttgtttgtctaggaaatctttatttttccttcatgtttaaaggacatttttgctggatatactattctaggataaatgttttttttcttcagtactttaaatgtcatgccactctcctggcctgtaagctttccacagagaagcctgctgccagacccattggagcttctttgtgtgttatttgtttcttttttcttgctgcttttaggatcctttctttatctttgatctttgggagtctgattattaaatgacatgaggtagtcttatttgggttaaatctgcttggtattctataactttcttgtacttgaatatttatatatttctctaggtttggaaagttccgttattcttcctttgaataaactttctatcctaatttctctctaccttctctttaaggccaataactcttagatttgcccatttgtggccattgtctagatattgtaggcatacttcatccttttttgttattttttctttcaattcttctgtgtattttcaaacagcctgccttcaagctcactaattctttcttctgcttgatcagttctcatgtttagagaccctggtgcattctttggtgtatcagttgaatttatcagctccagaatttctatttaatttttaaaattatttccatctctttgtcaaatttatctggcaggattctgagttcctttttccatctctttgttaagtttatctggcaggattctgagttccttctctgtgctatcttgaatttcactgagctttctcagtgacagtgaattctctgaaaggtcacatatctctgtcactctgggattggtcactggtgccttatttagttcatttgattaggtcatgttttcttggatggtattgatgtttgtgactgttggtcaatgcagagcattgaataattaggtatttatcataattttcacagtttgggcttatttgtactcatccttcttcagaaggcttttccaagtactcaaagggaaatgagtgttgtgatgtaaatatttggtcactgcagctgtaactgcattagggggcaccccaaacccagcgatgctgtgactcttgtagactcagaggtactgccttgatggtcttgggtaagatccgagagaattccctggattaccaggcagagtctcttgttatcttcccttactttctcccaaataaatggagtctctctctccatgctgagctgcctggagttgggagaggagtgacacaagcacccctgtggccaccactgctggaactgtgctgtgtcaaacctgaagccagcacagtagtgggtcttgcccaaggcccatggtgactattgcctggttattgctgatgtttattcaaagcccaaaggctctttagtcagcaggtggtgaatccagccaggcttgtgtcttaccctttggggtggcaggttcccttctggcccagggtgggtttagaaatgctgtccaggagctagggcatggagtccgggctttagaaacctacttggtgctttattttactgtggctgagctggtacccaagttgcaagaccaactcctttttaactctttcctctcttttccttaagcagaaggagtctctccctgtggcaaccattactgggaaggcactgggtcacacctgaaggcagcacagtactgggcctcacccagtactgtggctattacaaatgtttattcaaggcccaacagctctttagtcagcaggtgatgaatcctgccaggactgggtcctttccttcaaagcagcgggttcccttctggcccatggtagctctagaaatatctgggagatagagcctggcaagggggcttcgggactctgcgtggtgttttattctactgtggctgggatggtatccaagctgtaagacaaagtcctctttactttcccctctcctttcctctaagggaaaggagtctctcctggagccgtgagctgtgctgcctggggttgggggactggtgacataaacactcctttggctccccaactggtatctcactaggctgtgtgcaccccaagtccacgggctctgagctcagcacagcaccaggacttgcccaggaattgcagtctttgtggcctagactgcctttcgaatttatttaggaccctgaagcactttagccagtggtggtggggctcgccagaacctgaccactgggatggatgattcccctctggctagggtttctctaagtgcttcctctgtgggcactagctgaattctgccctgagttgctttccactgtgacagggcaaaactcagttccaatgcaaagtcccataagcacacagattctctctctatgccaggcagccaggtgctgccagaggatgagggaggggtggtggtagcaattcaagactgtctttcctaccctcttcattgccttgttcctttttttttcttcttttatgagatagagtctcactctgtcacccaggctagagtgcaatggcatgatctcagctcactacaacctccacctcccgggttcaaacaattctcctgccttagcctccggagtagctgggactacaggtgtgcactgccatactcggctgatttttgtatttttagtagagacagggtttcactatgttggccagctaggtctcaaactcctgacctcaggtggtctgcccgcctcagcctcccaaagcactgggattacaggtgtgagccaccgcacccagccattgccttatatcttgatgtgacgttacaaccagctactgtgattgctacctgagttttggttctcatgaaggtgctttcttgtgtggatagttgttcagtttggtgttcctgccagggaagaggaggaggaggatcactggagggttctatttggctatcttgccccacctcctagaagagtcttgaatgtgctgttccttttaccgttaatctccacagctcctgcatggtctcagatgtagcctggacaggaggccaggtaaaataaagttcaataaacgttatgagagaaggataagccaggtgggctcccaaaaaagagccagctgaaggggaatgtccagtcgcaaggaccacagtgagaaggatgtggacacagggcaaactctggagaagggcctagaaaccaggtctcttgggtgaaacaggaaagggcagtttgaagaaaggcatcatccccaaatctgataaaccaatacattctactttttaaagcgtattggtttatctttatttggcagtcttggaactcttccttttgtagcttttcccctgggcagagggagctgacgtgatctgagaagttccagggcaggcagagtagtgaagagcctggaaagaactgagggtcaggaactgtcctgttcgcttaaagcaggcacaaaattggcgttcagtaactgtctgtggcaccaccgaatcctggagtcaggcttccgctggcctgagcacaggttgctcgcggacctggctgacctccactggccccagatccccagatgcgaaaagcccagtgggccaggcgagcagcsgcgcgcagaagtccctgccccgcggcccggccccggccccgccctactgagggtgcgcagacggcacccgccttttacgacgcgccggaaagcaacggcaagggccgcagccagcaccgggcggagagggctaccatgggggtgaggggaggccgcccgccgcggggacacggaggggaggtggcgagggtctgggaggcaacagctcgcgccaggaggagatgaagcgagtgggtgcgcgctgaaggagcaggaggcagaaggagtgtctccctgtggcacccacggctgggaatgcgggagggtcgggcaggcgtggggctgcgcaggcacggctgacgcagtcgctctggccctccccctcagaaaatcgcgctgcaactcaaagccacgctggagaacatcaccaacctccggcccgtgggcgaggacttccggtggtacctgaaggtgcggccggggcggggcccggggagaggaggcccgtcctgatctcagtgctgaaccggagccttctctccggcagtatgagaaaatatttaaccaggcacattaagtgttcggggttttcctagttagaattttacgtttgctttctattaaagtgtattggtttatctctaattggcagtcttggaaagcttcattttgtagttcttccctgtgttaaatatttcgtggtctgtaaatggacactaaacgaaatgctacttgaagggacgcttgtgattatttaataaggtgaatagttcgcctttcgtttattgatttggttttctttattgtgaaatagtttaattttgtgcgtaatccacccttccttagccctcccacactggtaaagctggtaccctagtggcatggtctacagaggcctccccttccccagcagttcgaggctcttcactcttccagatcccagagcttctgctctgttttactcctggtcaaaaatcccagcatccttctgtacctctcaaaagccctgtttttcgggaagctgcctccggactacttttgtttcccaggattttgaagcctgaataccagggcttacttgggagaatctgttctttggcttgaagaagcggaatcgagtgaaggagacagaaaaatagagtaacaatagagtgataagtgcttataccagtgacatacagggcctgtgggaacataaagctaaccaagcagagtgggtcgggggcctgctgaggccatttctctttttttttcttaattgacacagaattgtacatatttatggggtatatagtgatgttccgataaatgtaatgtattgtgatcagatcaaggtagttagcatattcacctcaaacgtgtatcatttctttgtgttgggagcatttaatatcctagctatttgaaactatatattattgtcagctatagtcatcctacagtgctatagaacactagaacttattcctcccatatagcygtaattttgtatcttctaacaaatctctccatattcccccccctcacctccgctgaaaccatttctgcaccacaggtgccttgaatccccggccacactgagcacttcatagaggagggtgggcacgccggcataggaaacagccttacctatcctttgcccagagatagttctagttttgtccttgttggggcaggtgttagggatgaagtgagattgccatcaagaaggtagatcatgagcctgcccacctcccactgttcttaccctttccttggtgtctgtgcagcagagccagctgctttactaacattctttttccccaaagatgaaatgtggcaactgtggtgagatttcggacaagtggcagtacatccggctgatggtaactgttccccsccyaacccccaacataaacactcacaaacacacatacacttctgggcagggatttggggaaactggccttcatctctccagttctttgctccctgctttttgtggtttgggagggtaggtgtcagtgtgatcagcactggattcaataggcatctttgaggtatgaggcagagttcaaaatcaaggggaagcccttttttyattttcctcaggaagccttcccaggagtcttgtcctagtaagttaccctttctgggtcttggtctctttaagtggacaataaatggtgggctcgatctcctcaggactgtacatctaattcatatgtgactgaaagttctgtttgctttttgccaggacagtgtggcactgaaggggggccgtggcagtgcttccatggtccagaagtgcaagctgtgtgcaagagaaaattccatcggtaggtcaggctgtgcgtactgagttctgccagggtggcccacagcttcctggcaccaggctgaaagtagactcatgttacctgagggtggagtcaggcctaagatgccgacacctgtacagcgtgatctttttcagggccacatgtgggcacctggctggggcsagggtatggactcaagtcaactttgtgttctcttttctatttcagagattttaagcagcaccatcaagccttacaatgtaagtttgctgctgtagtggcagggatggtgggcttaaatcctaactggagttagtaggtctgggttctagagtcatgcctgcatcagagtgacctgccataggacattcactcatgaacttagttcttctttgactcagtcatttatccactgtacactgagtgcttggtatattgcctcttgcagtgccttcttatgagggctgggctgtgagagctcaggggacctctgacacaacctagctgttcagtttgcatcactgagagcacttgccttgtcttcattttaggggactagcaagctttctctgaaaccatgggtggggtagtcgtttggtgcatcccatcctttatatcatcagtgttaacaagttagcccaaaggtgagggagggtgtgctttggatctgtttgtttaaagaaagccagttatatgtattcacctattccttatttggtatttatttaaagtatcttgagttgtgccaaattcttggctttgtcctgaagttaaagagaaattaaatgaggactcgccttcacgtacataataatctagtggaaaatacaaaaaacaagaatcgaactagggccctaacagagaagtgccttaccagtgccagagatgtggtcagtgtgcaggaaattactttacagtgaatgacaggatgagactgaatgtagggcatggcacttgtggtccctaagcccataggtcaggtaggcatgaatttcctggccacctgccccccaagaggtgccccctccacatacataaccatttcaaaggctataagacagccctctgcccttactrcatggcagatggtcagcaaaaggctatggttaagtgtactgggtctgtttggatgatctagagactttggagcttaacattcttgttcatatttttggtgttgataattttatttactatttattgagcactgtgctgggcactttatatgcatttcaaaatctgacagtaaaattgtagaggtttcctcggctctatttgacagtttaggaatcttgggcccagaggggaagataggcagagcttaccttacatccaggcaggttgaccccagcatccacgctcttctgcagcctccatgtctgctgtctacagaaagcttcatagggagcaggtgcccaaggcaggyttcctctaagaaggggatgagttcttcctgggtctcatactaggcctccaggggcagtaagtgcccatttggcaggaaggagaggggccatggggtcatcctgagagctcatttgggcctgcctcctcaacacacttcctttctaggctgaagacaatgagaacttcaagacaatagtggagtttgagtgccggggccttgaaccagttgatttccagccgcaggtgtgtgtgtatctttctggggaatctttgtctttggggaggggatgtatgaagtgacagccagaactgtgctacctacagataccatggactagacattctccyttctagcggtagtaataattgtcccttaagtggctgctgtatgcttgggcacccatgccatcatttttacatgttaccacatttaattcttatggtaaccctatgaatttattcatcctgttcttcagatgaggaaggaactgaagagattttgcaacttgctcagggtcacacagtaagcagtggagctatagtttcaacccagatctatctgacttgagctggtgctcatccccctttatktgtgcatgtttcacctcacaacaaatctgtgaggtaggcagaagagcaaatacttcatccccgttttatcaataactaaggtccaacctgggaaatgacatgcccaggagccttcagcaaaccagggctagtggaagggattacgctgcccctgctgccttctggtccaaggctgtaattcagagaaaccaccactctagttctgaggcagctgccgggtcctggaagctcagcagttattccaagacasgtactcatactgcatctctgtcctccatcccagaagtgtgagaagagccagcagcctggccggyccttacttatagcccaatgccttcttttgccaagactaactggtaccttcttgtgccctgcaggctgggtttgctgctgaaggtgtggagtcmgggacagccttcagtgacattaatctgcaggagaaggtatgagacttgggggctttgggaggtactgtagggcacctggtgggaattatttttttggtggacaaggctcatcaatggaaagccaactctgtatttttgtgctttttgttagtgattttgctgttgaaatggccacaggtatagtgctaaagtgctttctaatgttcctacgtatgagaaagctatgatgccccttacagagagaatacgtgttagataagctttattcaggcatgagctatagtgctgctggctgtgagttcatgaatcaacaatatatattaaataagttatctttaaacagaaacacataaagctagattattgattggttgatgaaaatgtgaccagaggctcataggaacctaaccctgtatttccccggggagtattcattcagtattccctaattcagtgtttgtggtggctttactgcacctaactaccatgaagaacaagaaatagtctgtattactggacatattactaccctgcagatagaaaagccttgtgctcaagccttgaaggaaggacaaaaacttcatttcatttgctcagcacctaataacagcagctagcatctactgagctcttacatgtgccaggcactcactatgctgagtgcttttattttattttatgtattttttgagacaatctcactctgtcgcccaggctggagtgcagtggtgcaatgtcagctcactgcaacctctgcctcctgggctcaagtgatcctcctacctcagcctcccaagtagctgggattacaggcgcctgccaccattcctggctattttttgtatttttagtagagaccgggtttcaccttgttggccaggatggtctcggacccctgacctgaaatgatccacctgccttggcctcccaaagtgctgggattacaggcatgagccaccacgcccggctgctgagtgcttttaaatgtgttacctcatttgattctttcaacattcaatatgaactccattgtcctttttttgtttttgttttttttaaatagaagacaggactcggagaagggactcagagaagttaagtgatttgcccacagtcatacaactgaaagagctagaattcaggcctgagctatctggctctgttcagggtcatacatgttcatgattatttgagtcagagcctgagctgggccttttaagtcccagttttctgctctccacatggctgcattctgcgttgtgaggctaacaatgccattttgtttcccaggactggactgactatgatgaaaaggcccaggagtctgtgggaatctatgaggtcacccmccagtttgtgaagtgctgatccctcttccttcccagttgcccttaagaactgagaaaggacaaagtactytaagcagcagagcccacagaggctcgttcctttgacccttgtctcctggtggctatacgaaaccktcacaatctgcatgctggactttattacagcttcccaagccccatcaataaagcccctgttcacgctgcactggtgcatgaaggtgaagtaaggaggcagctactccctccacaaataagaattygtgcagcagcagttcactccttaggaaaatgaagagtatttttaaggagatggtatctccccagtcaagggcaagtttacagagatgaaaccgcgatcccaccatcactcaatgagccagaagccaatggtgacgtactgttacctgaacttactgaacttgctgttggaaagatctttgtgaggattaggaattaggttaaaagaaattargaamcatcttcaagcaaaaattaaactttatttctgcttaaacaataaatacacctgagttagttttccaaacctttcctcctgattaaatgcccttaaaacttaaatctcttgttatcttcagttgtgatctagtcccaagtggaaattacgtttagctttaaaaccatgaatttaaagctcaagcctgtagctggctgcctaggcagcttatgattagtttcacagaatagcacccactggctacacaggccccagtttttttttcttttttgtytttttgagacagtctcgctctgtcgcccaggccggagtgcagtggtgtgatctcagctcactgcaacctccacctcctgggttcaagcaattctgcttcaacctcccaagtagctgggattataggcacatgccaccacacccagctaatttttgtatttttagtagagacaaggtttcaccatgttggccaggttggtctcaaactcctgacctcaagtgatccacccgcctcagcctctcaaaatgctgggattacaggcatgagccaccatgcccggcctcccagttttcatgatgaggaagtgatggtagcttttcatctgcccagaagttaacttttgatggatttgccttctaaggcatcaaacaygtcttctaaggccttctccacacattggagaaactcccgggcattgcrgcctgggkaggaagagacattgcagcctatccagttgtcatgaacagcatacccaacaccaaagccatcagagaccacagrggcaaagcccccaaggttcactgctgggctgctcagtgtgctcgtgsacaggacattgtggtttatctgcccgtatgcagggtccaggtagagctcaggcaagatgatccctttggctgctgccagatgccgcagagcaaacaagtgtcggtyaaagcccyggyctgtgagaaacaaaatggaaaaccagagtctcaggatggaaaaggacctcaggaaaacctcccaactcaccacatggtaggaatacccctcacagcatccttgagagtgggggaaggctctacctctatgcacaccaccaactgactaaccttcagagcagctcaagctagattattttaaattatttaggaaatatattatgtcatgttacatttaaaaatagctgtcaacagctgagctaaaaatgagcctaaaaggaaagcataattttaaagatgtgaaatcagtttagtcaaagagtcaagacagtacaggaagacagctatggactcaaaaactacaataaaactaaaagtctgattcaagtgtaaaagagaagattgagtcagtggaacaaaatggaaagtctgtttgaccagggttcgaatctcagtcttactactaacttgctgtgtaacggggccagtggcttggttttctccctataaaatggaggaagagaagattagaatgtcttggaggtccctttcacttccagcacttcatagcaacatgaaaggacaactatgaccctccaggtcctttccaggtcttgaattttatcaaaaaaaggtaatgacggatgacaattgagaagagcttctgagataacctgtttacagagagcagacacattacaactgaggtgaagctagtggggccgtaagtttagaaatcctaaattttcaaaagtgagtctgataaccaatcagtaatagaaaaaggttgggtgcagtggtgcatgcctataatcctagtgctttgggaggccaaggcaggaggattgcttgagcccaggagtttgagaccaccttgggcaatacagtgggacctcatctctacaaaaaattttaaaaattaggcccggcatggtggcttacgcctataatcccagcactttgggagggtgaggcgggtagatcatgaggtcaggagtttgagaccaacctggccaacatagtgaaaccccgtctctattgaaaatataaaaattagctgggcatggtggcataagcctgtagtcccaactactcaggaggctgaggcaggagaatcgcttgaacccaggaggcagaggttgcagtgagctgagattgtgccactgcactccagcctgggcaacagagcaagagtccatctcaaaaaaaaaaaaaaaattaaaatatcagctgggcatggtggtgcatgcctatagtcccagctatttgggaggctgaggcaggaggattgtttgagccaaggaagttgaggttgcagtgagccatgattgcaccactgtactccagcctgggtgacagaatgagaccgtgtctccaaaaaaaaaaaggccaggygcggtggctcacgcctgtattcctagaactttgggaggctgagagggatggatcacctgaggtcaggagttcaagaccagcctggccaaaatggcaaaaccccttctttactaaaaatgcaaaaactagccaggtgtagtggcgggtgcctattatcccagctacttgggaggcagaggcaggagaatcacttgaacctgggggtggaggttgcagtgagccgagatcacgccattgcactccagcctggacggagggaaactcttgtctccaaaaaaaaaaaaaaaaaagaaagaaaaaagaattaatgcgtcacagctgaaagtgaccttaaatgaggacaaagacacatgcatttccccacccctgcttaggaggcaagaacattctgatccctagtggctagtgtggctgttcagactgctagggtagaaaagaaaaatttggggagttggcgatggattaaacctagtgaacgggtagaaatcagatttggagtagaatgatttaggcttgcttacccaagcactgaggacaagacccaagggcatgctccccacccctgcctcacccattgctgcttctttggtcagctggccatggtacttggagcactcaaccatcatctgctgaagctcaccagcactgtgcctggagggctccctgacaaaggcctcagagcacctctttgtatagacggaggccgggcrgrtggtctcagtgcggccgtgcttgaatgyggcagtgctacaggactygtaggtggccactgtctgcccgwactgccgcaggaaggccatctggaatgccagctgggcaactgcgtcagggctcagcttttgcttcttcaggaattctttgcctcctctctgaarctggacgcagtcaatagtgagggttttcatggtggcatcaaacttttccttagcagctgtgatgccagtctttaaggcatcagtcagctcgaagttgagtttctgcaccgtgacagtagagtcagtggtagctggctggctctgtggagtgacggcaggggtctgagtgctgtctttaaatacttcattaaaawatytgagcactgccacaccatcaccccaagagtgctcaaagtggayggcagtagagccatccttggcgataatgaggttaaaggatttatcamaccagcggtttgtgccatccccatgcagcatattgtgggacaagtggacaaggtccttaatggggaagtcatctaggcagagacagaacactgccgagtccactttcctcaggctctcctcattgccactactcatcagcttctgcctgagctctgcccagatgtctcggttctcactggtcaggtatgccaggggaaactcgggggcggggctgctgtctgagagaatgtacttcagatgtgcctggatttccgaggggctcacaatgttcccatcttgatccaggacatcaaagatataaaaatttcctttccttaggaccaggaggtgtctggccttgtcatcagtgaagagttcatcccgactgggtttgrgtaaacgagttgagttgaaaagccgaaaatactgggacrtatccaggggatacgcattgaccaggtaggccccataccaggacagagaggaaggcacaaagcgtatgagtctcttgaaggtgatagtgtcactttttgcagggttcaagtggaacacttytggctccaraaggccagcccggagtgtcttcagaaaccggatggcagaaacagtcatgttggttgccygggtgagctggtcattatactcagattttgggtcaggattgaaagccataaatggattaaagttcagaacaacggagtctcgagcagataggtacatatcaaaccagggtcctaaaaaataaaaagaaaaaaataacataaaatgttaatgctgtccctaaaaataaaatttgaagaagaaaaaaaattcaagcatagacaaaggaaatggcatcaacctccagagagaagaattccctgaatgtttttgctctgcaataattcaagacatacaaatggggtcatacaatatatggtgttttgcatttagcttctatcacttacaataatgtttttgttttgtttttttgggacggaggctcgctcctgtcgcccaggctggagaacagtgctgcaatctcggctcactgcaacctccgcctcccggattgaagcgattctcctgcctcagcctcctgagtagctgggattacaggcgtcctccaccatgcccagataatttttggatttttagtagagacagggtttcaccatgttgggcaggctggtctcaaactcctgacctcaggtgatccacccgcctcggcctcctaataatgtttttaaggttcatccatgttgtagcatttaagttcttcatttcttcttagcgctgaacaatgttccattatatggatatactatattttgtttatccactcatcaggtaatggacatttgaactgtttccactctttattatgaattatattgccttttttttttttaagagacacaggatttctatcatccaggctggattgcagtggtatgatcatggctcactgcagccttgaaccctgggctcaagcgatcctcccacctcagcctcccaagtagctaggactacagatgcacaccaccagcctggctaatttttttatttttggtagagatggggtcttattatgttgctcaggctggtttcaagctcctggcctcaagtaatcctctcacctcagcctcttaaagtgctgggattacaggtgtgagccactgcacctagctattaagaattatgttgttatgaacattcttatacatgtttttgtatggacatagctaggagtggaactactatcacatggtaagtctctgtttaacctttgaggaactgccaggatgttttccaaagtggctgcaccattcccacgagctgtctgtgagggttccaatttttccacatcctcagcagcacttgttacatgtcttgtggcgtggagatattctggtaggtgtaaagtagtatagcattgcagatttggtttgcattttcctaatgtttattaattgctttttcttcctcttctgtttcctttcttggtttaaaggaataaaatatggtaacactccacttgcattcatgctggaacagaatagttaattcccaccccatctctttaggtttctcttgcttcatctcctttcaggggcaacaatcatacttgattgctccccgataaggggggaacgtcttcattgtccttctatgtacagtgtacatttgtacactccctgtttagaaagtactaaaaaagctattataaatatcagtgcatggatcactcagactagccctctgagttcctatagatgttttacctgtaaaaattccagaagcaatattttatcagaaaatatgtcagggaaagttcctgctgggattagtaaacatgaataaactctataaataaggactatcattcaggcaaataatgttcatatgtatagcactgggaaaaggattaatagatgcagatttctctgttactcatttgttggtccatccactcattccatcccttgagaatcagtgctgtgccaggccttggtccaggggatttagagaggaataggacatggtctttgattctgaaaaactctggtgaaggaggcaaataattaaaacataacgcaatgcactaaaatggtgagagaaaagtactggtggataagatatatttgatgaaagaagacataaattcatgcctctgacccccctttagcaaaagaatttcaaagagacataaaccagtcaggccaagagaatgggagacgagaaaacaaatactggaagctggaaagcacttatgcaactggtaatgactaaagcagactcaagaaagccaatcctaaattggcaggagagaaagccaagaaatcatatgatttgcacagcagaacccccagagggctcagtaattggcaacctagatacatctggttgaaggactattcaattatatcaccactaccacaacctgagattccctcctcactcctgtagaagacttaagttttactctctggagataataaaactgggggctgggtgcagtggcttatgctggtaatcccagcaatttgggagggcgaggtgggtgtatcatgaggtcaggagatcaagaccatcctggctaacatggtgaaacaccgtc

SEQ ID NO: 95608 - DNA, 80973 bp, Homo sapiens
ttatttccttctcatctcaatagtgaaatgactactgtgaaaggttgctttcattcagttgatccagactgagactggaaggaaaaatcctgactcctcttttatttcctgagaaaaggaaaatagttcagagcagtctgaggaatgtgagttgtgcaaaatttgtcaggcccagagagtcatgagtataggacttacccatagtggtggtggtggaggaggacaattatttaaagcaatttttttcctaactagctgccttatccattatctccatgttcctgggatttgtgatacaaagaacaatgtawggccaatcaatagcaataatgtaaattattggtaaataacttaggaactgccttttcctttcctttaaaaatttacttgtactttacagcaggtacactgctaatgggagtgtatattcggggcaagttgaatatatgctctctggttctagtcctcaaacttcaaccaaataaactcttcacttatattaagtttgcctcagttttttcctttaggtcgacactcctaaacctggtctgttagctctctccagctcaacccccagaaagattacttgtgtgttttatttgtgctttaattttttcccatcttcttccccaatcttttcttagttctttaaaacatcttttcttttgagacttttgctcaaaagaagatggggaagggaacactggattttcttcctggatttgcatacattagatccattatgtcagtgagatatatcctgaaatttgcattctccaaatttgcttatattattataaaatataactgtcatgcattcattacagtgaagtgtaactgaaaattcaaaagtcctgatagacttgtggtaacagttactaagcgggcagttacgagcagcaaatctgctgagtgaggtgtaccgcacgtgtaactttcaaaagaagccacagactcttgggaagtttttttaaaacattagaagccaataaaagttggccctaaaatgccaagaggcttggaattttcttgaaattttttcaagaaggattccctaaatatgactaatgactaatggcagaggaggtaaactaggaattcattttctttccttctttcatctaagggtggtggtcgtgggggagaacagtcctggttgcaggaagtgagatttagatttacctgtgggtggttcctgctcttgttttacctgaattgatttttaaattctttgcaagtaaaaaatgtgtgtgtcatttacaagacaatatgagagttaggcaacaatagtaattgtcatttaaaaacttttcttttctaaattacttcttattttgaatttgcagtttctgcctataaggcagttctatttacaataagtagaataatttattagggtgggcatatcatagatgatatggtaaaaattgctgttcatttaagaaatacaattagtcttgacttgatgtcatccataggttcttggaaactatgactttaagcaaaatgacatatatatatatatgtatgtaacaaaaccattttttcttatcaatgttataacaaaactatattgaataaaattatgctattcaatgacctgctgcatgttgttttgcttaaagtcacagtttccaagaacgtgttgatgatgttaagtgaggacttaactgtataaaattttgagaaataaatggaacacatttaggagcatgctggatttcttcctccttctcctctcaaatacctacttgttttatctttatagaaaaacttatttaaaagtgagactgggttccaaatgcaatgaaaggtgagggggtgataaaacaggacaaactagtaagctttaacattagctcacatatattaagaacatggctcatttaatcttgacaaccctatgatgttctccactgtcctgatgggagaaagcgagacttagtgacttgctagtgagaggcaaagaagggattaaatctaagtcccattcactctggtgctcaagtgccaaaccactacctttcaggacctcacaggaagaaccagacgaaaatagagaatgactggggaagagagaaaaccaaagtaggtgggagaaagagaggcagcctgagtggctagaatcaacttcccaatttcaggagcatggactcagcacccaatgtggatggaagaggtctcccttattaaaaacatttgagggattgactgcaggagctgacctgaggggtatccaaggtttgtttttgtctctcatctgttatcccttttcattataaagaaatttctgagatctgtcacactcattacaacaaatgtcactacactgaaaaatgtttgaaattcctcatttcaagaaccagtatttctcatgtgtatattttgcaaaattcctaaagtaaagcaagagagaagcacactgagcctcaggtccttgttgaagtcatgatggtccagggccctttcccagcttttcctacttaggaattaaatttcagcagtttttccatgagcgttcaatcatttgcagtgggattcacagtgaccagtcatacgattcattcatttcaacaagtagttgctgaaaacattttgtgttgaatattctcctttgaaccctctagaatttctgtccctttctgcacctgctctgcccccagaatgggaggtgatctttttggacttcactaacaatctggctctatttatgtccaaatagtagaagccatcagcaggagatgaaggggcaggaggagagtgaagtaagattattccttccctatggaagaacaggggtctgcaaactgtagcccagaggccctatctgccctgcagcctacttttgtaaattaagttttatcaaaacacagccacacatatccatttaaatatggcctatagctgtcttttacattccagccagcagagttgagtagtcatgacatgacagagatggtatgatctgtgaagcctaaaatatttattttctggccctttacagaaaaaagtttgttgacccctgccttaggtaggttcctcttcaggtaggattaatctttttttgtttgtttttgagatggagtctcactcttgtcacccaggctggaatgcagtggtgtcatctcggcttactgcaacctcctcctcccgggtgcaagcgattctcctgcctcagcctcccaagtagctgggattacgggcccttgccaccatgcctggctaatttttgtatttttagtagagacagggtttcaccatgttggccaggctggtctcaaactcctgacctcaggtgatctgcccaccttggcattccaaagtgctgggattacaggcatgagccactgtgcccggccggcaggattaatctttaggcagctttattcctgtcacaaaccactactgttggttgaatggcactctctacagctacagctacagctacactacaggtagaactattcctgagttctggtaattatttctttccctggccctgtttaggcctacgagtgattgtcagtgttgctagtcccagggactacatggcacatatactgccactttcctttatccctgcatacactcagtccttttgtgtctcctaatttacccagttggattgtgccacctatttcctgctaagaccccaactgacttattacacgcatagcatcgtactagaagcaataaataaatagaaaagaaaagaaaagaggaagtccacgtacatattcttattttatggtggtgatgacaggtgagctgagcaatgtggataaggtaagtatgaataactgtgataaaaggaagaatgtgataagtacaataagagaggccaatacacaagggagaagggaaacaatcacatgtggttgaaatattcaggaaagttttcattatttaagtggcatttgagctgaaccccaaagggctggttagttttagaaaggtgaatatttttgtaaattagaattacagataagtctacaacatgaggtatttggaggaaaataaataatgatttccagtttcttcagtgagacaattaacagggcactttggccattatctcattttgttctcatgactccacgaagtagtggctattattaacccattaacagataatggagcacaggctttttttgaaaactaagtaacttgcccatgatttacaactcaaaggagaagagtaaggattcttacattcttacccagatgcttaatccttaggaagatagcaaggcataaattgtgtttcagtggtggtttcaggctggttctgctgcagaaataaagccaaggtcattgattttggccacatctgaagcaactaacattatgtgaagaacgttgggctaatgttccacaagtactgggtagtctctgaggctttttgcttaggccaatgagacaattggagttgtatgcttaaaaaaatatggtctacgttatatataaaaaggggtttgaagtagggtgatagtagtggggtttttaaaggacagtgtcaacaccaagggtaaggctgaggggccagaggaagaactgaagtgaccgtggctttttaagtctggataggtggtgagtaggaggcagtgatattagtaacagagctggtgagcacaaaagggaaggctttattttattttattttttgagacagggtcttactctgtcacccagactacagtgcagtggcatgatcatggctcactgcagcctcaacatcctgcggctcaagtgatccttccaccttagcctcctaagtagttgggaccacaggtatgtgccactacacctggctttttaaaattttatttatttttattatttttatttttagtagacacaggtcttgctacgttgcccaggttagtcttaaactcctgggctcaagtgattctccagcctcagtctcccaaagtgctgagattacaggtgtgaaccactacacagcctttggaagactttccaagaatgataagggatccgattttggaaatgtgaagctgaagatacagaagaaaattccaactctacttacagataaaattctaatttggggttgggcacagtggctaacacctgtaatcccagtgctttgggaggacgaggtgggaggatagcttgaggctaggagttccagaccagtgtcctggtcaacacagcgagaccccatgtctaccacaaataaataaataaataattttctctgcaattggagatatgagtggagtctcaagaacgttctggctatagattgttgacataggagttcagtagctaaatacatctatggcaggtataagaagagtaagtggtggagaaagttgtaaaaacaggagggaagattaacttctgaccgttgacgccttggggaatcacagctgggcttcagacgattcttcagttcctagtgctggggctagtgtctatgaaatacgttttccccctccctccaggcctcctaggtagttaggacttttcaataacattggacattgccatatgcacatgaacacactcagttttaatttctcagattctccgcttgctggcttctaaaactgttgtaagaactgttatctggcttcacagggttgtgacaaggcggtgaaatgctttgaaaagtgtctatagctaaacaaacgtgaggtaccggcgctcgcaacttttccccaggagatgtgcacctctatttagagcgtaatgcccagactattttcgttgctttccgtccccgcccgccttctgccacggacagttacaaacctggtcgataattatcctgggagaactcgacgtcccagctaagaacgcaggtcagagatcagagatcagagacagaaggatcttggggaggagcaggggccgggcatgacgtagcaactggcagcgccgccgattggcagatgagaaggttgttccctcagggcggctgctgattggctacgggaggcagaggcgtgacgtcctcagaagttgagcaaacacctcctacttcccggccttccatcccagtttcttctaggaattcggagcctcccctgcagcgactcggaagattcgaggcggcgggggacaagtcggcgccccagagcggacgaggtgaggagaggagaggtccccgcggagagctgagcagacgcgcgggtgggctcagcctgtgagatgcggtggagatagcgggccgggctcgggctgtcgctgggaggggcccgcgagcctggccttcgggtcccggcgccgcgaggcgaccccggccgggccgagagagggagaaggcggcgagcattcgggcctccctgcgaggaatggagggagagcggaaacgcagagagtttcactgcgaggaagggagggagagcggtcagcgcagctccagcatttctaagtagaaaggcgagggattgcaattcggatttcttttctttcttttttggcggacrgtggtggtgctgtggctggggaataaagaactgatgaagctgaggaaacaacggcttgttaatttgtggacggcgtgcttagaggggacggctggctgagggggcggtggatggagatttcggggtggttctttcccccttccctccccacgcccagcttagccaaactgatcacaaacttctctccttgtccatcttgggctgcccactctccgagacacagacccattctccagcaaggatcggagatgggtggaagttgggcgccttgcaagtctgggtttcctgaactcttcagcccctgcgggactatgcagcccattgtgagcgctcgcgcgggacggggcgcggggagaagcagtttacccaccctcctcggttgaatggggctgaatgtctgtctatcctgacagcttcagaagaagaaatgtgcttttcagacattgatttcaggggaatgggggtggggggagcggaagagagagagagaaagagcgctcgagcgcgagagagaatgaattagttcagtaacttgaacaaggattaacattttttgatgttgtgggttatcagtggggaaggtgcagctgtgagatgtagttatacacaggacggaatggtccttgactgaagctgcggctttccaatactgtattaaaaaaaatcccaaaacactgatggcactttggtgtttctgggtttgtctgttttgtcccctgcactcccctcttctttttttcccatgaagatgagtgaatctagggctacatgacttgactgtgtaacctggtggccattctgcaaaatgagttaggtggacaaaaattgaagccaatttacctgaatcattttcccactcttcagataatcatatttgttatcagtttcacttgttattgatgatggcgtgatcagaactttggtttatttgtcattgaattttttttctcactagtcgtttaacagaccttggttcggaattttggaaatgatctttggtgtttaagaagccaccatttaacaaaacattttcatttttttcatatattcttttattaattttctcatagaaataacattacaaacagtggtaagttttcttgggaaggctacaaaagattctatgcaattcatgaaatcatggaaacaaacatttggaatggaaaataaccccaaaacattattaccacattcatctgatctaaggtgtcatctattgtaagatgcatccctatttcactgatgctaaaatgtgtaaaaaaattgtcttaaatttgatgaaatacaacattaaaatggtaatttatttatcttgaacatgcatgcctgaagtttgaagttgaagagagggcttattgggctctaattattttttttccaaaataatgtaagggtgggggattaatatggagccatcgtgaaggtcttactacagtgtgacagaggaaagaaatgtgagtctactgttagcggcgtggttgtgctcgcttttgaggagtaggcaagcctggaggctttttcttttcttaaaatttattgtttatgacacacagcaatgctcagcactttatgcatattagctcaattaaacgtcttaagagccctaagaggtagaggttaatatgattctcattttgcgcatgatgcacagacaggttaagttgccagccaaggtcacagagtaagtttggccgctgaggaacccaggagagaaaccagtattcctttgaggtatccatcttctgttgcaagctcttggttcctggtccatgctattaatgcaggtagcttaggtgaatgtccactctttcttgattgtgtttttggtattttgtttccctgtttggtgtactttagctagaaattcataagtcagagtgcctatttatgttctacatttctaatgtttttgtaattctcagtgtccagttactactatgcttaatagaatcagaatatcagagcctgaaagggactttagtattatatttttgtctgggtaaggaaactgaagtcaagaggaggaaccctacatctagttatgtgtcccagctcccatgtctaagttttcccactatactgtactatatttcacgacatttgttgatctatgagatcttggaagagaatcaagttttttttttttttttttgcagggttagggggatgtgagtctcttattaatgtgtctattttatctgtttgtttgtttgtttgttttcttgctgcataggtctttataatgtttattgaatttgctttttcatttattcattctttcttaaaacacttgctgttttcccatgtgccagtcattgggaatacagagatgagtaaaacacaactcatacacatttgcagtttagcaaagagacagacaagtaagcagataagcattttggactagactccgatttagaactaactttgtattccatttcaatgaagctaaaattataagctagagaccaggagaaatatgtgtcatgtttatggatgactttgagtaggtgatgggctggagaaaatatgaaaattctcagaccagattagttaacactaatagacctcctcccccaaagtctaccactttcttcttaatccagtaaagtattttatagagggtttaacatggaagcattaaaagaatgtacccacgcacaggaagtcaaagtatgaccagtgttaatgcaagccsaagcctagttctagcaagccttgaaattgggagggatttggattagttctaggccatcatctggtgctgtgttaattctggaactcttttgaacctctccaaaaaatattatggtttggatacttagtgtaggccaagactcatagccatagagctgccatacttatttacagacaccagtgcttcttgggaaaccatggattttaatatatacttgtattttttttttttttttagttacttggaagggtgaatataaataattagcgctgttcatccttgaacttattttcttcatctaaagactacattacctcattcttagtctctcaatatttaatcacaatatatgcctgattattgcaaataatttgtcattcagaaatcccccgtgtgatttgatagttttggtttgagtcattgaattatgctgtagtgaaattattttaaatatctaaaatagatggacaaagagcacgttcctaactgtggggattaaagttggaacatttggccttaatttcttcaaaaatgaatgtgtgatccttcatacatatcccaaaagaagtaacagaaattaagaggtgcaatgcttagttcattctttttttttttttttttttttttgagactgagtctcgctctgtcgcccaggctggagtgcagtggtacgaactcggctcactgcaagctccgcctcccgggttccacgccattctccagcctcagtctcccgagtagctgggactacaggcgcccgccaccgaccctggctaattttttgtatttttagtagagacggggtttcaccgtgtcagccaggacggtctcgacctcctgacctcgtgatccgcctgcctcagcctcccaaagtgctgggattacaggtgtgagccaccgcacccagccgcttagttcattcttaagctcttgtaatgcttgtgcattgttttgcttaggtaggtgatctataagcttaaaaagtattctgattgggttggtgctatggaaagggttgaagagacttaaagaattttagctatttgatggaagagtaaaaagctctatgaaaatctcagctctcttcatctaccccgttcccttataaaaactgcaaaaattaaatacatcatttgtttgtttgtttgtttgtttgtttgagacagtctcactttgttgtccaggtgggagtgtaatggcatgatcttcacttactgcaaacttcgcctcctgggctcaagtgattttcatgcttcagcctcccgagtagctgggactaccagcatgcgccaccacgcccagttaatttttgtatttttagtagagatggggttttgcatgttgcctaggctggtctcgaactcctcaggtgatctgcccaccctggcctcccaaagtgctggcattataggcataagccactgtgcttggccaaacacatcattttaaggcataaatattgcctgaaaagtagcagagagaaaaatcttgatcgagttacatttaaaaagttataccaacgagaacagacttactgtgacatccattatgataagtcataaaaatacataatagtggcttggaaaatgctttctataaaacagaaaaaaatcccctatttctatgggcctcactattctcatttgtaatactagattttagattacattctatcagkcccactttgactctaatatttggatataatcaataattaataattcactatcagatattgatcagcaccatttaatttgataaaactaatcctgaacatgggcagggattggattactgcttctttatatctttaccaagtgcatcatgccgtgcatatcttaagtagcccccaaatatttttttaattaaagagaatcaaaagcatttgtcccatattccgtgtacaaaagattttattttgataactctatcaagagactttctggatttcattataatttaaatattagaaaatatttgtgctataagcaaatgactagctgtttttatattaatatgtgtaattgtacaaaagaccactttgctcacactctgaaaggacctttctaaccacacatgagattctctgtcctgagagtggcttttcttaaatataatattttataaatacattttacagaatctgctttgctttggttactccatgtgatttagaatgatggtgtactcagtgaccataggacagctcatggtcattgaaagaaaatgggatgtgtatggagtgccgagctctgtctctgtgtccttttttttctctctctctctatctgtctctgtcattttcctttcccttttctggaaaataataaaaaaatacaaagaacattcaagcatgttctttcttctgattctcatgtttttgttgcaaagttagcaaattaaaagattaagtcttgccaccttgagagatggaaagataagacagtatcatagagtatgttctcctattgctactgggcaaccttcactattatcttcctgtctcagtacatagtagttccttcttatccaagttttcgctttccatggtttcagttacccactgtcaatctggtctgaaaataggtgaataaagtacactaagatattgtgagagagaaagagagagtgagagagaccacatttacataacttttattacagtatattgtcataattattctattttattattgttgctagtctcttacagtgcccaatttataaattaaactatatcataggtatgtatgtataggaaaaaacatagtatatatagggtttgggactatcagagatttcaagcatccactgggcttcttggaatgtattacccacagataaacagggtctactgtatctcgctgcaattcactataatactcccatgacttttagagacatttcaaattcctcatcaattttaggtaaataaaaatgtataccttagtggtgttctgttttacaaaaacagagaagaaatcttttaagtttcatttttatatttgaaatgttaaccttcatgtaacaaagggaagactgttacaattcatcagaggaagggtcttgtaccccacccttgcctgtgtgacacttctctttctctattttcctcctctttgttctttctagctcyttttttccccctctctgcctcctgcttttctacatcctccttgcttgtgttacaagctgttatcagcacccgacattgtcgggtaacctcactagagctggtggtgagtaaaccctgatcttccctccttccttcattgaaggcattccagaaatatacattgaatttacttcctgatattcttgaaaaataccacaaaatccaggacagaaaaagctaaagcagcctccgttggcatttccatgaaatactagacacctgcagtgcaattcagaaattctcactatttcctatttcttgaagaccttagaagcaaatgaactgtggatcttgaaagttctatgctgagaccaagttttaaggttcaagcagtaactagcagttatactataatcaaaccattttttttctaagcacccagaaatctagaatttatcttggcaggtactcaggaatgattttcagtataaagcaggaaaaggggtcaagagaggcacggcatgctacggggagaactgttaattcactgtgactgttgaaggcaaagccatatggatctgatttctttctgaaacaagagttggctggagttaacagcatgtgttggatctatatggtgtgaatctgtaggctttggcaaagaagagaaaattccaggtgttaaacattaaactaggaatcctgcttctgcttaaaagcaacagatcctatatgattccagttcagtttcttcatctataaaatggggatatgtatctacttaataagatttttgcaaggaggaaataagatgatatccataaagtgctcagcatagagcttggcatgtgatgcttaatcaatggtaactactgttacatttgtttaaataatgaaagttacagaaattattatttaagccttccatgcaaaaagtgaaagtgaaagtagcttcccaaataaactgaagctcagtcccaggcacttctgtctttttccctagtcttccaagatagttggcctttgcaagtatatgtgtgtatgttacaagtgactgtctgtatttgtgtctgtgtgtgtgtctactgctttcccgccctatcccagacaaagaaggtggtgggagaaggagcagggattattactgagtgagggatgagtgaggttaacattcaagcttgggctagaggggagggattaaattatctccacatgttcctcctgatggagtcaagaatttcaactcataataaaagttacaggggtatgtagtcacctgtgaattcatgaaacacagcccctgctgggaagatgggatggtttctggacatttgtgtatgttcaaaggaatcactatctttggaattggttttattagaaactgagggattcaggttctagtttttcttttggcttcgagaagactgaatgttatgggtttgggattgagtttaatgcaatctattttaaaaaacagaagatatgaataaacaaaaaatagatgcagtatataacagtcgtttactgaaatgttgataatctattttgcatgcatattttgccctgaataaaagcctaaactcctaatcatcagcagtttctcttgctgtgtgcagctttttttcttcttggccatcttcctaaagccttcttagctggactcttcgctgtttggtctgttgtctgattctgttgtaaagtgtcctataaatttactgtctaggtagcaagtagttgtttgcccccaggaaatgtacttgtatgcttaattgtttggtcaagccttccccatccatcaagctggtgctcttccaagattgcagtctgatgtaaaataaatgtgtttcatgcaagcttttctatatgttgttagcggtgatgggtagaaaatttctggaaggtataaaaatcattgaatccttatattttgctgccaagtttacatggaaaactaagttttatcattcaaatgatccagcaaatcatcatctgaaatgacatttggctacaaaattgaagttggatagaatccaattgaagttgggtagaatactgttaagcctggatatttatgctttaaaaatttacataagatttattctgcataggaataaatgaacctgtatataaatgaacctgtatataaaaattaggagcatctgggtgaaaataaaatgtttactagtgtcactttaatttctttaatttggtttaaagtattatttccaccgtattctacgcttcctccagctgagggaaaaaataactacttttagtagatgatatctttcaatcattctctccttcatatgcagccctggttctgggactagggggacaagacacttcttgtaccaagagaatgctgctttgagtagagtttattcatgagaatataccttgcctgccacattgagagaagcccgttacattcatcatagtaagcctttagtaactatttcttgattgactgaatgagtggaattacacaatcttctcacttgaatagcagttggaaaactggttgaggcaggtcggggtttaatacaacagcagacggccatgtatggagagaaaacccaggaagaggaactggcatgtttagagcaacaaaggtgaacagtgaaggtgagctggactctaggaagcagagtgatttaactctgcttcttaatcttctaacacctctggttaaagaataggtttgtttggtcgattggttttcttttttttttttttaatactttaagttctagggtacatgtgcacgacgtgcaggtttgttacagatgtatacatgtgccatgttggtgtgctgcacccgttaactcgtcatttacattaggtgtatctcctaatgctatccctcacccctccccgcaccccatgacaggccccagtgtgtgatgttccccaccctgtgtccaagtgttcccattgttcaattcccacctgtgagtgagaacataaggtgtttggtgttctgtccttgtgatagtttgctcagaatgatggtttccagcttcatccatgtccctacaaaggacatgaactcatccttttttatggctgcatagtattccatggtgtatatgtgccacattttcttaatccagtctatcactgatggacatttgggttggttccaagtctttgctattgtgaatagtgccacaataaatatacatgtgcatgtgtctttatagcagcatgatttctaatcctttgggtatatacccagtaatgagatggctgggtcaaatggtatttctagttctagatccttgaggaatcgccacattgtcttccacaatggttgaactagtttacacaggttgattggttttcttaaatttccaatctgttgaggaccaatacttttgtaaaatccggtaacaataaattactagaaaaaatgatcttgtggcttgacatggtggatcacccctgtaatcccagtaatttgttataaattaaaaaaaagaacttagccaggtgggtggttgtgcacctgtagtcctagctactagggaggctgaggctggaggatcacttgagcccagactgcagtaagcaatgatctcaccactgcattttagcattgacagagtgagacttcatgtctaaaaataaataaataaatatgatcatgtgatattaaggcttctaaatgcttactttctatttatgtacacatctaattgtgaaccagtttttttgttttttgttttttgttttaaaaaaacagttcagtgcagttcactgactgacactagggcacactgagaaacacttgttttgggaatggtcagagatgaactggaaagaggttggcactaaattgtgaagaatcttgtataccattataaggatttcaaactttacgccatcaaaatttagaccaatctgaaagtcttgctctttattattttcctggatttgcattgtagattaatttgtttaaaacttttgtgccgaatagatgtttgataaaatgtgtatttaaaaagctattttagcttagcagttattggatggtgtcacacacgttgctctatactttttaaaattttgyagttaaataatcttgtttttgaaaacttggctttaaaggaacacttgacatcccagttttcccttccctcttctctaccttgtgtctgttttcataagagcgggttgtattttacctcagatttctcaggagaccagaactgatctgccagccttgctgccttttgttgctctgctctttacattgtctttacagtcaccaggtgtcargatgctgcaagtacataggactggactgggcaggctgggggtcagcctctccaagggtcttcaccacaaagctgtgttggccgtccggagggaggatgtgaacgcctgggagagaagggccccgctagctcccaagcacatcaaaggcatcaccaatctgggatacaaggtcttgatacagccttcgaatcggcgggccattcatgataaggtgagtatttccaatatttttatgtgagaataaaatgaacctgcatatgaaaattaaggagcatctgagtgaaaataaaatgtttgctagtgtcactttgatttctttactttgattaaaagtattattttcaccctatgcttactccagctgaggaataaaagaacttacttttaggagatgttatttttcaatcattctctccttcatgtacagccctggttctgggactagggggataagactccattcttgcacccagagaatgctcctttgagaatgtaccttgcctgccactctgagagaagcctgtcatgttcatcattccacttgctcttcaaaataatattatggtataggtttsactcattcctattttagcaatatacatatatatgtatacttttcctttcctgagccattttaaagtagatcacagacatcataactcattactattaaatgctccaatgtgcatctcctcagaataagccatgttttctacataaccacaatatgactttcatacctaagaaattaataattcataatatcatcttatatagtctatgttcagattccccattgcctcaaatgccttttattttaattgaggcttaatgaagctttattgcattttattattgtgtgtctttagttctttcaatctagaacagcacatccctttctgattttgtttcaatgatattgacattgacatggactctagaccccaagacttacagagtgtcctgctactgggcacgaataatctggttgttttctcgtgaatagattatattctaattatattctatatgttatattcatgccaaaaatgtttggcatgaatacaacataagtgatatatgttcttcccatggcatcacatcaaaggcacaaaacatctggtcgtcccatggttggcaatgtgtggtcacttggttgaggtggttacagtgagagctcttcattgttaaagtctatatcaccctttgtaattactgagtcatctgtggtatggtattttaagatctgtgatgttcctattcctcaaataactttacaactaatcatgtcagcctccattgataatctttgcctggatcagtttttacatrgagacttgtgaagtgatgcttttctaattttatcactcccctaagtttgtttgctgacattcttctttagaaaagaggttttcttttctttctcttccactcctccacttttttgagttgtgaactgttctattacagtgcattgaactgtttaccaaactgtgaattctgtaattcagtgtttaaacaatttctttaaaaaactttcttatcattgcatttaaagccttgttatgaggagtttatatatacatcttcatgttgacaagatgaatcttaggatgttgcttaaaagatgagttgtgaactgttttattacagtgaactgaattgtttatcaaagtgtggactcaaatttgctattgcattatgcttctttaatttttgcttttttgagtatattttggaagcatggacctttttcattcaatccatttaccattattctttttaatgtctgaattatcccaaaattggttagtgtgagtccttccaagggggcttctctgtcctttggatgtgaatccatttacctttgagctttcttgtttcttaggataacaaattgtcctagtctcaccttgtacctttcctgccccacatmaggaaattaataatttcaccaagaagacttgttttcttttattatatagagaccaagatctggtatctgatgttaagcatgtttattgttactgagatactgttgctcttaggctctattagtgtacagagtttagaaatatacacaaacagttgcccacacatatatatatatattatttaatcatgagttaatactgatactaaaagacctccagaggaaaaattaatgtccaggaaaattaaaatttaacattgcacaactttttacctttaaaattttatatttgcatctgttttctccaacagtaaaaatcttaattctttaatattaatgcatattgtttgctttatcctatgatatgtataaatagtgtcaggatcacaatactattattacaactaatagtaagcccactaaatgaagtttactatttctttgattttttttttttgcctttagaatatatctgacaatgaatattcagagtgttgtattaaaaaacttatttgaattttttttggtgtggtttcgtcatcaatctaatatccatctggatttatatattattgtttctattcagttttaatgtttgctttcccatttttgatttaattttgtttttcaaagtagaacatttacaaattccagaaatgaagtcatgttttcattttaatcccctacatccaattctcacccaccccaaagaggttacttttgtttctgatctatcattgttttttcttttttttttttttgcaaaaataaacacctgtgtgtgtatttacatatttatttcccttttgttcttatacagaaggctgtctactatatacactcttttaaccttgctttctttctttagtaacaacatatcttgaacattgctctatgtaagttcttagagagatttcatttcatttcatggctgtgtgataagtactccattgtacagatttaccatggtttatttaccaatctactacaaatgagaaaatggactgtttttgaagaaaccagggagaaattgtatattcatcctttaactatctctgttattcatctctactttcctttgaggtagattcctaactaaacttatcttttgttcaattgctcttttaattctgcttgggttatacctctttatttaaaaatcagatatgtctgtctgttgcttccatgtactagttatgcaatctcaattaagtttgtaagcctcaggtttcccattgattgaatgaggattataattgtacttacctcatgagagttgtatgaaatttaaatgagataattcatgcaaagagcttagcaargtacatgtaatttattaatacatatcaatgattgttacttattacccaataagtctygtattagccatgatgacattcaacctacatttccaaatcggtttactcgtatgttgtaaatgtctctttacttctctctttgtatttttatatatgccttcaatgcctcttactgatattaccatcttgtgtttgccatcttcatttctctaaatttcaggtagcctttcagattaatttaaattctcatatttctttggtatcctacctttcagattaatttaattttcatatttttttgatcatcctacttaggaattatctcaatatcagttaaagtagcatatcacttagatactgctgatcatgttttgtatttttcatttactccaatccagagtactttttactatattttgtgagctcctttatacaagggatcttgacaatctttccttgtatcttagcatctcatctctagcacggactaatgtacagtaaggatagtaataaatactaactgggtaaacactgaaaaataaatgtataattatgtcttatcttttaaaaatacaactaataaatcacaatttggcatttaatatttcagtgtactgttggtacaaaatatacatttcacaagtatgcttaagtcacatgtgctagtgcatatgaccaaattataaactcttcttaaacatacatatatatatatatgctgtgttttctaattgtttaatgctgtaagagttgacatgatagatttatctttagccaacaagtacaaacattacaagtagttgttctattatttgttctaattcatacagattttattccttcaaaagatttgttgtgcctttgctacacattttgctcaagaaaacatggatattacaaatcaggataataacctttaatcataattacaatttcaggactatgtcaaagctggtggcattcttcaggaggatatttctgaagcttgtctaattttaggagttaaaagacctccagaggaaaaattaatgtccaggaagacttatgcatttttctcccacacaataaaagctcaggaggccaatatgggcttgttggatgagattctaaaacaggtaattagtgattaatatttataaatattaatgtagaaaaataatattttttacttttaacccccaaatggagttttagtcttcttttcttctttagtttaagagaaacattgcattccttttatattctgaaatggaaagaatgataaaagctcttaccctaaacaatttaccaatttataaggtcaattggccatatactatcaaatagaattttagarctgaaaataacctcagggatcatataatctactaccttgtttttcagatgggatttttttttgagatggagtcttgctctgtcatccaggctggagtgcagtggcacaatcttggctcactgcaacctccgcctcccaggttcaggtgattctcctgcctcagcctcctgaggagctgggactacaggcgccagccaacacgcccagctaattttttgtatttttagtagagatggggtttcactgtgttagccaggatcgtctcaatctcctgacctcgtgatccgcccacctcagccttccaaagtgctgggattacaggcatgagccaccgtgcctggctgagacaatttttacatttattcacattcataagggaaaatgcatttttgagatagaaatactatgaaaaaaactagcagctgtttaaaacacaagatattcatttaacaaatatctattcagtgctgatgctgtgtctgacactgtttgttccaaggaaagagccaaagagtaaagtatctttattttcacaaagcttacattctagtgggaggagacagataatcaatgaataagacatctaatatccacttgggaatatgtgtgatgaagataaatataatattgaaggagaaaaggagtcctgggcactgggaggtgatgatgctattttaagtaggatggtcagggaggaccccattgtgaaagtggcattgagcaacaatctaaaggaggtgaaggaccgagccaatacatctgaaatgagtcttttaagcagacagattcgagattgagtgtggggttagagtacaccatgttcagaaatgcttattttgtctcttgtgtcaacaatggttggaggtgggaggaggagagcaacattactaagaaggctgctaacctaggctggtctagactgcaagtcacaagtgatggtggcctgcacctggaagaaatggtggaagagaaagttgtgaaatgtggacaaatcttggatatgttttagaggtggatcctacaggattcactgatgacataaaggtggaatatgaaaaaaggagagcagtcaggaatgactccaggttttggcctgagctacttgaagcaattgtcatggaatgacatgatgccattacaagagaaaaaggcttcggtgggcaaatcaagagttgagtttagggtctgccaagtttaatattctattagacattcaaagggataatctaagagggctgttggatatgagtctgaagctcaggagggcrgcttctcctgacatacattttgtagttgtgagagaccaggtggtgtctagagccacgagactggatgagcctaggaagggagtatagaaaaagaagtctaaggtccacatcttccagatgttagagctaggatccgagattagggcagaggattggagggttcataaacagtaaaagcaatggaaaatacctattatataggagtgtaaaatacttccaattgattccaaatacagtagaccagggtgacagttaatttgtagtatttctaaagaataagttcaaaagtaattaatggaaataatactataggaagaatgttccactttaagcaaataaagtaattataaattactttaggaactttttttgttattttaacttttgttcattataagaaaattaaaaaaaactgacctaacagggctgcttttgggcagcattttgtaaccaattacttggagttggaagaatgataaacattcttaaattcatgaacataataaaaattatatgatctttgaggaaataaaattactgtttaaaatagtgtataattacaatacactaatatgttttaagcatgaattactaatgctttcctgagagaggaaaggttttcaaggaaagaggaagaatatgtttttagtgaaggcaaggaagataaatgacataaaggtggaatatgagaaaaggagaggagtcaggaatcactccaggttttatcttgagctactcgaaggaatcctgtactacttttaataggaaggttrcctgtaaaaggaaggagagggaaaaagaaaaagagaggagaaggaggaggagagagaaaaatatctgtgcttggacttgagagagagtgttatttcccaggttgaaagagagtgttattttccaggtagaagagacctgagtgtacttagaatggttgagaaagaatgtaaagatggatgatgcaagaaagaggtaatagttcaagaagagtggtcttggaggacatgagagaagctgggatctaggtcacagagattcgtctcaaaatggatctgttttatttgaccagaaggaaggatgtaaggatgagaggggctttagacatgtttatagatggtgctgggtgggtcggggcagaaaggtaaaggaaattctacctttattatttcattgcttaccatcaaggggggtatagcacctgctacaaacattttttcatttctaattacaagcctaccattggtttgctacctggcgttttctaaatatttcatggtatacctgatggtagctwctgttagcaagttaaggtgtatttcagaggaaaaaatgtgaaatatttacttgctcatatatgtctttacttgttaaaattaagcttaatgggtccagttgaaatttttttatcctcttttcaggaaattcgccttattgattatgagaaaatggtggatcatagaggagtacgggtagtggcatttggacagtgggctggtgtggcaggtaagtatgccagggcttacatcacccacttcctaaattggcttggggaataactgtgagttttctcttttctgcggcaaggggataggagtgtttatttccatggaaaaaattaaaatgaaggtatgctgaaggatgatgaatacaagtggaataaagtatgaagataaatggttaaaaatattttattgcaaaaattcaaaggaaaaagcagggagaaggataacaactacaaacaagctctgatttttaggtagttcctttcgaaaggctggaaggagataccagttcggtaatgagacattgagaattagaagatagggagaaatagaaagggaaaaaaggtccaggggcaggaattttgtccagttaattctttgaaccttgtttggttaagaaacaccacaatatgttgtagctctgtttcagatcagactacttgcaggtctaataaggaaggtcatgacttcggtactatttgtttgaccttgttatataaaaatagaagattccttatgtaaaaaataaaagtagaggttcctcttcaaagactttcgtccccatttaattaggaataattaacttctcttaggagcaaaatttattcagacctgtgcttctaaatatttgccccggcaggcttatactggtccaagcaagcattaagtcatagcctgttcctcttccttatttaaaagtgtttttacctttctcagcattccacaagttacttcctccttcctttgttctcctctacctttgcctcttttaaaaagttctaagttgctagccaataggaacgaatacagaacgtgaggtctcgttccagccaatggaaaccggacacagcagtagggtggacgtgtcaggttataaatgaccctgtctcttttgttcggtgtattcttgtggcaaaactgctggtgrgtgtaccctttctgcaggaagtaaaaatggccttactaaataaattaaatttatgttcatgtgctgtttctttacggcaccagggaacaagcatttcaaacacttattatggcttatgtcattctgcttattattaatattatacttgcatccacctgctttttaaataataaatctaagcaaaaatgtgaaattcaaaaaattcttttacttaaaaccaattcaggcagggtatggtggctcatgcctgtaatcccagcactttgggaggctgaggcgggcggatcatttgaggtcaggagtttgagaccagcctgaccaatatggtgaaatcctgtctctactaaaaatacaaaaattagccgttggtggtgcatgtctataatcccagctactcagaaggttgaggcatgagaattgcttgaacccaggaggcagagtttgcagtgagccgagatcacgccactgcactccagtttaggcaacagagcaaaactctgtctttaaaaagaaacaaacaaattcattgtttttattcactcacctcatatctttcctcacccaacacccaaatcagctctattaaactaacagaaaattaaatttcttagtataaaagcagtaatagagagacctctgatgactatgattcctagggcctttcaggactcatccagatgagggttttatttacctagacagaattaatacattggaattaagttgatttatttagaagtcaccatattcagaagtaggaccacatccatgaataggatgtggttcatgttcttagagaagcattcaagcaagtaaacacaaatacaatgctagtgctaattgctataagaaaggtatttgagactgggtgcggtggctcacacctgtaatcccagcacttcgggaggccgaagagggcagatcacctgaggtccagagttcaagaccagcctggccaacatggtgaaaccccttctctactaaaaatacaaaaattagccgggcgtgatggtgggtgcctgtaatcccagctacttgggaggctaaagcaggagaattgcttgaatctgagaggtggaggttgcaggaagccgagatcatgccattgcactccagcctgggagacagaataagactccatctcaaaaaacaaacaaacaaacacacaaaaaacaaacaaaacaaaaggtatttgaacttggctgttgcaaaagctttcttttaaaaagtgcctttgaaggtgaggtctgaagaatgattaaaaatgattcagggaagtaggagaggacagtacaagtgtgcaaagctcaaagtgaagagggggaaaataatagttttgaggaatagaaataagttcagtataattagagtgtatatggaaataactatatgtggttcttataagtatttagaaggtggaattcacaggatgtggtgactgattggatgtaggagtgagggggtgagggagacactttaaagatgacatgcaggttaccaacttggacagtgattcagttctttcagtacccacaggaatggaggaagaatttggaggaagggagtaaatgagttctgtataggacaatgtattagtagattacatactaagttgctataatggagactccacaaaacagagcttacataagctagaagtccaggagtgagaagtctagggatggtggaatgagaggaagcctttgctattgtcaacacttggctttcatttctaaggtgacccttcaggttgctattttccagtcagtggaaaggggagaaaggaagtaaggtaaatagcttcctttctaaggatgtgaccaagaatctgaacatattatttctgctcatacccattggtcaaaattgactgagaaatgtaatctataactgggcaactatgtctgctgcaaaaaccatgtgccctccatctgtgaaagattaactgaggtcagacttactatcctgtcattaaccaactagaaaaattgaatgagatatagaaaacaatgttatcagacattggaccacaggcagtacagacttgtgatccttgatagatggaaaatagatgaggtgagctctatgttcaccctggctttctgtctggagaaattatcagatggtatgaatatggaaatgtgacacaaagcttggtgaactcaataagctgaggagataggagttggggagcctgagttggctggaattggcaacacatagtaccaaacagtgaggagctatgcagaaatggtgttccagaaatatgcttaggggtcttgctaagtggaggatgaaaattcatgagactgccttaggaacaatttgtggaaaagaacaattgccagggaactctatggaaaactgttctcagagtttgtcccatcagccagagtggagagacttaactgaatgtataaggctttcagggatgccctgaagtgtgtggctaaaccagctcttaataaagcctactctacattcattcctataaaagcttaaaaatgagcctaatgtctactttgagagagatgcaattagcacacaagcagattaaaacagctataataaatgttcagtatgttcacgttttaaatggaaacataaacaaaatcaggagagaaatagaggaaatcagtccatctacctatcaatcaatagataccacggacgaaaatctatacataagcagaggattagagaacatatatagattttcttctgtagtgtctattgattgatagatacatggtggatagattgatttcctctactcctcattttgtttgtgttttcatttaatccttgagcacattgaccagcatctctgtcatttcttgtttctgggattgtttccgttgttgattatctccaggttaatgttccattgcaagactcataattttttactgaatgccagacagtgttcattttacattgttgatagattttgttgttttccttttaggagcattgggctttgttctaataggcaattgtttgtggattacattgattctcttaaggcttgttttcctttcacctgcctctcttccttctgggactccaaatacacacgtattagagcatttgttcaccacctgtcacttaaattctgtttttttttctcagtctttttctctctttatgctccattttgtttaatttctactgcagtgaggaaggaagaaagtaaagaaatcatgaccggaacattcccatatcttgataaaaattataaatacacagataagtgaagttcaataaaccccaagccaaaaatagaaataaaaaatcacaaagaaaatgacagtagaaccatcataattgtcttgctaaaaaataatgataaaaacattgaaaataaatgggaaaagggaaccatatacatagaataactacgataaacatcaaacttctaatcagaaacagtttaagctagcagaaagtggagcaacatctttaaagtgctgaaagaaaacaaacaacttataattttatgcacagtacaatatatttccaaagacaatatcttttcaatatctttctggacatctttctagaaaatgaagattaaacacagattttctggtcaaatgaaagctgataaaattcactgacatagaagtatttaaaaaatttctcaagcagaaggaaatgaagtcagttgaaaacatggattgaattaaaggaataaagaacactacaaatggtagaatgtaaacaaacataaaaaacatcatatcttattttaaaacttttctttagggctgggcccagtcgctcactttgggagtccagggcaggctgattgcttgagctcaggagtttgagaccagcctgggcacacgatgaagtcccatctctacaaaaaaatgcaagagtagctgggcttggcggtgcgtgcctgtcatcccagctgcttgggaggctgaggtgggaggattgcttgagtctgggaggttgaggctgcagtgaactgtgttcatgccactacactccagcctgggtgacaaagtgagttaactgtctcaaaaaacaaaaaaattctttaaaagataattgatagtttcaaatgaaacaatgtattgtgatattcataacacaggtagaaataaaacttatgtcaccaataatgatggacaggtgaaaaggaatagaaccatacttttgtaacaagtttattttatyataccggaagtagtataatattacttgatagttgactataataagataaagatgcatatggtaacctagaacaatgattaaaaataaaacaaggctctaaagctaataagccaataatggatgtaaaattcatactaagaaatacacagttcaagcaaaaatacaagaaaaagggcattaaaaaaacaaagtacaaatgaaataagaacacaaacagcaacatrgtagctttaaatttagctatatcaatagttacattaatggcctaaaaactcccagataggctatagaatgagtcacaaaacaatttttgataaatttgaaagtctgaaatcatacagtatgtattctgactgtaatagaattgacctagaagtttttatagaaagatatttggaaattttccaaatatttgggagatattcaatgtaattttgaataactgatggattaagaagaaatcacaggaaaattagaagatatttttaagagaataaaaatttaaagtatagcttatcaaaatgtgtggggtataaagtagcaattagaaagaaatttacagcatttaattcttttattagagaagacagtttttaaattaataatttgtgcttccactataagaagctagaaaatcaaagagaaattaaatcaaaygcaagtagaaagaaataaataataaagatacagagaaaattaatcaaactaaaacaggaaaagaatagagaaaatcaatgaaaccaaaacctggttctctgaaaaatatcaataaaattaattaacatctaggtagactgatagaaaaagagagaagacaatatttactaagaaggaatactagggggccatcactatatcttttaaatattaaaaggataaaggaatattatgaataggtcaatgaatttggcaaccttgatgaactagataaattttcaaaatgtacaaattaccaaaatcagctcaagaagaaattgaaaacttaagtatcaaggtacaaactaaattccactaataggcatttattaagagaaatacaatattttatacaaagaatttttttatagcaactccatttataatagcctggaaacaacccaaatgatgagcagagaaatcaactgaaatagaaatgggaaactcttcaacaataaaagactatactgatacacacaaaatatgtatgaatctcaaaaacacgatgctgagtaaaagccgacacattgtaaaagagtacaattgacccttgaacaacacgagtttgaactgcatgagtccgcttatattcatgggatgcaaaatccacctttatcgggggccaccttttcatacaggcaggtgtcacagaactgactgtgggacttgagtatgcccagatattaacatgtgtaggggtcttagaacgaaccccctgcatatactgagagacgactgcttaaaattttgtttatatgtaactttagaagaacttaatctatagagagagaaagatcagtagttgtggagaccaggagttggtgaaatactctgtatcttgatcatggcggtaataacacagatgtgtatatttgttaacagttaccaaactatacattttaaatgggtgcattatgttgtatgtaaactatttctttataagttgactttagaaaaacgacaaaagaaaatttggtagggatgtttgttgggggtgaggatggggaatggaggagcatggaaagttctttcctaaaaagaataaggaaagaatggatgctcaggtctttgctgcagggatgctgaattttagctttctgaagaacatccaaattgagacagacataaaaaggtggctggctaagttttgaaatcaaaagaaagatctgttttcaagagagagacttgaagtcgtctgcatatagatagtacttgaaatttaggactagatgagattacctaagggacaaatgtagatatggaagaaaatagagcccaggacataatcctgagggtgaataatataaaaggaattgccacaggaagagggtcctacagaaacgtaggattaaaaatttcaagttgggatgctgaggggcactcttcgtttcaacaaagaagaggtctgcattgccaagtacttctgatctgatctacaatgtgttcactgagtttagctatttaggtcactaaatagatgatgggagccctagggttaatggtgactttgtttttgtttgttcatttgtttttgttatgggaggcatgggagcatgtttaaatgctgataagaatgaagcaatagggaaggatagtgaggggagtaactcagtaataaattccttgggtgacaggaagggatgggatccggagccaaggtggagagattagccttagataagaagagaaacattcttcctattttatcaggattgaaggtggaaggaataggtggggatgcatttgggttagtgcatttgatggcagaaagttgagaggatggatacaatctactgaggcctcttctaaatctgagatgcatgatctgtgcttctgcagggcaccatgcagattggagaacgagcagagaraacagcttaaattcttcccaactaatagtctttctattggtctgattctgtaacaggaatgatcaacattttacatggaatgggtttaaggctccttgctttgggacatcacacaccttttatggtaagagatgtttattttgctaatttttttgaaaacacatctcacaccttaataataaaaaaaatgctgagctggtggactaacttgagttgtgtatgtttgttttcagcacattggcatggctcataactacaggaatagcagtcaggctgtgcaagctgtccgtgatgctggctatgaaatatctttgggtttgatgcctaagtcaataggacccttaacatttgtgttcacaggaactggtaatgtttctaaggtaacttttacctgacttccttttgtaaaacaatccaaaactttgaaactaacccaaatgatgtgggcagscattttgtgggtatttcaaatggactggagattctattttaggcacttttcttaccaatgtatttttctcatagtgaaaagtagtaatgatctaaatatgtgtgtatgtgtgtatgtgtatgtgtgtgtatatatatgtgtgtgtgtatgtgtaagtgtatatgtgtgtgtatatctatacacatacatacacacatatagcttttagtttattgcaagctatcggagtcttggaatactttttcttcgtttctttttctttttttaaaagagataattcagccagacatggtggctcacacctataatcccagtgctttgggaggccgaggcaggcggatcacctgaggtcaggagttcgaggccaacctggccaatatggtaaaacaccacctataccaaaaatacaaaaattagccaggcatggtgacgcacacccataatcccggctactaaggaggctgaagcaggagaatcgcttgaacccgggaggcaaatgttgcagtgagccgagattgcaccactgcactccagcctgggtgacagagcgagactctgtctcaaaataaaataaataaataaataaataaataaatagataaataaataaataagataattcattgttaacagtgtaaaggtctgttctgagggtgatctgttttacctccatcaccaaaatgtccacgagtttgaaagtgacctcacgataaccattttttaagactacttggagttttgcaaacaagatgttaggaagaktcatttaagactggaattcatgctttcttcyttctctggtggttttaagaatgtgtttgtaatctcctatagaaacttgtcattgtaaaataattcctgcttcaaagaaaatattttacaaataggatatcattcttattatattgtgaggtaagcatctgattatttcttttgtaggaaatataatttccccatttgaaataatttctgcaatggatctaaaataaatggaaatatttttccctcatttctaaacactcttatcgatactctgagtagcttaagtaaaaaagaaaaaaattaaagccctttctaagtgtgctgttctaacaggaataaaagctagctagcaggctggttgtaagcaactcatctgtatttctgtgttgcagtcctggttgtagggaaggcaagtggagctatgtaattgttgggaaaatgatcagatctttgcagaaaaccatgttggttctttttctattgatttttggatttttactcrtgtgttatttgtagggagcccaagcaatctttaatgagctaccttgtgaatatgtggagccccatgaattaaaagaagtttcccaaactggaggtaagggacaggagatgactaacttttaatgtttttaacagtctatgttataatattttatcaccataaatttttattatttgtcacccactttactaatttctttctccttttcaagacctcagaaaagtgtatgggacggtgttaagtcgtcatcatcatcttgtcaggaaaacagatgctgtgtatgatcctgcagagtatgacaaacatccggagcgctacataagtcgttttaatactgatgtgagtatyatattcaccttttaagttggttgcttatgatacagtgtaggtaggctattttcaaggagagaaattatgaattgtacaatggctttcagttttcctgttgtgagtcctttgggtatcatgatttggcctttggagctatcatcttttatggtatttggagtagtctcgcttagtgcttttggtggtttctgtggatacactctktgtttcactgtctccatttctgcttcaggtctacatgtgcccaatagcgctaagccatttcctgtgcgttactgttttctgtatttatcctggactagttagcactgtgggcagagcataatgcctatgacgtttggtctcaacatggccgcaaattgcaaccataatctcagccagcaatcttgaaatgcatgccattgattatcagggtgagggttaaatagcgttcctatataagtgcagaccatccccactgaatgaaaaagctattacacttacaaatcaaatccttcgatgcgacacacatcttataagaaataaaatatatttgtgtgctctatagtcattggccatgcaacattcttcccccagataaactaacaaaccaaaaaatacataaaacaaaaaatgcatgcatttattgtgaaaaagaatgctttaaataattttaaatatgtttgaycaacataacattttcagattctggtatgaagtttagcccttatatcgtgcagggcatgttagggaaaagaattcttaccttcagcttgagatgtttgaagaagaaaaattatgaacatagtttcaaactgaaaaatttggaatctaagaaatctttattccttctcatttccccaatcacagaagtattggtgattggatgcatcctaaaactgatactgacctagttgccatgtatgcatgtatgtagcacattgctccatagagcttacagatgttatccgatttaatcttcacagcattcctttgaggaatggggtgcgtattatccccatctggcaagtaagaaaaatagagcccagggaagttgaggtagcatgatttaggtcataccctactgatattagagctggaaatataattttaggtccaccgttttttgtttgttttgtttttgtcctttcatttttcttcggcatgcaatacattatagaatgaacacactaatgtatttatagtcatatatttctctatcatagggtaattctatactgaaatctgggtggctatttaatatctttgcctcaaaagatggacactgacatggacaataagaaaatcaattagaagttacawttaattatttctcatagaatttactgatagctttctttcagtatactgtattaaaataggctattttctattttcttgaacctggaacttgcattacagattgcaccctatacaacttgcttaattaatggaatctactgggaacaaaacactcctcgcctcctaacccgccaagatgctcagagtctcctggctccgggcaagttctcacctgctggtgtggaaggctgccctgcattaccacacaagtaaggactctacttcagcaacgatagtagttttgaccagctgcttccattattagaggatcaaatatcacatatcagaggacttgatttctaatgactacttctctgccttatctttcttgacctcttggcagtactcaacactgttaaccatctctccttttttttttaaaattttattgtatatatttatctttagagatggggtcttgttatgtttcccaggctggtctaaatctctggaccccaagcagacctcctgccttggcttcccaaggtactgggattataggcatgagccaccatgcccagcccacctccacttcttgaaacattcttcttttgtcttctgtgatgccccatgcagctctgaagctatttgctcagagaagtcttctcttgtttctccattctcatctctatctctagtctrttactctgttttttgttttgaaattcctcatttattttctcgtgtttatgatttttctccctcttcctagaacttaatctccttgaggatagggggtctctttctcttggccacaagcacctagtacgttgcctgatatataataggcattgaaataattattaaatattgaattaattaattaatatttgtggaagagtaaaagatatgtctgcttttctaggcatgtaactggcatcaagtaaatgccaagggaatgctaggagcaacaacatcaccagggtttagaagaaagcagaagcattgggcgcagcaaaccttaaagggaggaatgaggagaacaagaattccaagtgaaaggattggtgcttaataaatatggagctaccaaagcatatttagggtgctgaatgtgtcagtctagctctacattggttcatgtatgcaagtggtaattggagattgggcagaaaaattgtagtcaactttttgaatgctggactgaaacttttgttcgtaattctagagatttatgtgtaaccacatgtaaaactatacagtactaagcagggtggaggtagcataattgaacctttctgagttatttagagataactatgttaactttagtctgttaatgatttctctaggaaagcaattttctgcgtttgtttccttttttcttttctttctttctttctttttttttttttttttggagactaaaattcatactgggaagattctctgtatcacagaacagtgcagagtcctgaagaatgagctataggaaaaagaccccaaaagcctggaaaatatttgggatccacattgaaaattgttccaaactcctttttttttagtcttgttggagacttcagaatttcatcctctcatctaagtattgatgttattttcagactcgtggcaatatgtgacatttcagctgacacaggagggtctatagagtttatgactgagtgyacaacaatagagcatcccttttgcatgtatgatgcagaccagcatattattcatgacaggtgagtttgctaaagttgttagatgatattcctcacttagttacattgatatactactctaaaattctcagtattttacatctttatgaagttatgaaaatttggagagatatactcaaacatactaaaatttggkgaaaaaaacatgcacatttgaacacacacacatacacaaatatatttaaatgtgagatgggttgctgaagaaggaaaacgttttgtttgaaaagttttgtttattttcgcgtatacttttatacaaaattacaaatgataatgaagcaaatatagtggagtagacatctggaaaagtcagaacttacaaataatgttttgtgcttctgaataaaccacattgctgcttttagtgttgaaggctcggggatcctgatgtgttccattgacaatttgcyggcacagctcccaattgaagctacagaatgctttggagacatgctttacccttatgttgaagaaatggtaagcagactggtaatatcagtaacaactctgtggctttaaattgaataattgagtaattctgtgaatgttctggtcttctgtatctaagaaatctgctgtaaaatgaaatgccagcccttccctgaaatacttactgatactattttatttgacatattctgcttacttgtctcttggggtataggatgatatcactgccttcatgcttaattacaattacatctctttcccattataggtcttttattaagaatgttcaccacgtgtgagataaaacatgctttatttttaattttttgccatctatgtcagttcatattggggcactcttattgtgccgtaataaccaggtctgaaaaattagaaatatagaacatttttattgggttctggtcactaatagttaagtgacagcttatgttgaggtcatgtatttttcttctgtgatcattgattagctaatgaaataccatgttatctaaattccattttctttatcaaagaaaatttttcttatttcagtttttatcctaagcattcatagccttcctgctttatttttatttcagactgtctgcctctgccaatgattccaatataaagaatggctcttactcttttcatctatatcttccctcataagctcttacactaaaatagaacaatagttagtggggcaagaataaatgaaatttccagtctgtgatcctcttttctttcaaatagtattccattttgaccctttctttttcctattggaatatgtcaacagggagatgtagcaggcttgagaaaatgcaggcagcaggcactgtcatggttagacatgatattgcacctactaggtgcaggaagtgttcaaagtactaaatatattttaattttaagtactcatgaaaaccgtattaggtaaataccatcattaaatccattttaccatcattaaatccattataaaacaaatacagagaagttaaggacgtgttgctgatacagtcagtgctggatctgcaatgtgtctggagttggtgctgaggcattaaagaagcaggagaaggagagtacaaatgccaggctttgctggagatatcaacttgctttataaccttgagcagggcactcacttcctttctgagyctcagatatttcatctgtaacatgargtggttgtaatgaatacatartcttattttattttattttatttttttgagacagattctcgccctgttgcccaggctggagtgcagtgatgcaattgcggctcactgcaacctccacctcccaggttcaagygattcttcctgcctcagcctcccgagtagccaggaccacaggtgtgtgccaccacgcctggctaatttttgtagtttttagtagagatggggtttcaccatgttggccaggctggtcttgaactcctgacctcgtgatccacccgcctcggcctccmaaagtgctggtattacaggcgtgagccaccgcgcccagccaygaatacataatcttaacagtttctctacttctaaaattttataatggtaaatgtttaagtggccaaactgtatgtatataaaaaatacaataatatatttaccaagrtgtttaccatttttgatgttcttcattcatttccctttggcatcatttccctgcagactgaataacttaatttatcacttcttacagtacaggtttgctgatgacagattctcttagttgtcctttatctgaaaatgtcttcatattctctattctgctaatcagacatttctgtgcatttttaatttccgatgttctattttcagttctagaatttccattgggttcttttttaaaaattttgttttggtattttctctttttctgcagagagtttctatcttttcattaattatgagtgtatttttcgttattgcatggaacatagttataaaaaccactttacaatgttcatctcatacttccaactttctgggtcaatttgtggttgaactttattgattgtcttttcctttgagaattggtcatagtcttctggttttcatagactgaataattctggattatggcctggatgatgtggatattatgtacatgtatcaaatgcattttctgtattcattgagaagatcattttttccttttctctgttaatatgtgaattgtgtcaattggttttcaaatatcaaactaacttcacagtcttaggataaatccaacttggttgtatgttaaccttttatttatgactaagttctggttgctaagraatataccaacatttattaatctattttaccattggtagacatttggggttgtggagatatatatatatatatatctccacattattttgttgagtttgcacatagatttatcttgtttagkrttattaacatctatgttcattagagagcttaatctataactttattttattataaggtctttgtcaggtttggatattaagtttatgttggcttgaaaacaagttagagagtatttccttatttttggtctcaggaacattttacatgagattagtgttagttctacttgatacaattcattagcaaaactatttgggttggtagcatttttgtttgtttctttttttagttttaagggtaagttttaaaattatagattacattttatttaaaaacttaagaatgttcagatttttatttttctttgtcaattttggtatgcttattttctaggaatttatatttcatctaagttgtaaactttattgtcattttttttttagtaataaccttattaactctttaatagattctgtagtgatttctctttttcctgatgttggttgggtatgccttctgttttttcttaatctgttttacctggacttgatcaattttattagtcatcgcaaaaaatcagttcaactttggtgatcatctctattttatatcattttctgttttcttaatttataatcttacctatactatattctttattttactttattgagagcttagttaacctttcttttcataacttcttgcaataagtgcttaggtaattgttttcctgtgtttctctttagcaatatgtgcattttaaagccattagatttactttgagtacagcccatttttgattgtattatctcttgttttgttctttgactttcttgtatattctgagtattacttccttgtgagacgtatagtttgcaaatactttttcccattctgttgtttcttcactcaattgatcttttgtttgtttgttttgctgtgcagaagctttttagtttgatgtaattccatttgtctgtttttgggttttgtgcttgtgcttttgagttcttatccaaaaaattcttaaccaggtcaatgtaatgaagcatttcccctgtgttttttttttcttctagtagtttcatagttttaggtcttccatttaagtgtttaatccattttgagttgatttgtttatatgatgagaaatagggggtctagttttattcttctgaatgtagatatccaattttcccagcaccatttattgaagagactcttcttcccttaatgtttgttcttgacacttttctccaaaactggtggatatagatgcatggatttctttctgggcttgcttttctgttccattggtttatgtgtctgctgttatgccagtaccatgctgttttggttactatagctttgtagtatattttgaagtcaggtagtgtgatgcctccagcttcgttctttttgctaaatattgtgtgacgatttggggtcttttgtgatttcatactagttttaggattgtcttttctatttctgtgaagattatcattttttttttttttttggtaaggattgccctgaattggtagattgctttgggtagtatgggcattttaacaatataaattcttccattccatgaacatgggaatatctttacatttgtttttgttttcttcaatgtctttcatcaatgttttacagtttttagtatagagatctttcatttccttggttaaatttattcttaygcatcttatttttgctgtggctattggaaatgggattttttttcagattgttcacagttggcatatagaaatgctactaatttttgtatgttgattttgcattctgcaattttactaaatttatcagttccaacagtgttttgatggagtctttagggttttctatatataagatttcgtcatcttcaaacaaggacaatttgacttcctgctttccaatttgggtacctttgttttctttttttttgcctagttacactgactagaacatccagtactatgttgaatagtagcatccttttcttgttccatatcttagagaaaaagctttcaattttccatgatcagtatgatgttagctgtgggtctgtcaaatatggcttttattatgttgaggtatgtaccctgtatgccaaatttgatgaaagtttttatcataaggtgatgttgaatttgtcaaatatttttttctgtttctgttggaataatcatatggtttttgtccttcattctgtcaatgtgataaattatgtttattaatttgcatatgttgaaccattcttgcacccctggaatgaatcccatttattatggtgaatgctcttgtaaatatgctgttaaatttggttttctagtattttgttgaaaatttttgtatctatgttcttcagggatattggcctgaagtttactttttttgttacgtccttgtctgattttggtatcacaataacactggccttatagaattagtttggaagaattccctcctccttgatattctggaatagtttgagaagaattggtattaaatcttctttaaatgtttggtagagttcagtagtgaaaccatcaggccctgggctagtctttgatgggagactttttattactgattcaatcttgctgcttgttatcgattcgcctattcagattgtttatttttttctggttcaatcttggtaggttgtatgtgtccaggaatttgttcatttcttctaggttttccaagtttttggcatatcattgttcataatgctctcttatgatcctttgtatttctgtggtataagttgtaatgtctcctttttcatctgtgtttttttttttttttttgagttgtgggtgatttgttatgcaataatgttgcagaagctaatacatacttaaaaaaaacttttaggttcaggggtacatgtgcaggtttgttctataggtaaacttgtgtcacgaggggtggatgtgcagattatttcatcaccagggtattaagcctactacccaatagtcattttttgtgctcctctcccttctccctcaggaaggccccagtgtgtgttgttcccctctatgtgtctatgtgtcctcatcatttagctcctgcttataagggagagcatgcagtatttggttttctgttcctgcattaatttgctaaggataatggcttctagctctatccatgttcctgcaaaagacatgatctcattcttttttatggcttcatagtattccatggtgtaccacatgttctttatacagtctatcatttataggcatttaggttgagtccatgtctctgctatttacaatagcgctccaatgagcactctttacaacagcatgtgcatgtgtatgtgtccttatgatagaacattttatattcctttgggtatattacccagtaatggattgctgggttgaagagtagttctgtttttagctctttgaggaattgccacactgctttccacaatggttgaactgatttttactcccaccaacagtgtataagcattcgtttttctccacaacctcaccagcatctgttatgttttgaccttttagtaatatccattctgactagtgtgagacggtatctcattgtggttttgatttgcatttctttaattatcagtgatgttgaatttgttttcatatgcttgttgactgcatgtatgtcttcaattgaaaagtgtctgttcatgtcctttgcccagcttttaatggggttgtttgttttttcttgtaaatttaagtttttatagaagctagatattagacttttgtcagatgcatagtttgcaaatattttctcccattctgtagattgtttactctgttcatagtttcttttgctgtgcaaaacccccttagtttaattagatcccatttgttgcatttgtttttggtgtcttcatcatgaaatctttgctagttcccatgtccagaatggttttgcctagatcatcttccagggtttttataattttgggttttacatttcattctttaatccactttgagttgatttacaccattttatatgctgtaaggaagtgatccagttttaatcttctgcatatagctagccagttatcccagcaccatttattaaacagggagtcctttcctcattgtttgtttttgtcagctttgttgaagatcagatggttgaagatgtgtggccttatttttgagctctctattctgttttattggtctttgtgtctggttttgtacgagtcttatgctgttttggttactgtagccctgtaatatagtttgaagtcaggtagcatgatacctccagctctgtttttttttgtttaggattgccttggctattctgcttctttttggttccatatgaattttaaaatagtttctttctagttctatgaagaatgtcatgggtaatttgataagaatagcattgaatctataaattgctttgggcagtatggccattttaataacattgattccccttgaaaactggcaacaaggatgccctcttttaccacttgcatccaacatagtattggaagtcctggccagaacaatcaggcaagagaaagaaataaaaagcattcaaataggaagagaggaagtcaaattatccctttttgcagatracatgattctatatctagacaaccccctagtcttagcccaaaaattaagctgataaacaatttcagcaaagtttcaggatacaaaatcaacatacaaaaatcactagcatttcaacacaccaacaacagtcatctaaaattttattcatttgagtcttttctccttaggcagacacagggtttgttgattttgtttaccttttcaaacaaactctttgtttcattgatcttttatatkttttaagtctctattttgtttatgtcttctctaaccatcattatttctttgtgtctactaattttgggttcagtttgttcctgtttttcttggtccttgaggtgcaacattgggttatctgagatctttgttcttttttgaaataggcatttcaaaattgctataaacttccttctgagtactgcttttgctgtatcccataggttttggtaggttgtgttttcattttcatttgtctctagaaatttttaaatttcccttttagtttctctattgactccttgattgatgaggattatgttgtttaatttgcatgtgtttgtagtttccaaagtttctcttgttattgatttctagcttcataccactgtgatcagaaacaatacttaatatgatttcaatttttttgaatttgttaagacatattttgtggcctaccatatggtctattctggagagcattctatatgtactagagaagaatgcgtacactggtgctactggataaaaagttctatatttatctattaggtccattttgtctaaagcacagatcaattccagtattttcttattaatttctttctggttgatctttccatctttgaaagaggggtattgaagtctcctactattattgttttggtatctattttttaccttcatgttgaytaattaatatttgctttatatgtttaggtgttccaatgttgagtgcacatgtatttacaattgctatgacttcttaatgacttgagctctttaataatgactttctttgtctcttgtgaaaatttttgtgttaagttttttctatctagaataagtattgtccctgtcctctgttggtattatttgcaaggaatatcttctttcatcccctttgagggatgaaagcctatgtgcattcttaaggtgaaagtgtgtctcttgtgtgcagcatatagtgagagcttattttttttttctctttgcaacttttattttaggttcgggggtacatgtgcagttttattacatgagtaaattgcatgycactggggtttggagcacaaatgaattcgtcactaaagtagtgagcatagtacctgataggtagtttttcagtcttcaccctcctcccatcctccaccctcaagtataccctggtttctattgttcccttctttgtgtccatgtgtactcagtgtttagctcccacttataactgagaacatgtggtatttggttttctgttcctacattaatttgcttaggataatggccttcatctgcatccagattgctgcaaaggacrtagtttcattgtttgtttatttttgaggcagtcttgctctgtcacctaggctggtgtagtggcaccatctcatttcacaaacctctgcctcctgggttcaagcaattctcctgcctcagcttccccagtagatgggattacaggtgcccaccaccaagcctggctaatgtttgtatttttagtagagacagggtttcaccatgttggccagggtggtcttgaacttctgacatcaggtgatctgctcaccttggcctctcaaagtgctgggattacaggtgtgagccactgtgcctggccaatttcattctttttttatggctgcatagtattccatggtgtatatataccacattttctttatccaattcaccactgatgggtatctagattggttccataactttgctattgtgaatagtagagctttgtttttttaatccattcagccactctgtgttttaattgaacaatttaatctgtttacattcagagtaattattgatatgccaaggacttactactgccattttgttaaatgttttctgattgctttatagcttatttgttctttttttcctctcctgtttatctttgtgatttagtgatttcctttagtgctaaatttgtattcttttatctttatcatttgtatatctgctttagtattctgctttgtggttaccacaaggcttacataaaatgtcttatagttataatagactattttatactaataacaacttaaattcagttgcatacaaaaactgtagaattctaccctcccaccagcgtgtgtgtgtgtgtatagtatatatagtatatatacacacatatatatgtatatgtacatatattcatatttcttttttacctttctgagttgggtgcaaccagttaatattttttgatgtcacaattttcatctttttagcttacatatttcttaatactttattgtagctatcattatttttgactgttttgaattttaacttccatcctagagttatatatacctatgttttgcagagtgccatagtagtatcagggtattctggatttgaatatatatctacctttatcagtggatttttttactttttatgttttcatgttagtaatgttctttttttctacttgaaaaactcccttaagcatttcttatagagcagctctagtggtgaagaattccctaaacttttgcttgtctgggaaagagtttatttcttctttttttctgaaggacagctttgctgtgtatagtatttttggctggcaggtttctgtgcatcagcactttgaatatatcatcccattctctcctggcctgcaggatttctactgagaaatctgctgatagtctaatggagattcccttatatgtaacatgatatttttatcttgctgcttttaatatcatttgtctttggtttttgacagtaattataaagggacctctttgggttaactctgtttggagattgttgagcttcatatatttggatgttcatctgtcttccaaggcttgaaacatgttatttttcatttatcaaaaacttatattcactaattttaaagttttacattttttaaaaaagttatctatattgtccttttattttttgaacatattaatcacaatttagaatcatttttgttaattccattacacttcttggttctatttatgttccctgtttttttccttggtttttatggttttcagtaaattcttacctttcaatatatttatttatttttggtttaatgccagacattgcgtattcaaaattttagagatgactcgaggctctggatgttgtgtgattttcctccagataatatattctttgttttgggcagtgagatagacaagggtaaaggttaggagaaattcacctaaattcagttaggatgaagtaatttaaatctaggtttcagtcctttggagaactgacctttttcaaattacyatttattttagatacatgaaaaccattttctatttattttaatacagtaaataaattctctgttaccagcaccttctaggaacatttttcttgttcttagttgggtgagagagctagatcttaacctatagttagggaggaaagattgtctcattggctcttccctgtccaccagaaacagcaatgctaacttatatgccattacttcttggcagtatattcaagaattgggttctttgagaaggactaacttacatgcccattacttcttggcagtatattcaagagttgggttccttgggagaaaagaggaggactagaaggttgctgaaatgttaacatgagacatcttactttttttgttgtctctgactcaattttgcaagataatgtgaagagggtgtgaatgactttctaggtctactcagtcaagtcacttttgctaccacctttgaaatgctgatgtacctatacatataactactaatactgatactgatctgagggagaccccttactgcagggttggtggccttgctgagtggaaaacctcattctctattcctaatagaacagcttgaacttttggaatggagtagaggcccttgaagggaggactatagctataaagcttgtgaagatatttgacaacatgcttaatatgatacatttaactggttggaaaggataagcttttttgtgttcacagcaagcaaagatgattataatccaattttagttttaaaattgggacttgtgctgaaacaccatagtcttgtgggcagagttgattgcttgtagaagacttctattagcaatcacttatactcggtgakcctcagaaaactgtttcttaaattatttttttcccttgattaatattttaatatggatacaaacaccaagaggccttctttgcagtgtcatttatctcttacaaatctcattttcctttcagatattatcagacgcracacagcctcttgaaagtcagaatttttctcctgtggtgagagatgtaagttatgagcagaatattttttcataaatgtatttttttactaccatttttgctctcttctctctgtttctctctctctccatctttgtcattctgtcttttctctatcagtcatgacaccttgtttgtaggactaaaatgtggatactaaagaaatgtcttgtgtcatatacatttaggcagtgattacatccaacggtacattacctgataaatataaatatatccagacactccgggagagcaggtaagtattgttcmaatcctcttgttttatacatttattcttatcttggaattcatgagtattttttaatgcttcaatgggagttcttaatattaggtttgtacactatataaattttgataatgtttgaaaatgtaggaaatccaaactaagtggctggctgaaaccactgtgactgtttcccacttaacagtagtatagsgtcattttggcttctaatagcctgtgtagacgtatgggtaagcaagcaaaaatccaaaaggattgtccttcaggtagcttcttgtttttctctagcttttgatacatgatcatgcctcggttattttctcaaaggaaaatgagcacactagcctttctgtggtgctttcagtttgggttttagttgaggatttggactctcttttgtttagtataatgttcagggaagtgaattcgtggttacaaattaagagagttgtgaataaacaattgatgaaagtaagaggtagttttctccagggattcttattagggggaaggtgccaaaaagtaatgtagcaaatctactcaagagaatagttactttagaaaggtctttagctaaggcccttgtttccttaattgattttactacttaaagtttgaaaacattgattttatttttttggaatattctggtctcctccagccaattgcccttgatctgtgtttatatctactctgctggtcttttcacattaaaaaaggaacccatgtactgaagtatcaggagaaaccagagttggaaaaaaaaataacacaactgttttatcttctttttcagtggttctactacaagcagtaaacaaagagatctgcccagatcaagcgtactatagttaggcttttccatatgtgctggtttgattatagttactttttaatgtgtcagtgaaatatactggcataagacactaagtatttactttttttctttgtgaataagagaagctagctctataaccctgtaggagagtttcttacaagtaaaacttcacatctgtttgtttttcatagctctatgttttggttctcatcatccgatggtcttttacactactgaaactagtgacatgtctaacatgactggtcaagatgatatcttctctcttatgtgtcatatttcatgaagcagcaggtttacttggctccgattgctagaacttgctgccctctttcctgatggaaacttgtgccaagatactgataacaaaggttgcattttgaaaggaaatttactttatattgaaccctgccttattcttctcttcttttcatcacttagcacgtgattattaacctggagtctggggtttgggggtactgatgggctggacagtattagaatctaggagtgagtttctgttttgagcatttggtatttggaatgttttaattatacaaactatagaaaatattgttagacagaaaatataataaccgaataatagtggttctctctggaaggtgaaatgggagatggtagtagttaaatgagacctcttcacatcagtaatatgtgtgttgggatacagaaggacaggaattttttatacttatwtttatttgttaaaaattaatgaaaagttttttgggttaatgttcaagagacattatggcctaaagattctaaataacagagcctacttcagtccctggcactaggccatttctatggtttcatgttgataacagggaatttgattcaaaaaatatttaatgagtaaattccatatttaagacaaaatgtgctgagcattaatgggtttgtaaagatgggtaagtcttagatgctgccttggaggtcatagtttgtgggaaagacagaaagtcatctgcctggaaggtattaatataaattccagcagaatagactgttcaagaattaaaataatgcctaacactagtcttcagcttctacatttaacccatggcatgtgtgactcaaagtcatggttttgctattttcaagtgactctaaagatatatgacaaaacaatttctaatatggataataatattctcttcctcaaattgttgtcttctgggattgttgtgaggaataaataaggtttccaaggtaaaaccccttgtatgattttgaaccacatcttctggaaggataaaatgtgagaccaagttactcaatcacaagtaagccaagaaaatgtccagcatctgcacctcactagtaatactgggaattcatgaaatacatctatacgtctgtagatatatatctcagagatgtcaggtctattgttcttcattgtacaaaatgtaaaataattaaagaaacatgttgttatagggaactcattcatgttgaaattcttattttaagtaatgtgaagagaaaatgttgcttcattatttaggttttagtatgatttgtggaatgcaagattctgttatttaaaaaaaaatttttaattagccccttcccttttttttttttttttttttttttaaatagggaacgtgctcagtcactttcaatgggcaccaggagaaaggttttggttcttggatctggctacatatctgagcctgtattagaatatttatcaagagatggcaatatagaaataacagtaggtaaataagccctaatttttgaagaagaaaaatgtattttatagcgtgttgacttctacattttagaagactactttgtttctgaaatttgaaaatttatttttggagatgttaaaatatattttactctgacatatctaaaaatgtgacttttaattactgaaataggatctgacatgaaraatcaaattgaacagttaggcaagaaatataatattaatcctgttagcatggacatttgtaaacaagaagagaagctgggcttcttggtggcaaaacaggatcttgtcatcaggtcagtatctggcaagaaatgagtttcatatttttgttgttatttcttttctcatttttctttctctttcacttctcctctcttcatactcctttggagtaaagtttttaattgaagtatgggtccagaaggtgcacaaatcataagtatatagctcaatgaattttcacaaagtgaacacattctgtgatgattatttatgtcaggaaacaagagtatcagtaattccccagaagccctcctggtgcctctttctattcacttaccccatcctctaagggtaaacactatcctggcttctgacatttagtttctgcctgctttcagacttcatataattggaatcattcaatatatcctcatttgtggcttccttcttccattcaatgttgtgattacaagagtcatttgtgctattgtctgaaatgataatttattcattctcattgctgtatagtatttcattatgtgaatataccattattatttatttgactactatagatatttaggttgtttctggattttggctattataagtcacactgctatacacatttcggtatttgtcttttagtgaccatttcactaaaacagtaattatacatttctgttgggtatgtacttagaagtgggattgcaggtcataaggtattaatgttttatatacttaagtgtctattttatcctttggagttataaagcttaaatggaataagtagattatttarccttatgaccattttaagtctcatcatagcaacagatcctgaaatagagtattactaacaaaaatgcagatctaacatctagacacagaattacatgagattcactttataactaaatttggttttgatatttgagtacatatgtacacaaagaaaggaacaacagacatcagggcctgcttaagggtaaaaggtgggaggagggtgaggatcgaaaaactacccattgggtactatgcttattacctagataatgaaataatctgtacaccatacccccataacatacaatttacctgtataacaaacctgcacatgtacccctgaacctaaaataaaagtaataaataaataaataaataaatttggttttgaaatgtcaaagtgatgaaaatagtcattcattcctagaattttcccaagatgagaagaagaaagttatctgttccctcatagtgattacctagtcactttcacagatcagattcaaattgtatctttggaggaagttctgtgatgttctgctttaaaaaaaaaaaagcaggcttggaaaacatataatgaaaggtagttctgtaggctggcatttttacatttctcttgatatctttaaatacaggctaactttatgcacttaaaatgttactcaatttatataaatgttatgagcgttaatttttatttagaaaaaattgactaatgaccaactgaacctctctgatattaccatgaaaagaaattctgattcaaaatagaatgatctagccttctgagtagaacaataatttattttgccacacagaggtatctaaatatatcatttttaattaaaagtaaaataacatgataaaatccatttggaacagaatctgaaataaaatgtgacaagataatggacaaagacatcaatctcttaatatgtccaaattttaaaatttagcaaactagtggccttcaataggatttagcattagcaaaaactgttttatatttaatgttttctcatttggtgtattttctatgctgaataatggtaatgccattaaacaatgttatcctataacattccttaaattttttttttcttttttttgagacagtctcattttgtcacccaggctggaatgcagtggcacaatcttggctcactgcaaccttcacctcccagactcaagtgatcctcccacctcaaccacccaagtagctgggactacaggcacttgccactatgcctagctaaagtttgtatttttagtagcaatgggatatcaccatgttgctcaggctggtcttgaactcctcaagcaatctacttgcctcagcctctcaaagtgtcaggattacaggcataagccaccatgcctggctaattgttttattttttaagttggggaaagaatgttttgatataaccacagtgatagggactacaaaaaaatgagtaaagaatatgtttcacaaaaaatgtttagtaatatgtacaattctcatagttataatttttcaaatttagtttttaatttaatacaaagtagtaattgatttcaagtttctttgaaaattccacatgtattttgtgtgtatttttcacaagtgacattttcgaccttttggagtaattgggttggagtcaacttaaataatttaagagtatgtcccattgagtgcttactgtatcatattcgagaygaattatgaactctaatcccttcgtctaaaaaagtaccacaggcaaagtcctatcattctacttctcagcctattataaggccaaagttttaaaatattattagatcttagtaaaattttgattgagcaagtttaatatggagaatgtgatttaaaaatttctgtttaacctttaagatgatgacattgcacattttctattaatatttggttctaatagttttgcgagtattttgctcagtggtttccaaaagtctactaaatttgttagcagtaattatttttggtttwaggwaacaaaaacacagagaccaggagcttttgatactgataaaagacatacacaattttattctgcattataataaatttaaatagcaatactctattctgttgacctgaggaggaataaatgcctgaaaagtggttttattgtttttttttttatgaagtagagaaaatctgaactatgcagaatgaatttgacaagtacaatgatatagtgtratattgtttctgttggtttttatttttttttgttggtactgtagacagctttaccaaataggcattaaaaaacaaattaaatattatcatgtaattaacagagtattttattattcctagaatagaatatggatatgctcatttttataacactcatatttatgaaaatttaatttcttttgattatgcagtcccagagccaaattattataccacagccaaatttgttgaaaaccgaatcaaagttgagctttgagtacagcatcatccattgttcaccatgtggatttttagccattttgatagcatttacactgatcaacaccgttaaagcctgtctcctccgtggacccttcctggagtctactcaataatgtaatacattagctgtagaaatatagggatgaatggagcaaattccattaaatgttataaatatataactggatgcatgcagaggaaggatatctggctttggggaaatctgggaaagctttgtggaggaaaataactctttagaaatttcttaaagaggcaggtataatttggattggggttttctgtcgtgggctttccactaaaatagggctgctgttctttttaccttcacatcttccaaatggctatcaggaagtgtcaarctaggtcaagatggcccatgtattacattattgagtagactccaagaagggcccaaggaggagataggctttcatggtgttgatcggtgtaaaggtatcagaatggctaaaaatccacagggtgaacaacagatgatgctgtactcaaagctcaactttgattgggttttcaacaattttggctttgggattataatttggtgctgggtctgcataatcacaagatatcaaattttcataaatatgagtgttatataaatgagtatatccatagtctattgtaggaataataaaataccctgtcaattacatgacaatatttaagttgttttttactgactatttggtaaagctgtctgcagtaccaccaaaaaaataaaaaccaacataaacaatatcatactacatcattgtacttgtcaaattaactctgcatacttcagattttctctagttcattaaaaaaacaaaataaacaataaaaccacttctcaggcctttattcctcaacaggtaaatagaatagagtattgctatttagatgtgataacagggtgaatttattctgtggcccacagggagtcattgatcacgtctttccaagggaatatttatttattttactttcaacttttattttacaatcaggggttacatgtgcacatttattacaaaggtatattgtgtgattctgaggtctggagtatcaatgaatctgtcaccaagtagcaagcatagtacccagtaggttgtttttcagcccctgctccacttcttatctcttccctcttgtagtcctcagtgtctattgtttccatctttaattccatgtgtacccagtgttcagctcccacttacttgtaagtgagagcctgcagtatttggttttctgtttctgtgttaggtcgcataagataatagtttccagttgcatccatgttgctgcaaagaacactatttcattcttttttatggctatgtagtattcaatggtgtatatgtactacattttttaatccaattcacggttttkgtttttttatttttgtttcattttgttttgttttattgagacagggtctcactctattgcccaggctagtgtgcagtgctgtgatctcaactcactgcagccttgacctcctgagttcaagtgatcctcccacttcagtctctggagtagctgggactacaggcatgcgccaacatgctgggccaatttttgtatttgttgtagagatgatgtttcaccatcttgtccaagctggtctcgactcctgggcccaagcgactcacctgtctttggcctcccaaagttctgggattacaggcatgaggcacagcacctggccccaatcccactattgatgggcatgtcaattgattccatgtctttgttattgcgaatagtgctgtgatgaatatgtgagtgcctgtgtctttttggtagaataatctattttcctttggatagataaccagtaatgcgattgctaagtcgaatgatagttcaacctttagctctttgagaaatctctgaactatcctctgtagcagctgaactaatttacattcccaccaacagtgtataagtgttcccttttctgagagaataatttaatcagaacagtaccttaagatgcagctttaatacagttcaagtaccttagaaagtagagttgaaaaagggagtttctgattagtttcttcctgttttcaagcttgttgccttatgtattgcaccctcttgtggccaaggcctgcatcacaaacaaagttaacatggtcactgcaagctacatcacaccagcactaaaagaattggaaaagaggtaagttttaatcattttaaacaaactgagtggatccatggcattgtttttattttatatccaagttttcctttttcctctttccacctgctgcagtgtggaagatgctggcatcacaatcattggtgaattgggattggaccctggtctggatcacatgttagcaatggaaacaatagataaagccaagraagtgggagccacggtgagcccaatttgtacccaaaggcaacattaaaatgtctaaattcttgtgtacagaatcaaagtatgagttataatatagcaacacctttaatcaaagttaaagattttttttttttgagactgagttttgctcttgttgcccaggctggagtgcaacggcacaatctcggctcactgcaacctccatctcccaggttcaagtaatactcctgcttcagcctcccaagtagctgggattacaggcacgcaccaccatgcccggctaattttgtatttttagtagagatggggtttctccatgttggtcaggccagtctcaaactcctgacctcaggtcatctgcccccctcagcctcccagaaattttaaataatatcttataactgcaaaaatatccatacaggaaaacaatgtccaagtcttaggtagcaaccaatttttggagaaacagatgctactataaaattttggcttaatacaaattttagactaccttgaagattctgtaataagatttgacttttaaaagtaagaagaatctttgggtatcagcaatctgttgatatgaaatatcttttatgaaatagtacctttggcgaggtactattgggtgtaaatgggatgattcagattgttttaggttttttgaatgtgtgtgtatatatatgtattaaaattatatatatgtaaatatataatttgaatacaaaagttagtaggaactgactaagcagaattgaactaagagttggatttttaactgaacaaaatgttagtcactatttttacagttttttwaaaaaaacatatatataaaattaactgttatttaatcaaatggtacatgctttgaagatgtatttttgaatgccttagtaactttaagaatgaaaaactgtagcaagtttactccattcatatcattgtcttcaattaattacttagacattctctaagttgtgaattcttccttatttattgattctttaatttatagattgaatcatatatttcctactgtggtgggcttccagcccctgaacattcaaacaatccattgagatataaatttagctggagtccagtgggagttttgatgaatgtaatgcagtctgccacctatctgctcgatggaaaggtgaggaatcttatccaagcatagtgatatcaacctgcaataacagcctgagacagtctaaatactccctgatcccaaaccctttaataatggtgatgctgcctgtctccattatctcctcctgtgttgtttcccagtgtatattttctgttctatttagcacggtatccttgctgttcctagcaaagcctgtgcctattctttgccctaggccttcttgcaagttgtttctgctattcaaaaattcacttctctatatatgtaaacactggttatctcttgatttatttcagcatgacaaacattttctgagtacctactatgtgctggactttgggcaagttacccaagactgtcacagrgaatgaaattcatgacctcagaaagctcacagctggactggggatggggctcttggaatggagggtttggtgtgctggggaaagaaactataatttcttccccagctgccatgtaacagagcataagaactctccaagtttaatattattttcattattttacaataagaaagctatggctcagagagcatgtccaaggtcatttggctgagattcaaacccaggtctaactaactcttaaggctttttttctccttttgccagattgcctaatggctggaaagacagacatgggaataagtaattataatttaatagggaaatttccaaagtatgttaaagtggctcagagctacagatgggagaacagtttaattggccttggtgaaggggttgggggaaggaggatggggaaaagaaaaactagtggagaagaggatgtgcttggccttgaaggatatgagggtgccagctaggcagggatgttagcactcatgktatgacagttttataaggggaaaaatcaggtttagggagttaagataacagctacacttaaagagatggcaagtgacagagccagtatccaaatcatgtctgtctgacttcatagtttatgctcatagtttggagaaaaatgaaacgagactcagagtgcctctttgaattgtgtgttgtaggcacctcattcaccttgccctagtcctggccctgcagggagtgatgagtaatatgatcacatagatgtgtcttaaaaagattattttagcatcaatattttacattgtcaaggtatttgtgaatcgaaatgtatttcaggagtagagagaaagaatttcttaagcaacaaggtgaatgctgttattagccatggtcttttgtgcctgtgatatagagcataactcatacttggcttggaattacaaggggagtttaaaaagtaccagcgcctcatccccaaagattctgatttgcctgggtttgaggattttttaaatcttcctagtgattctaatatgcagctgaatttgagaacaactgatttaatgatcagagaatcacagctgcacttaaaatagtactaaacaagcaggacactttagcttgatgccggaatgatgtgtgacatgtttcaggataataaacaggatcaatgagttctggtctaattcctggcatccctcataacatagccaaagaccaggcagttgaaaagatctaccggatgtcagtttcctgatgtgtaatgtgagcactgatgttccatccaattctttaattctatgaatcatgaaggtttggaccagaatcttagtctgatgttttaccaagcacacatccttttacatgctacagcctatctcctattgcattscaacagctccttttaccttctgcaatcttaagagactggcctatgtttggtataaattaacatgtgaaggcaggacaaattcttgcctcagttgagtaaaacacttatttttaggaggccttataaatgctaaagatggtaacaacgaaagggtcagcagagtgcaaccatgtaaaagaaagagcaaggaacttggtatctgtgggcctggctttgtgctctagytctgccattactggttgtgagctttgggttccttgtctgaagataaagacaatcatgccagccttccagtgttcttagtcagtgaggtcacatagattgcaatctgcctaacagcagattgtcagccatgtaataaatctagcaaatattagctacataaggaaattagtggttgtgagagtttaagacaaacaagaggttattttcaggtagcagaagttgtatttgttgaattcgaagttctcctctttcatcctaaatgtcttttgtaaaaatgagtgctttttgcatctctctgacrctggaggataccaagagaaaatatgacacttttctttgctaaaatgatacttttttcaaggtcccrcctgcgtttcctcttgtggatgaagctttttgtgaccactccagcctctgttcactattattttgcctgaactgaatcaaagaatcagacactttgtttgtctgtgtcttaagaattttctaggtgctgcattattcagtcagtaattcaagtgtatcagtctgtttctcaagccagattgttgaacaacttaaaacctctcttgtattcttgcccttcactccctctgccatcaccaccctccactgtggagcgggtcttaagtaattcacagaatcataatgggaaaccaagtcacctctctgacttctgcttgaatttgaagacttaaacttttccagaaattggtcagtggcctatgaatttgaatgtgtctcattgtcttacatctttgtagtaatttctagccacttgtactatttctaacttctaatttgattcctaacaattctgattttcttccacatattcggagacagtgatttcatcttctcttagtttcattcccctcacagtggtggtgtacttttttacattgttggcatttgggagtgatatggcagagctttgccatcatcttctgcagtgtttcccagtctaacctggcaaaacatgtagtctaagtgagaagtgtgcttgctctgcaaacatcgctttaagataagttttctagccctctatccattgcctgccaccaccttgactgcagcacccaaccctttggaaatcaagagctaccactatcttcctttgcctgtaccaattctttatgcaactttcagtgcatcccaggtggcataatccagaatgctgtactttgtcaatatccctttcaaaatactgatccagaaataagcatgattaaggggacagtgtagttgaaggaacacagacattgcagtcaaatagaactgggttcagatttgcctttgggtgactcagcctcagttttcacctctgaaaaatgagttgtttcatggattaaagataatgcccagtacaaggcactgggcacatagtaggccctgaaaaaatgattgtatatttccttattagtttagtgatcaagcttactgtgattatttgaatatatatgatatatttattcaaatataacagtgattctctctacttgggagatttgtatttgtgtttgtgtgtatgtgtgaaagagttggacctagagaagcttgcaacagcagtgaataatgagcctgagcattgtcagagcagaaagaaatgtatattctctgcaaaacagacaaatatgtttctgttgtcattcaaattattaataaaataataaacaagaaagaacttattgttgaactacattatataccactagaaatacaactaygaatgaatatmaaatgacaatgattacccagtaatttttgggtcaggttgcttagccacctgccattctcactaaatgaatcattgccattcagctgacatttctccatcttctttgtaaggatttcatgatagacttatgaacttgctgctttatttatgattggtaagctagaatattgtggtcattattgaatttttctttcagaaattttcctgactttcaaacaagcaaacaaaacttaagaattgtcatgggttatagaaatgagatgggtgtgaagaccctaaaactcaacgtttgcttttttgtttttaagagatggtgtcttgctgtgtcgctcaggctattctcaaactcctgggctcaggccatcctcctgcctcagcctcccgagtgaagtagctgggattacaggtgggcaccatcatgcccaacatttgctttcttagattttttcaaaaatttagaattctattaaataaactggttttaaagaagtagttcagaaatcatcccccctttggaaatgtttactctgcagtctagtagggttcacaagaaaattaaatggaaggcattcctcacatccttcattcagattttcacttttgaaattttaaatggtgcttggcactctccaaagtgagtctctgaactgaaaagactccagtggtcctaacattgcagtcagcatagcccttttctttctggggcttcatccacagataaatgagtttccattttctctctcatacaaaggcacgttcagaacccatctactaataaggcatgagaatcattaagtttagccaaaggcctcttcaggcaaatcctgtgaatccaccttaaagtacattggcagctccctggtacagtgttattttgtgcagctttagagaaactggtcagaaattgtttccagtggtacaataaggataaaatttagttccaccagcagcaacaaccagaattctcagacctaattttatcactccagaatgctttcctttatctcaacaataataataagccaataaactagaagaaaatttagtcttttaattaaaattagagacaaagaaatccttcattgcattttgagtatgtgtgatgggggtaggggtatgggaaagagaagtactgagatatcaaaagatttttatttcatcactcatgttattcccttcacaatttgtgcgatcttcaatgcatagatagtaactgctcaataaatttagctgtatgaatgaaatgtatgtgactgatgcctaatgtggcatttagaaggctcatgaaagtaaaagaaaagaatgagaatattgattgttgtttgagcatagaagccatttaaataattatctgttgcttttagcttatttaagtttattttttaaacatttttatataaaataattttgtttattttttaaacattttttatttttaaatatttagaaaataaattttttaaaaattaaaatgtttattttaaattttttttctaaatgtttatattttttaaaaaggcaaactctagtgggaaataatttagtgccattttatccaggggaaggaaaaaaattgaaaataagaccttatgtttagaaaaactaaatgttttaaagtcaaattttaaagcttgagagaagaattgctttgtgaattatgatattagtagaacagcttaagtataggatgatgattatggtggtttcattatttttattttttttttcaaatttctgttgctttctttgttcgtataatgcagataagccctaaaagaaaggaacagctgtaaccccatgtgtgccttctcaatgttcctcaggttgtgaatgttgcaggaggcatctcctttcttgatgccgttacgtccatggatttttttccaggattaaatttggaaggctatcctaacagagacagtacgaaatatgctgagatttatggcatttcttctgctcacactttgttgcgggggacactgagatataaggtaagcagctggactttagattcaacatgttgccagttgtgatgtaagtgatgtgtacayttaatttttcttagtagtcaaaataattaagatgataaaccaagytggagtctattttttcaggaatcttatgattgattgaatattttaggagactcacctcaaaataaaaagataattaattgactcattaggagttggggacaggcagggcttcaggcttagtgagagttggagatcaagtgacttccccaggacctgacttctcgtaacgtctcagctcttctttccagtattcacaggagtttcaagtgctgtgcgatggcagagtggtggcagtgctcccagcctctcaggatcaaattcagtgggaataaaaaatgataccgttctaatagccaaaaatacgatttttgtctcattagctccctaaggtcagtgggataaaatgtgcccatctactttggcctatgttatatgtcctagaactggaratggagtcaatgtcattaaaaaaacatggactggggcgggaggaaacggacgggatgaaaggggcttccccagagcaaatccaaaatgtttttaaaccacaaaatggggagtacattctaggagcattaatgcaaatgtccactacacatttattgatcacaaaaaaagcagttacaagtgtgacctaatcaagacaactggtgtaatagttttctagcataatatcacaaattgggtagcttgaaacaataggggtttattctctcaccattcaggaggccagaagtctgaaatcaagatgtgtgtgagtagggttggtgccttttggaggcttgactttgagacacatccatccaatttgtgcatcagtttcatatcaccttcttctgtgtgtctcactgtgttgcatcctcttcttattagggcactagtcattggacttagggttcaccctaaatccaggttgatttcatattgaggtccttaattaattctatctgcaaacattcaagtgaggccatattctgaggctgtggatgcccatgaatttggcgacagggccctaaactcaacctaatgtaaccagcatacctaaaatacatgtatttctcaggatcagagacctgactgcaaatctgtctgtcttgtgagatttcctggctaaggccagagaggggatttgtctcatgtgtgttatctagtattctctaattatctttttatctggaagatgtaaggcacatggacytgtcagtgatgacccttcaatcttgtgcctgcttttctgtcgttctcttatctttttttgctggctgttccttttgcctggaacttttcctccaggtatttgtatcatcctccttcgggctttattcttttcttctctgcagccctgcccctggtaaccatggttttattctctatctctgcatcttttactttcgtaaaaaaaaattctgcatgtaagtgagatcatgcaatattttactttttgtgtctcacttattccacttagcataatgtcttccaggttcacctgcctatctgttcttaaaaagaaaacaaccactatatttcttactcttgagagcttctgttacatttatgggcacttagcatttacttctcagcattttaagttataattttatgtatatttttcttatctcccaaaagagattgtaagctcctagagagcaggtgcttgtactccatgaatatgattttttcattgcccaggaatcaaatgagacatcagtgataatgtcctaccgagatctaggagctatggctcttctaccagcctttaggcacagtagaaattctagtctgaacttatgcatactatccccagctctggcagatttcttgatctattttcttcaatttgttcaaagaatatgagtaaaaacttttttttttggccagcagttaggatatatagctttcagtatagtcttttgacaaacatatagatccaggaatgaaggattttaatagatttaaacattgaataaaggtctcaacaaggtgtgcgagtgggagccatccccatggattccttgaggatggaagatatcacagtgttcgtaatcatgagggccaccatcctgggcaatgccagcaatccattggtaaccctaaaattctttccagtattggagatgagataccatcattcaaatatgacagagaggccttgaccactctccttctctgcctgcctgtcacctgcttgtccttctagacgcaggttaatagcaccttcctgtggtatcctccctaactccttccccttgaaccacccagccccatctatgtgagttccccttcttttgtgctcccacagctatgttttcctctaacctagcacctattaatataatactgtactacaatttagtcatcagtgktgatgcatttttgcttaccatggactaggcattatttgcttgacttatctgacccttctgttgactgcagtttctgcatggatgagactgcaattttttcatctctgtggcctcagtccctagcacaagtctgacatatggcagcagtttgctaaatgcttattgatgaatgaatacataaaataaattcatttctaggggtcagcataaaaatatatttctgagattaataaatasctcagaaatcagtattttagatgttggataaagggatctctagcacctatcaggtcccagaagcgagctaaacaagctagtgatattacttttctgtttctcctctttgaagtatatttgcatttgaattagagcaaatgagaattctttttttagtaacctttgaacagtttgaacaatataacctttagaaatgggaaaattgctagttggccagacattcagtagtgaaatatctgacgttacaggaactattttatattttaaaacctctgttgctccctagaattatttccctctctctcttttcttttcttctctctctctctgcttgagcagtaattgcagataagataaatttcttatcttagccttctcaccctgcttcccatttgcacactggggaataaaccattatggtctttcttcacttcatctattattcagaatctatttatccagccatttgttctcttttagggattggaatgctgaataatggattggaatgttgaataatgttgaataccttcctatggtatcctccctaactccttccccttgaaccacccagccccatctatgtgagttccccttcttttgtgctcccacagctatgttttcctctaacctagcacctattaatataatactctactacagtttagtcgtcagtggtgacgcatttttgttcaccatggactaggcattatttgtttgacttatctgccccgaagtgggcattgggatgaagaatatgcacacaaataaaatataatataacataatataaagatacaatttccctgctttcaataccttcagtacagcagctgaatagacaattaattatgagctgcattaattgccatgataaaggtatatacaaaatgctacaagaagggagtgcccacttgtgagtgctaggggactcacaagaggtgctaaactgggtctgaagggaggagaaaacatttcataaatgaagaagtgtggccacaacattccagttacaggagcagcatgtacagaggccctggtttctggaagaacacagcacatttggggaatagtgaaagtggagatctgtgagttaggctagatgagcatgttgtgatgggttttatataatataccaaggacctcaggtttgctttgtagacaatgaaggacatatgaggaatttttatcrgagtgatgatatcatcatatcttagaaaaatctctgattcctacctctttttctgctctccatatatcttgggggtggtggctctaattagtagattggattatctgcttttgaggaggatattcttacaagttcctccttccattataagaaagagctcaactgactgttctgttaaataatactctgctgagctgacagcatataacacataagaaaatttgcccttatgctgcccgaaaattccattcacatgttacccagaaacagaagtaaagacctaagttttgcaaggtcttttatgtaaaccagtagaattgttatgacactattgatctcagtttgagcttgaaattggttgtatctatatcctcaatayttttttggtgggttgtggggaggggtttctagtaaagacaggaaaacctgctaggcaaattctagaagagctgtagtactcatatcatcaatataaacagttttctaaattagttacaaagatatatccctcttttcaaaaatattttaagttttttcattggaagagaaaaattttatatactgcttattaattcttgtttcagggatatatgaaagctttgaatggatttgtaaaattaggtcttataaacagagaagcgcttcctgcctttagacctgaggccaaccctctcacctgggtgagtgactccgaattacgttctatctgctccttttcagaaataccttctgaaatggtcgggggtgaactctgctttggatctgcaaaagatcctattttttagcttatgagcaggaagataaatcctaactccaaagccccctttcccttcactgttgtggaagaatggagagggtgtggggctgacacatatcaggcctgtttcccgcagcaacttataccatttgactgctccttgagctgtgataagagatgcctttgctctctgcattaagctctgagctattccagttgtctaggtggtgacccagtgatgggagtcacttggacttcctgaaagtgagaatccaggagagttactagtgtattacagaactggatttccaacctccaaatcttgtcagtactctcatttggttacttataaccatgagtgatttgattttcagttaccgagcttatgcgtctatctcttgttgtaccaaaaccttaaggcctcagagttggaatgaactttggaggcttggaactgaatgcgaagtagagcttctactgactgctcagaattaactcattaccagctggttgttcaacttaaactagtgtgcctgtattccagtagaaatgccagaaatgtatcacaaggagaaaaggaccaatgttgctaattccattacatctcaaaaaaaagttttggtattcttgctagctagtttctttaaaaaattatttttgaattctttatgggtacatagtaggtgtatatatttatggaggacatgatatattttgaaataggcatgcaatgtataataaccccatctgggtaaatggggtatctaccacctcaagcattcatcatttctttgtgttagccagttgcttttacattcattttttttgtgtgcatttgtgaacctttccaatcttaagttttacctttcataaacttacttgttgggtaggagtgaacaagtatctgcagagagaacctggggttgaggcagctggtttgggaaggttggtgcagacattcttagggatggtcttttttgtaaaggaccagattataaaggttttagactttatgggccacacggtctctgtcagtaccactcagttctcccatagacgatacataaaccaatgagcatgactgtgtttcaataaaacttttatttaataaaacagacaatgagccaaatttggtctgtgaaccagtttgttgactcctgatctagagcatagcttttcctttgggaacctagaaaaagtcttgttttgaaagtagaaaaaactatggctactgtttaagtattcttcctttgagattttattacctgcaaggactttctcatctcttgaacctacaaaagaacctgggttgctactggcaaccactgcagtaagccttttccactttatcctggtcaaaatggactgctggagggtagggggagaatggataaaaacatagtgatagagaggatatacaaagacagggaatgtgctggtaagaactgcaccatctgttttgtgttgagttgatcttaaaacccatttttattggtgaaatatcgtttggaatagcagctatttattgatgtgtaggtatgcagatgtgtgtatgtgtgtgtatgtgttacaatttcctatttccaattatttttaattttaaaatttgaggtgtatttgaagttcagtgttttagtaggataatttttcagtyaattaaaaaaaaatttgttagggacttagaaatattgtatttctttttctaaccagaaacaactcctctgtgacctagttgggatttcaccctcctctgagcatgatgtgttgaaggaagctgttcttaagaaactaggaggagacaatacccagttggaggctgctgaatggtaggcacccaccactcaacttagagcaaaatatactggatcaatgattgctaatttctactcaraaaaagttaaatattttacatttgtctttgattaattcgttgctctaatgtgggtagagagattaccatgtgccatgttcatgtgggcataaagagtagataaagagaggagctcaatggcaattagaatttgagaaatgcttatctcgaaacactttaccactcagttcccaagcatagtggggtatttttgctttcctgtaggagatttggagtagtcatagaatattacatgaaaacattctttcatatgaccgctgtggcatcctgctggtatacctaatgttggagaactaacctataaattaatctcataaagatctttgtaagaacatgggattacaatccatcatctctgccctgctccagggagcagtgcctgggtgagtctggagaagattctgaaggttaaaacattgctattgttattgttattttacattttaggagaatcctacaacttgagttaccaccttgtaattctgccctttcaagattaaattcaaggagctcccttttgcttcccaaatgagaacatgtataggacttgaactaatgcagccatctcctgtgcttttcaggttgggcttacttggggatgaacaagttcctcaggcagagtccattctggatgccctctccaagcatttggtcatgaagctttcctatggtaggccatgaagtattagctaaatatacctaaagaagaatcataagatagagtcagtgcagataatcgtattggagggttggccccaagcagcaggaatgggaagatgtgatatgaagaaaagggcaattggactatttttccagagggaggaatttgagaattattaggtaaaaataaacttagttattatgggaaaggaaaaaatagttttactatttatttatttagttagttagttagttattttttgagacggtgtctcacgctatcaccaggctggagtgcagtggctccatctcggctcactgtacctctgcctcccaggttcaagagattctcctgcctcagcctcccgagtagctgggactacagttgcctgccaccatgcccagctaatttttgtatttttagtagagacaaggtttcaccatgttggccaggatggtcttcatctcctgacctcgtgatccgcccaccttagcctcccaaagtgctgggattacaggcatgagccaccgcgcccgacattactttttttttttaatgcattaggcaaatgccaaagaagcatttttggagcacactaaaaggcctctatagcagcgcttttgtgtctgtaaacaggatatggtgacatgaatccggataaaggaatgagatcagagttctaatttccttgaggttttcactttgactttgggctaaaaagctgtgtaaataattgtctagtgatcatatataaaaggagggaaaacttttaagaccagaagggcaggaggagatgacagacaatatttgagttgtaatgatagtggtatttttacttatctttatttgttttaaggtcctgaagaaaaagatatgattgtgatgagagacagctttggaatcagacatccttctggacatttagaacataaaacgattgatcttgtggcttatggggacatcaatggcttttcagccatggctaaaaccgtggggttacccaccgccatggcagccaaaatgttgcttgatggtaagtctgttcatttgaggtgtaagcctgtttctgtttcacctccaagccatttggtgcctggacatcaagtaattgctcttgagcgtaacacaggcatttactaaaagtgaaccatcttagaagatccaagcgcggactgcctgggaggtccccttttgatgagtaaagcatgtgggctttggagatagacctgacttccgcttccgctcagttccaaggtggctgagtgatgggctgcaagttactcagcacctttgagcaagagtttcctcatatttaaagtgggtattgccatccctgtttcagagttgttgtgacactaactgatataatacatgaagctgctacctcatagaggggtccccagggaatggtaacttccttcctttctttctttggtttttgccatgttgggagtgataactctaaaatagaaaaagatattcactccagattctcaagaatataggttaagttttattagtcttcatatctcagcatattattagtactcaataaatattttagactaaatgaataaaaatttcattcctccactctccctagaagatcacatagacattcaataagcattgcctctgtttgrccctcaagaaagaatgaggggagtagaaaatatcaaagcatataaatgtgaaataatgaaaaaaaaatgtatagtagcatatcagctaatgtcaaattaaatgaccaacttagttattgaggaatcaatgaagaagtaagtgataaaagttggggtcattgtggcctctagtgrgagtgcccaggttctgtgtttcagtcatactaacaggtgcctgtgcccatataatcaaacctgttacaactcattctgttggtgtcttrccttttttwaaaaaaaatgacattagcaagttaagctgaccagtcagatttactttacttcttactttactttgttctctgattgtcctggcagaaattaatgcagttaagtgtacaagttctgacaatatccctaggtccggctgtgctttcaatctaaaatcaactccttttccttacaaagtgttgaataagtaataatttactaagggacgtttttaagcagctacttaaaaaatgcctaggcctccaagaattcattgactctgagtttgcttctttgtggagactcttgatggggaaattaacctctgacacaacctttgaaatggtaattacacatttattttcttccaggtgaaattggagccaaaggcctaatggggcccttttcaaaggagatctatggaccaatattggagcgaattaaagcagaaggcattatatatactacacagagtacaattaaaccataattgggaattatattttgtttttttcttcccaggcaatacacctctgaacatgtgtgtgataaatgggtttgctaatgtgctgttttaaagtataaagcataatatgttttggttaacacaawgtactttttgaactataaatctttattttaatatggaaatgtttggaacaggagatgcaagccactaacagagaactttaataattctaccctgtattttataaatacgtatgtgaaagtgatgatcatgctatttgttaatttattgtgccactttttttcttttgttttttttttgttgttgttgttttttgagatggagtctcgctctgtcacccaggctggagtgcagtggcgcgatctcggctcactgcaagctccgcctcctgggttcacgccattctcctgcctcagcctcccaagtagctgggactacaggcacccgccaccacgcccggctaaattttttgtatttttcagtagagacggggtttcaccatgttagccaggatgtccacttttttcttaaatgaacatattgtcttataaccagcaaatgaagttttacttttttartcagaaaaaatttcgtcataaagctatatttttatatttttaaaattgatacagttagataccttcagattacctaakttaagtttttgccaaaatgctattttatgccctttttgtaaagttatgatttattttgtaaatatagttccttatagttttctcttgagtgtttggacatgagaatagataagattaaattacaatttacaagatcacttcattaggcacaggaaaagtatttaacaaaattcaacaccctttcacaataaaaaataaaaaataaaaaaccctcaacaaactaggaatagaaggaaacttcctcaacctgataaagggcatctatgaagaacccatggttagcatcatacttaatggtgaaggactggattatttccccctgagatcagaaacaagacaaggatgtctgctttggccatttctattcaacttgtactggacagtcaagaaagggcaattaggcaagaaaataaaataaaagtcatctaggttggaaaggaagaagtataactaaatagagatgggagacgatatggtggttttgtgcatagtaatccaagggaaaactatagaaaatccaaaggcatgatttattaataaataaattcagcaaagttacaggatacaggattaaatatgcagaaattggttatctttcaatatagtatcaatgaataaatcaaaaatgatgttaagaaaacaatttaattttcaacaatggtcaagcttggtggcttgtgcctgtaatcccaacactttgggagtctgaggcagaaagactgctagaggccaggagaccagcctgggaaacagtgagatcccatctctacaaaaacaaacaaacaaaaaacaacaagcaaacaaaaaacagctggatgtgatgacactcatctgtcgtctcagctactcagaggctgaggtgtaaggatggcttgagccccaaagttcgaagctgcaatgagctataactgggtcactgcaatccagcctggatgacagagttagaccttgactcaaaaaaaacaaaaaagaaaagaaaaaaattgacagcatcagaaagagtaaaataccaatataattgagggtccagaaatattgatcacatttatcatcaactgacttttgaaaatagtgctaagacaattcaatgggggcaaaatagtctttttcattaaatgatgcttggaaacatggatatccacatgcaaaataatgaaattggactcctacctcatattgcatataaaaattaactcaaagttgacctaagatctaaatgtaagagctaatattataagtatcttcaaagaaaacatggcgtaaatctttctgactttgaattaggcaatgatttcttaaataaatgacactaaaaacacaagcaacaaaagaagaaaataggtaaattaaaattaaaaccatttgtgtttccaaggacaatatcaagaaagcaaaaatacaacccacagaatgagataattttttttaaaatcatgtattagttaagggaggaatttgtatttagaatatgtaaagaactgttacaataataattaaaaggcatataattcaatttttaaaaatcaacaagagatctgaattaacagttctccaaagaagatacacaaaaggccaataagcacatgaaaaggttctcaacatcactagccatcagggaaatgcaaatgagatctacaatgagatatcacttaacactcactggaatagatatataatcaaagtgataatatcaagtgttggtgaggatgcagagaaattggaaccctcatgcactgttggtggatacccacgtgatataaaaacaaatgtctacacaaaaacttgtgcrcagatgttctttgcagcattatttataatagcccaaaattgaaacagccctaatttctatcaactaacaagtgaataaacaaaacgtggcatatccatacaaggaatattattcagcaataaaaaaagagatgaagtactgatatgcaccacaacatggaaaaaccttgaaaacatatcaagtgaagaatgccagacatgaaaggccacatattatatgatttcatttatatgaaatgtccagaacaggcgaatatatatagagagaaggcagattagtggttgcttaggctgaagggttggggaggacaaaggggtgactgctaattagtatggggtttcttttttggggtgatgtaaacgttgtaaagttgattgtggtaatggtggcacaactctgaatatactaaaaaccactgaattgtatactttgaatgtttgaactgtgtggtatgtagattttatctcaagttgttataaaaaattaaattacaaatgcaatttgtttgtttgcttcttggggaaaaatctcttgcctttagagatacaaagtaagcacctttttaaccttcacaaattgtgctcatatcctggcacgtgaaactaattctgcccttgaaagaagcaggtactacatgtgaggtatatgacagttgagaaaacatctcctgctatttgaaaacaatcaaaattgattaaggcctggtcccacctgtcacagataatatatggagatcaataatctattaataagtaaaaacattttgttgtggaatttttcttaccatgacattcagttcgacccaattgattaggaaatacaactcgtgtcatattgatttcactatctaaaacggcgcccagattaattgggaactgagaaactagcactttgtgtcagaactgggatccagttgagctctcagtgtagttaactagtttgtgctttatgatgacaatgagaattaaaggggatttgatttgaagagctgatttaatgttagtgttaaacgtggtaatagaaaaggcaatgtcagtaagcttgaatacagctatatgtaattaaacactacattatccctcaataacaaattttcctgcagtacctttaataataaaggtggtggtgcacatgttctcactcataggtaggaaatgaacaatgagaacacttggacccaggaagaggaacatcacacaccggggcctgtcgtggggtaggggaaggggagagggatagcattaggagatatacctaatgtaaatgacgagttaatgggtgcagcgcaccaacatggcacatgtatacatatgtaacaaacctacacgttgtgcacatgtaccctagaacttaaagtataaaataataataaatgtggtggtgataggatttgggaatgaatgagcaggttatggttataggcatatcaacatatagcttcaccaggagtccacaattatttttctgtgaaagtcagacataaacattttaggctttgctgaccaaagatatcacaactgtttatttctgcctatatattatgaaagcagccataaacagtacataaatgaatgggcatggctgtgtttcaataaaaccttatttgcaagagcaagtgataggcagacgtgaccctcgagccagtttgtgggcccttggtctaaccattctggtagacttaatgctcacatgtttcagatctttctgcctcttttgttcttttttagataataccaatatttgtattatccatttttccttgttctaggttaaagagacactagatcatactacacaatgtgaatggctctacaacatactagctgttctcttctttatgaaatgaggataacggtaactcccgggatgattataaaaattaatgagataatgagagagaaatgcttgccacttagtagatgttaaaaaacacaagtgggttgttcttctctcttttacaatacagtttttgcctgaagtttatgtttagttaatacgatcttaactttgatatattttttcaatttcttggatacctttggaagactcctcaaagatccatgccgcttaaacaagccatagatttatctgctacataaagtggttgaagagatgaaaaagaccacaacaatcatttggccaagcctctgacttcagagaagagaaaatgtgcctcataaagttaaatgacttgcctcaggtgataagacttaatgttgaaatttgatcatcatttggagacactcaaaatacttgaaacaatttgggagcaccctgatttttaaaacatcttctaggatggatgacttagggcccaccactagtccatatggtgtctttttgaaaattagaacaaggcattccttctcaagacacttctactggtcaaaaaattgttcctaaatatacaatgtattagagtaaaacactttgctaccctctaatggaaaattgctattgtgaatacagaaatctttaacgtctatgatatgattagttctcctttagatgcaatgcgtaatttacacatctgtgcaaggtaatcttatctttatgttttgtatagtgttagtggcttacatttgctgattgtttgcagtggaactacatctaccagatctgaactccagtggaaggaatccagtgagaaaagctggctgttctggagtgatacttgttagttactgacaattaatctaataacttcctttttccaatcttgttttagtcctaatacccattcttaattttcattaattagcaagaattacaaaacacagtcctaactttttagatcaagaggttacatcctcccggtttaagttgtcagtgtagtaaaatcgaaggtttctagtaccttctagtttcatgttaattgacagtgtgtgctacatcaccagctaacaaattcataaaccctgggaatcccactcccagcctgagagctcatgaagctgaattgatattgcgctcctctttgttacattggagatgattctgggctgttgccaggcacaactaaccagacccttggctccaataatctgagcctgattcacagtgaacctggcacagggtaaaacaaacccccatagaaacctcataaccttgacaaagaaaaaaatcatgcttgccttaatagcaaactattgataaaagatttattctccttgagagaaataattaaaaggaggtagaagtcaaatgggagctgggaaagtaactgaaataggtgctgtaaaacctggggaagaccaacagaaaagatgagagaatagcaactcccaggggcatggattgttcatactttgcaatgttagaaaatgtttggctgccacggtggttctgtttagttctggactatgaatctggtgaaaattgtgcaaatggttcatcatgtaagatgcttaataaagatggtgatgctttgcatcctcttatttatctgtccatatggtaattattgatgtttttcggatttcttctctggctttttttttttctctctctctctgtgttcttcctgggtgcatgtatcctacccatggcatcgaatgccacctacgtcttaaatcaatcccaattttctcacctgagcttcagattatctgtactactatctacttgacatccctgttcagatatttccaagacttcttaaactcaatgtaaatttaaaaatttatactataaattagtgtttctcaatggggccaagctaggactgctaaatggatccttcatgtgattactcatttcaggaactggcaaccactatcaccctagttgctctctatataatccttgatgctctcttttctctcacttccacattcaccaaatcaggactttctcttctctattaaacgtattggctccaagtctttctacccacatacaacttgtcttggtcaggctgctattatattttatatggatcattgtgacagtctttcacctggcctccctctctccagaattactcccctaatgaccattcttctcacagtagacacattaatctttcaaaactgcaaatatggtcatgttcttactctcagctgtctccccattcctcccaggataaaattcagacgtattatagcctccagggctcagcataaatgtccccctgtatatctttatagtctcatctcatcattgcccacctccttacaaaatattatccaattcctgaacttccttcacctccttgaatagacttgccctttcttgtttttgagccttttctggttgtgttttttttacccattcatctcctcctaaccttttacctggttaactcctagtcctctttttaggttgtagcttagaagttactttcttgaggattcacaagtgtaaggtatttctaaaggaccctatactatttttttcataacacgaattactctgtgatttcattgactgtaggcttttgaaaatatgtggaagatttttcgttgttacagacttggggcagggtgttgctgacatctggtaggtgaaggtgaaaaacaataaatccccactgaaagaagccactcagagcaatcagtttccttaatttattaaggcatcatataactgtaaagccatttcagatacctttgcattttaatttgctttgatgataatgattatgttaatattatcatccctttcaaatcatgggtgggtctatttgtgcatcaataaaagcagtctttgatttccctttccaaggtcaatagataaata

SEQ ID NO: 95609 - DNA, 201037 bp, Homo sapiens
  misc_feature (1)...(201037): n = A,T,C or G
gtacggccacttaaaaaatggcagtttcttataatactaaacagattcttataatatgatccagcaatcaagctccttcgtatttccccaatgagctgaaaatttatgctcacacaaaaacctgaatacagatgtttataacagttttatttatcacagccaaaattagaagcaaccaacatgtccttcagtaggtgaatagacaaataaactgtactacatctagacaatggaatattattcagcattgaaaagaaatgaactatcaagccataaaaagacatggaggaaccataacttcttattaagaaagaagctgattttagccgggcgtggtggctcacgcctgtaatctcagcactttgggaggccgaggcgggcagatcacgaagtcaggagatcggaccatcctggctaaggcggtgaaaccccgtctctactaaaaatacaaaaaattagctgggcgtggtggcaggcgtctgtagtcccagctactcgggaggctgaggcaggagaatggtgtgaagccgggaggcggagcttgcagtgagccgcgactgcgccactgcgctccagcctgggcgacagagcgagactccgtctcaaaaaaaaaaaaaaaaaaaaaaaaaaaaaaaaaaagctgattttgaagggctgtatattgtatgattctgactatataacattccagaaaaggcaaaactatgaagatggtaagaagatcagtagttgtcaggtaggagggcaggatgaataggcaaagcacagaggatttttaggacactattctgtgataatatagtggtggatacatgtcatgttacttttgttaaaactcatagaatgcacaacaccaaggttgaatcctaatgtgaactatacatttggggtaacaatgatgtgtccacgtagcttcatccgtggtaacaaatgtaccactttgatgtgggatattgatgattgaggggaggccatgcatgttatgcatgtcttggggcaggaggtacaggaatagtctgtactttccattcaattttgctgtgaaccaaaaactgctctaaaaaataagtctattgaaaagaatcaaaatatttaaaaatgagtcaatcaattaaacagtttagttcaatatagagcctcaaaaaaaccttaatatccttaattttaagaaatacacaaatgagcttatccatacaacaaatgaaaattttcaattcaagataggattttaacaaatcctgtgtttgggagggcttctacaggctgaatatttgtccttcctccaaaattcatatgttgaaacctaatccccattgcagtggtatttggaggtgggccctttgggagataattaggtcatgagggtggagccctcgtgaataggattaatgtctcatacaaggggctccagagaactgccttgccgcttgaacacatgagattcttgcaagaagatggccatccatgatccaggaatttggccctcatcagacaccaaatctaacaatttcttgatcttgtacttctcagcctccagaacagtgagaaatagattcctaattataagccactcagactagtattttgttttagctgcctgagtgaacttagaataaacccaagatctttgccatgatgacatgttttctttttaagggagaaaaaactgaaatctaagtaatattcatccagaagtaattttcaaagtttatgattatcttttataaccactgtttcattgaaaatatacaaaatacagaataatattattctactgatacgatgagaaagaattatcttgaatcttgtactgtatcaaatattcctgaaatggaaaaaatgattcctacctttttgtgttttttaatataatgttctcactgaattcttgaatataacaggtttaaattactttacagtcaatcctgacaagatactaaaaggctaagaatgtaacatgctgtggttttcctatcaaacataattatgcctccttcagatggactcagggtgccacatcactcttagctctggagctatcagtgaggaccctcctacttgttttatgcctgatactggaaaaatgcaataacaggccatctgggccactaggaacaaagatgcaaagctcaggcaggtaggaatgaactgctttttaagcagaaagttctagtaggacaaatccaaataaaagatttgtctatgctacaggaagtaaaattagtctttaatgttttcagaaatttcacattacaagaatactaagtagatgtcattgtgtcaatcagatgtgaacaaaatttttaaggtgtaaaacacaagataaatctagcctcatagtctaaaatacattgttccatgtaaaatgagatctatttctgacaaacaccttataattaccaaagctgtattttacttcaaaagaaataactatgactttctcagtttgtaaacatttgattcaattcagtgacttctgttcgtatttaacatctgttcaaatagatttttcaatgacaatggataaaaatgagcaaaaatgtatgtgagcctaacataaacaatttattgttataagaaaaacagatatttcacttcccatttaatttcatagtttattcagtgactatacaatattctatagtcactgtgttataacatggaagtgttgtaagaagcacttccaccaaatttaagtcaaacagattctgcaaagttaacatctccttttccccatttccatctacctatatttatgttagggacactttggaaataatttgtagagtaaggaaacttatggaaaactatggacattttataatcacaagtgaccaaccctgatattagaaaattctcagacacaacaaaatagattgccagattttgctaataaaaatacagagcaactagttaaacttgggtttcagataaacattaatttttttaaatataagaatgtcccaaatattgcatgagagtatataaaaattatttattgtgtgtctgaaattcaaatttcactgggcatcctctcttttatcaggcaatactatgcagagacattttagtagtgatgcttttctctcctattagaatgtgagtccctttatggcagagatgaaataattcgttatgcatcagtgtgtgatacataatgaacacacacaacagaattgtattaaatgaaaaactgaatgtaaagaacaaattttaaagaccctcaaatttgttctcttttagaaaactcttgagttttgaaatttttgtcaaatcttccattatgcaaccgctatctacctccagaaatattccttttccttgtaggttcaactaatataatctcttctcatctctttgtttaaactgttcatatgaaacagtatattatatttattgagagtgataagactcccagagctttggcttatacatgagtttggatttacaaaatgctccaggatggtatgtaggtgaggataaaatgtacctagtttaccaagctaatgttttagatataggttctgtttgtctctgtctctgcctctttctgttctgtctctgtttttctacatatattctctctgaatacatgtatacataaatttatatatatatgtatactctgaatgaaggtgtgtggttttgcaagttcataactttaactcacaatggctaatgcacattaatcaggtaccatgtctcagaaatgactatgaccccagtaacactgtgaactgtgagatacagtacatttttgatgtttctgctctgctgatgccttctcttctcccatgccttggctgttacagtgacctatattccaaggacctcaacctcctactccatcatccctcccagagatcatcagaaccacattcactggtcctccagtcagtttcccacagctgtcattcagtctcacagaattggcctctatcctgaatcccatacaaacctcaatagcaacatgactactccctccaggtggcttttgtgccttcccagggaatgacagtaatattaactatgagaacaaaattagcagaaatcacatattccccttccctttttactagggaaatttatttcaacagtgttgttgtttggtgatctaattcaaaagattgacaagtgatgtgatttttttgtccagtaagagaaaactcagggttatggtggttgttggattattcttgcaggctactggggtatccttgataattggaacctactggaacaccataattcccctaagcaaaccaagcttcccctaaatagcagaagttcttaggagtttcttttgtggtccctcctgtgttgtatttcacatataagctgctccactgggaaatcaatgtttgtcacagtctgaccccactcaatctgctcaaatgtaattcacactgtttttttaatggcatatgacatctgcttctttccttcctgtcctcactgcctttgacatggtttttttccctgctagtccttcttgtttaactacacatctctaggaaagctttcctgcctactccagtcaatattaaataaaactttctctgaactctcagtgcacagtcagtttatacacctgcatacttcttgtaatgctagcaaaaaaaaatggcccccaaattttcttcctatatggaaactcacatgagcagccatcaatccccatcataattcttgtaaaagttgtagcatttctatttctgttcatggaaagaataagatcaaggatcaacttcttaatattgatatgtgtttctgaataaacactaaatggtttcaaaatctgttattacatgactataatctattcctgaagcaacagcaaactgccattagcttgcacatttagccaaatgttcacaggctgggatattagcaagaactcgtagtaacacttgaaatacattcagaacccaattttatgtgcaggaagttttctttaaaatttttaaagctagaatactatttttgagacaagaacaggacacaagagtatacactgtacagatacctacwtcaaattgttactaagaatacatgggataattccacaacttggctttctgtgccttagatgggactcctaaaaggctctaaagtgggtctcatatacgaaaaacatgtactaatagttaaaggatatcatataaatgaaaatctcataaattttcagtgtagagactaccaccaattaccttctcattatttccttttggcttcaaattaattcaacaaatattcagggaacacctattgattttttttaaggccattttgctaggatctggggttatagtaataaaggtaaactccctgccatcaaggcgctcacagtctaattctgaacaccaccaaagaaaagagcacatgagggtgacatttccagctctaaggcagcagaaggtatgcattatacattttttgcatacccttcaatcaagcaataaaaaatcttcccgttcgaccctgtgggaggaggcacttgtgtggttcggtctggcaggaccaccgccgtgttgaaagtccccccagacagctgtgcccagcacggcagtttcgttggggtctagggaaagggcagggtcagactggtcacaatcagggctggagattttttggagtcaactctcccaaaggcaatggggtctactgctttattaggaaaatggaaagaaaaaagggagggaaacaatgtacccaggcgcccccaccgcattctgattggacccacttaagcatctgcagaaaacaataaaatgaaaaaaactcttagaggtgaaactcaaaggtcaacctctggctgtgcgggacaatgggtgtccggccttcccttcccttcccttccgaagtgatgaaggagttccaatgttctgcgaacactggaaaccccagcggatccctctaactccagggcagcgaaaccactggcagcggacagagggaggattgtcggtgtgtgaattgctaccctgggatccggacccagagcggcagccgcgcccctccgccccccgcgcgaccccgggtccgaggcacgctcccagcggagcggtcctgcgcccccgccccctccaggmgccgcggcgcgcacagccgggctggagcgcgcacccggcactgaggcttcgctgctctcggagcgctcagaccgcggccgccgcagccggcgaaagaggcaaagtcccgcacgccggaggacatgcgcctcggctagcggccccgggccccaccaccgtgcggctttctcsagattattcctctctcgctgtctctgactgtctctctctgtctctgtctctstctctctctctctcwcacacacacacacacacacaaacacacatacgcacgcacgatctcacttcgatctatacactggaggattaaaacaaacaaacaaaaaaaacatttcyttcgctccccctccctctccactctgagaagcagaggagccgcacggcgaggggccgcagaccgtctggaaatgcgaakcctaaagcktttcctcgcttgcattcagctcctctgtgtttgccgcctgggtgagtgagaagagctcggtggggtttcagctccgggatcggtgggatgagggtgggagcatttcagcgtgtccgcgacttgccgccgccgccgccatctagccaggaggaaaaagggacagccaactgggctcccacggagcgggcggccgcgcggtgcaggcagctgcgtgggatttgcgcgccccctccccgccccgcgccctcgccccttccatcggcccgcgggcattcgtgccccgggccccaggagacggagctactggagacggagggctactcggatccctgccgccaccgttcttctctcctcttttgcaaagtgtagaaatcgccttttagatatacataggaagataaatgaccagaaatacagctgtggtgcggggctgtgtactgtactgtcttttttgctgttcatttttatgctataggtatgatgggcttaaatggaaagtacacgtgtctggtgtgaattgcagmcacacacacacacacacacacacacctgaaaggtagtaacaggcacaagcaccaacctgacttttcagggttttttttattactttcaatttagtcatattcaagtctgcgcaattacttacaaaaaaaaaagttccatctaaatctctaggtttggtcagtgctgccaaagtcagaggagagctgcaggttgatatacttattcacagatttcatttttcatctgcaccctccaggttacatttaaaactgaaattgcattcagcaatagccagtttaagcattccctttacctgcgatgcagactcaagttttccagtcattttcgagaagtgcaagattggacttttgcgttttattaaagaaatgctttttttccttcatgattttccatcgcgatagaatataatgggtttacgcattaacctgaaagttacaaagtgttgtacttcgctttgtgagtacacatatttaattcttttcagaggctcccaatttttcaattttagatggttcatagtagagtagatattaagcgtacattttcatccaatagatggtgctgctyttggcacagtaacctttacaaacagaaactatttttaagttctaataaatgaaaattacattgcaaatacggtgataattgcccatagacccccacacacggacataatttaaatttcaaaggctttatgaaagtgcttggggtggtgtgatgcatagttgacacataagacatgcaagggaatctctggtctccattgattctaaaaccttatrgtcagttctggagaggggaagacagctttaaaaagtacgtggtcatcaaacatctgttgaattcacatttctattgtagatctattttaacaaagaaggcaggtcctcttagtaattaaattatgtaagtaaatatcacagtagcaaggaaataaaccagagagtattgctttgtatgtcttcaaaaccacatgcccagagcatgttgcggatctctttgaaaaaaaaaaaaagataaaattcacacattatacaattcatctttttaaaatggtccagtggtttttaatatattcgtgaagttgtgcagccatcaccactaattccagaatgttttaatgaccccaaaaagaaaccccatgttccttagcagccattccccattctccatgaccccagctcctagcaaccactaatctactttctgtctctataaatttgcctatcctggacatttcatataaatagaatcatgcaacttgtggccttttctgtctgtctttgttcacttggcataatgttttcagtttcatccatgttatagtatgtataagtacttcattcctttttgtggctgagtaatattccattatgccaatatactaaatatatcacatttgcaaaggtttttctctgtaaagcattatttgtagcctatttttggttgtatagttttcagtttgttggacattttctttaagtctttggtgatgtaaaatttaagtgtaaagaatttaattaacttttaaagactatcacaagcttatgtaatgctactgaatgtaagcttgcattggaactccaagtgagttttgttgagactggaaggtgactactttwgtattcctcaccattttaacaaagttggccttttacacagttgccaacaggctgacctggaggcattggcaacatcaagtaacataaatatcttgatcttggggcagcatgttttgaaaaagtgaggcacattatcttcaaatgaaaaagttaggctccatttcaattatttttcactcagcacctacttcagtgtttgtggatgcgtttacccctcatcttcagtgttcttagagccaatgaggtagcctgacatatgtattaagtgctcagtaagggtctgtcaactgactaaaacttgctgyacaggagaagagctcaatacaatttgaacattaggctgtcattcttaccattatccaggaacaagttgtagagttcactaagatattgattattggcaattaagaatgtcttagtgatcagatcagatcattttgtatctaaaatgtcctgatgttttgaactggacataatagaccaactgcttctttcaaataactttccagacaaaaaatttatcagaatacatgaaccaaaacaaatttttcttgacccactgaacaggtgtatcttatgggaaaaactacagtggctttcctgtaaggaggcttaactatgagtcatagaggagaggtagatattttaagagcttttaaggaataatttcttccaattaatgaaggaattcaggatctttgaattaagtgaattatagtgctgcaaggtacactaagttcaaatgtttaagtattattattaaatatgtaatgaatcagattctgwacttctcagtcacatcttactgctttaagagccacattaacaataaattatacccaactcctctggaagaattaacttcttaatttatgctggttatagagtctgtgaaattcaatatgttgtgactctcagtttgatctatttatcctctgaaaacaaattgtaaccacatataaaaaatattcatgcctttttcccaaatartaactagcctctattcagaaaattaattccttttcattgcagagttgcaattttctttatttcatttctctctcctttttacgtatactgtggttgcttccagtcagggaagtttgccaggagaaatcatttcattgatgaattcatttctactctcatgtctgcactagagattcaagatcttgcttaaaattttatgttgtgggaattttgcttctggcaaaaattcaggtttttctggaagcataagctgcgttttctcattccctttaactccgaaaagatttgagtactgtctaaagtgagagatttgcttgaccacccatttgctgaccgttcagactgttgcatggaaatggaaccccctcagtcaggaccagaagatctcaaaggaaggcataattaagaagatgagcctgtgtttcattttcagttaccatctgctcaagtgtctactaggtgcagtttcagcactgagcattttatgtacattttctcatttcattctcctcaaaaccctttgatattggtgttttcatcttayaccttttacaaatgagggaacccggcacagagaactcagataagttgcctaacatcacaaatcctgattcagcctgtgtattccttcccaatccagagcctgaggcttttcctcttttcattcccaggatcaatttgctgtttggcattcactagcttgctttcatgtgatgtgatggtacatttcacagtcccatttgcttttctgaggatccctttcatgattttgcccatgtactcttgtattacttttttatccttttttgaaaattaaggcataatttacatttttaccatcttgaaagttttcaccgatgcatatggtcatgtagcaatcactgtgatccagatacagaatcgttccagccatgctactttaactactcattcactagatgttcactaagtgcccgacatctgcaaggcaccatgctaggcgctgataattcagctatgcatcaacatacagagacttaaactcatgatgctcacaacccagttaatctgattcaatcccacaatgaaaactttctttaaatcttgttttaaagatactttttctgttcacaactagtcgaaaataagtcttttccaaatatctcttaatgtgttgaatatgttaactctcaaatactttaaaatgcttcctgctccattaagaattccaatggtaaaagtcagagccaatttaaacaagagagagatatgtgtgtatatacatatataaatgtatatatatgcatatacataaaagtgtatatatatatatgtgtttgtgtatatatatataaaatatatacatttaaattgtatttcaacttttagtgtcttattgagattaattcctagaagtaacttcagrttacaaaaggaaaccaatttttctctgtgtttaaagaaattaaagaaattaaagaaagaaaaaatatcatatagcacaatcttaaaacacttgtattttagaaatgtcctgtttaataccatagccactaggcagatgtagctatgtaatttaaaatttattaaaataaaacaattcagttccctaatcacaccatccacatttcaagtgctcagtaatctgtgtggctagtggcaatcacatgggacagtgcagacatggaacatctccatctggcagtgttgttttggaacaacaacaaaaaacgctggtaaaataatgattgatagaactcatgaggagtcatcaactcaactagaaaaatttctaaagtcattgaaattgtttgaagtgttcgtgcatgtgagttagttatggtttgtgttgtgttagcctgcaaacatcctagaaacatgatggggcctttggtagagcagtaataggtgaaaagagttcagtggccactttgtagcctttatggactgaggttgaacagaagagattaactgctggttcgggagtgagtgctctgctcccatagtacattttccataatttgttctgttatccactgtattgtttttcaatttatctgtctccttgactcgaccacattatttgagggtaaagaatccattcttacattcatcattcattcattgttaaattcattcattgaagaattcaatgaaaaattcagtcaacattgcattcttgaacttagcacttacagtaggtgccaataaatctttaatgtataaggttatagaaagattgtaccatgaagcttcttagaaaaaaaaatagttgtttgttgttgagactggccaattttcactggtctttccctcttttgattatgatctcagtccgggagtaaggtcagcattcaccttgacctgtccatctttaatgtcayttctggtacgcgaacttcactttcactgattctcccagaaatacacgtaagcatataggcatcctctatgaggttggagctgtcatgaatgtgattaatgcctgtacaagcattacatagatccagacactatctgtgcatggaaaataaagttcctgtgattgatactgagtgtgtacttacagaagcagtcttgagtgagcttttaattctagaggagttggcaccaatgagttttggatacatcccagggggccagaacatcaagtcagctagtgtgccactttgtatgtgtacaagtgcatgcgcctgtgctgctctggtgttggggaggagagggcaatgagggatgcaggatggtcagtaatgagtaaataaagtatcttgagcccatgaacactgtattttcagtcagccaaaagctatcatattggtttaagtcttctctagtcaagaaggccgtaagagatagtgacacaaaacagttttgaaaaccaggcaaatgatgggaagtgcagttttatcatgtggatgtacgtgcttttggagtttgtcaatagttttatcattaatcctagagaggatgtgctacacaagtttaactctgcacatagcaaatatttgaactgagttgaattcaaatggaatgggayatgggatcagttaaaaatcttcataggagtcaaaagcagaaaaaaaggagatgatcttttgttaggatatttgctttattttcttctcaactaccttcctcccttccttttttctttccctccttccttctatttttccttccttcccctttcctcccttcttccctcccttcctccttttatccttcattcctttaatccttccttcttttctttttctttttttgttgctatttcctcttcagcttcactttcttttagcatgagtttaagataattaaataaacttaagtttgctcagcaccttgatgaaaagtttgatagggaagagattaatgctatttgaaaccattagttaaaaatatttttactgtgttaatatcatttgggggtctttgtagttaacaaaatttttaaagtatgagttggcagatgtttttgcctaaatattccagtgtggtaaaatgggctgattgtctttgttttccccttctgatatttgcccacagatattaaagtaaactcagttattttgggtactggttaatgtgaagtttttggccttattcaataagtacaagtcaatttatgtgcatgctaacaggggatagttttttttacaagtttccttggaaatgtagtacttgggtacttggaaataatttattcattagtaagaaagaaggattttctgttagaatatccataactatgatgagaatacagatattttcctgctcttggagaaacattctaccctctctctctgccttcccctttagcacttactggataaattttctactttttcactgttactgactgaactgcctatttcttgaatcctaaagctctaatgtatttacctaaggatgggtctcactatgagctcttttctctgaactgattaactcagtaccttgagtaggaataaaataaaacattgatttttaaaatgactcctttaagcagagatcatggtaataaacagagtcttgattacatgcttagaacatgctggccagatataaggaagtttttagattttctaatggtttttattcatattgtcatcagattgaaaattatttctattattaaatttttacccacttgcattctgacacattttcttgaataggatatgtcaaggtggtattgtctcagctgctacacagagttgtgcaaaatcatgatctgcccaaaggagcataaggatacccttgaggagcatgtgggatattattgtcatgtgtgttttagtgcacaaaaacgctgacaaccatttatctaggttgataattctcaatcctggctgcattttgaacttacttggtgttatggactgaatgtttgtgtcctctccaaaattcatgttgaagccctaacctgccattgtgatcgtatttggggacagggcctttgcagggtaattaggtcatgagggtgaagctgtcattgatgggtttagtgtctgtataagaagagaaaaagaccagaatcctctctctattcaccatgtaaagacacagcaagaaggcagccatctgcaatccagaaagagagccctcgccaggaatcaaatctgctggccttttgatcttaaacttcccagcctccatatctgtgagaaataaatgtctgttatgttagccacccagtaaatggtattttgttatagtagcccaagctgactatgcacctgggagacttttaaatcatactgatgcctgggcatcaaatcaagtacttcataatgtatgggtgctgagcccagacatggacattttcttaaaactctccaggtgattatagagcacagcctgggactgaaaccacagatctaggccaacttcatgacactactaatcttagttcatttttcttaaggtggagatatttgcaggtcttatgctgtcctaaaacaaagctagtgccacaagacaaaggtcctggaaattttcccttctctctctcttcttaaggcagtttcagcttcagagtaaccctagaaggaggagtatgctctatggtgattgacctcatagtcttttaaagccagggaaactttaggaggccaggcagtcttggagtgggtccaaagattcaagtctatcagctggtaggagggtaaatgaaccagcttccgagatggggactccaagtgacatttatccagacacaagcacataatatcgttcatttcatcaatgatacatattcttgttctctgttatttattttctttctccatgcataatttgttagaacttggctttttgtttactgttatgaaataaatattaagatttagctattgctttttcattttagcaatttgtgtgttttatgaaattattaatcaggtataggctatttctttttactgtatttgaaaagcaccaataactccatttaaaaattaacaatgaacttttctaggtgtttcaaataactcctttaatatacttattagtgatgatgcaagtacaaattaatttaatgaatcatttttgagcatcttccttgggataaatattcctccagagagactattcttctcatggccagctgaacttttacaagatagaaagatgcatacgtaagtaggtctcatacatgatggagtttctggcatatgagactgtgagctgtgtggagatatatttagtcttaaattcacctcttagaaggtttctagtaggagatgggattggatatagaccattcaggataaatggatagagcttcaggggtcaccatgggagcagaaggcatcagagggattaaggttggcatgcagagaaacatggactgaaagtgagaacgtggtaattggagggaggggacagtggggagaggagtataacagtaaaaggtctcaaatggtaggtaggatttacaatggccaattgaagagttttgtgtttgaaatctactcattgtacaatgggaaattactaaagggttttgagcagtgaaatgactggaatagatctctttatttcaggaagataactcaggtatcagagcataggatggattgaagccgagggagacagggaatcaggaagcttggttaaaagcctcttacacggtggcagtcacagtggaaatttatagatcatttgggatataataatatcatcctctttatagaattctttaatgtttaacaagcactttcagatacattatctcacttgatatgaatgtaattggtataattggtaggacattgtgccattctctggagtgagtcactggtgatccttaagggagtgtcttctctgggaaggtgaagatgtagcatggaacacagggaatcagagaaatatccaggaaggaaaagagaaggtagcaaatacatacaagtccacagaagttgataacttggagggaagaaagaagagagagaaacagaggatgatcgcttgaaacctgattatttattgaatggtgaaactcttaaatttgttaagacaaggcagtaattgactctagacattttctctgaacagattaactcagtgccttgagtagaaataagaggaaatagtgctgctaaaaatgattattttttttagagattagagtcacaacttaactaaaacaagcaaacttttttaaaggaggattttagtatatttatagtttcaggttaatcttatcaaatgccaatatgaaaactacttacttcattcacctttcaaagccttgtatttgtcatttttacagtgaacacatgtactattgggacatttcagccagcattctgccagtacacaggctttcttaaccacaagttcagattacttgaaggccatcatatttatgtccataaactagcatctttgtaaattgcttacaacttgtattttatataaaaatagtgtaatggaaaataatgcatagattaggcttctcagaatttgtttaaaaattgactttggcagttttcgttgttgctgtttttgagacggagtttcactcttgttgcccaggctggagtgcaatggtgcgatcttggctcactgcaacctccacctcctgggttcaagtgagtctcctgcctcagcctcccaagtatctgggattacaggcatgtgccaccatgcccagctaattttgtatttttagtagagatggggtttctccatattggtcagggtggcctctaactcccaacctcaggtggtccaccctcctcggcctcccaaagtgctgggattacaggtgtgagccactgtgcctggctagctttttctttaattcatgaaaaatacataggattgtttactctatgtctcttaagatacattaagatacatgaattggtaaattaatcaattactaagtttaggaaagagagaaggcagcagctgtcaagactgaaatgtaagcatattttttccttatgtaatgaaaaaatatagacagttgtgctatatatgagttgaatgccaaacttttgtctattttaaaagtatgactgaatcgattttcaatagaagtatttggttactgtaaagtttcctttgatggctttcaggtggggaaatgacatgtaatggtttatatatataaatacatttatataagtatgttatatggaaacatatatgtatatgtgcatatatgcatctatatacacacctaaataaggacacatataaatgcatatatgtaagtgcatatatatacacaaatgcacgtgtatatttcatatatatgcattttttttcctgctgctaaaaactgatactgctttattttgaatgttaaaagattacatcctttggaaacatcattatgtttaattgtagcmtatattctgggtattttgagcctgacattttcctgcctccaacataaaggrcagaaagaatgccgcttcttcctgtgacctgaatacactgtcagccctctccaaagggtttgggcccagttagagcagtgaaactcagttcagcacatgtttgttgaacatttactgtgtgctccacactctccttggtcttttttaataaattctttttgtctttgaagagttaatctggttacagatatgaattgtaccctggtgggagcataccagaaaagagaataataatgtaaatgctagactatttggatgagattttaagtctgtggaaattcagaacaaggaaacacaaagacatgaattcatttttttaaaaaagtctctgagcatgtgagcagcacttcttccttttgaacatggatggaccatttgcagttgcattcagtattacgagcctcctttgtgtccctccccgtcatttttactacattcaagaaacataacaataaataacaataagcctgtattactcactttaggttatttggttaaggagaagcttgaatatggaagtttgttggtttttgtctccaaaatgcatttagggttccccagcattccactttatcacattcaaaataattgggtaagtaggaaaagatataagcaaaatgtgtatgttaaaacactcttcttatatgttctgttcaacaccaaccactagaaaaatgtcacataatttccacagttaagtctatcccaacttgagccttaatttttggtggtagcagctgctattttgcgacaaaggtaaactcttggtgccaaaatttccaagaatgtttaggatgcatatgatttttggccactctggagaattttgaacgtagatggcaatgctgtctgaaaaatggatccctgtgaaagaagcataaagygtgaaatcacrtttaattagccaagagtggctagtgtatgttgccattaaatcctttaaattacagcacatctgggcaccgtccatcccacaagaatgtatccaatgatgcctctgtcttacctgtgagtccagcttattttctcctaacttctcattactttttaactattcagtattcttggcataagaaatcaagaaaacacaagatgcttccatgtttctcaataaattattcaaaatgttataccaacccttccccacccccaaaatggcaaaatgcccataagaaagtatttcaattccctatttggaaggagcttttcaagacatcctcttttacttcacattttaaaattagaattctatagcatctgtcaatttggagagggaagaaaacacttataatttttacaaacatcacaagagtctaagttgtattagacttgatggcattcaggcaagcaaagatcaaatattcagccaaatagtctctctgctaatgataatgacatataaacccttttatggtgacatgggttgggtcttctactggcagaggaagtgtatctttatgcgatgagttctcactcttaaatacaaggggagtgctggtttttaaaacatgaggctttgagactgtagtacacagtttgctggagatgtgtttgggtgattgcgctactggggaaaatgcactgaaaataggtcatcaagaaaagattgatatagacttttttgtgtggaagtaattatgcttgattattgcagtctgttacaattcaatatgccagactatgaagtttcagtgagaaaatattaatatgtgcacatataatcctacctgggatctgtagactggagtttaaattcctactgattaatcctcacaggktctttatctggtattcagtaataaagaatggaaagttttttatatatcatatatgttcttgttcattcacttaaaaatcccaaacacatacgttagttcatcaaaaacacagctgaaacattccactctattaaatgtaacacacacacacacacacacacacacacacagccgtaaaaataacaacaaacccatctactatcagagtaggaaatcttcaccagcctactttcttgccaagatatatactgttcaataaacactttataattattacttatttgacataaattattgcctaaggccaatgttaagagactttttgcaagtttatagcaatgactgttgaaatgatttaaggaatcggattcttaggactttccttttacataatgtatttctgtaattctcagaaggcaattctacaactgactttaataacaaaacacaatacaggtatgccagggtccccatccatggaaacctttgagaaaataatgaacaaaattttatgttttttctactcatcaggggaaaggacctataggttcttttgagttttgatgtcatgtgatactcttaccagggcatgcaaagtgcttcaaaacctgaactcaagctacctgtccagctttacttgaatctccacacgtgtgctccttccctttggctcaatcttttcctcgtcttggggtggatttgggccccatgcattcctgttgtcttttactttgtctgtgctaacacatcattgtccccttccacaggaagggaaacatcatctcacccatgatggcacagcactcacattgcgtgtctgttgtttccatgactgtatcttcaaggagtctggtctcctcatgggatatagccactgggctctaaagacttcttgctcatatagtaggtgctcagtaaatatttgtggcataaatgagtgagtgaaattacttcaaaagtgatcacttgaaaaatagaaaatacaatcatttctgcctaatcaaatgttaaacgttgctaccacctcaactaattctgtacccccatttggcagagtaagcaactcgagatcacatttgcagcatttggaattagaattcarttcaccctcaaattcactcaatctctcttaatttttttattttaaaaaaaggtaaacagaaagtaggtcaatcaaatcacattctcattttaacaggtccaagagtctatatagattttgaactgaattggcacacaatcatggacaacttcctaagggcttttactcatggcattcagagttttaagaaagaaaattaagtgattggaatagagtacaatagtgaatgcagaaaaagggaagaaagatgactgtagccagaaacacgagagaaagagaactataagtttctttattctaagtagcggtgggagaatctactttttggcctgcacagcggatgcaccatttctatgggtaagttttccctgtgtttcctgtcaagccggggttttaatgaaacaaaaagataccggatccctctcgctaacacctcttcatccccccaacaccccagctagtgccagccaagagcatttctctcagttccttttatccctttctaccaagaacaagatctgagatatgtgagatcctgtttgattcaagcttggagaaagcactgtatattttacagccattggttacctgttgctgtcaatagctgtattgtcagcattttatcatggattgaatgctttaaaatttttgagcagcataaaagatttgtagrggaaaacctattttccttagaaacragagacagtgttttttgatgcttcaaagtcttaaaaaatgtaggaatattagagttatgccttgccctgcttggtgggttttgagtgacattctgagaccatacattttgtgtcaagaatcgaatcaatttctcttctttgggctgctgacattgtttagagtatagatgaagactccccagtaagacatgtaaaacagtaagggactgtgaaaaaaatagattgtgaaaaataaaagtctatcaagatggggcaaacgtttaggggaatactatcaaaggtagtgttatgttcaataaaagatggctgaaatasttatgagactaatagacaaatggaaattatttacacaaacttctgtaactgcccagttctgtgaaaaacaataggaaaatcgaattcagaaaacacttatccctgtcagaattagaattaggataatggatccaccaaaatatgtgattgcttacactgaaagaatagccattatttttaacttagggtgaatttgactaatattgaataataggtgatttaagaaattattttgaaatgtttgttttaatatgccaggacaaaatgtaattgttataatttaagaaatacataattaagagaaaacaacacatctgaggaaagtaattacagtgctcagaygttaattaagagacactaaaaaacagactacttgttgaaatagtgatgtttgatagaatattagctatgttattaaaagcttaaaatccattattttattacataatagctaaaagcagcaatatttggtctaatgaagaattggcaaatagctataaggaatgattaaggcttctgcaggacttaatttggataaatcaggttttaaaacacaattatatagggaatgaattaaattattgaagttttaaaattatgagcacagaaaggaattatataggtttaaaattaatttttaagaatgaatactttcatcccactttcaaaaggctttattttttaaaaaaagtatttaaaatgaggcctgagtcaaacatttcagtatgagaagccttgcacaaaatttagctattgtagttatggtcctttggagacggtattagtcataaaactatgtatggtctttgtattaggataaatttactttggcttctgaagtttttgataaggatatatcttctgtrcaaaagcagaaagggctgtaaaatactagagaatgtagacaaaggtaccataaattactttggaaggacttcttgccatcctgaagcaaggttttstgtgaatgtttacagctgactgtcacatctttagttacaaaattcaattttgttgcattatatccattcataattgaaacattggtgttttatttcaaattactagcttagcatatgataagttaatcagcaaatgtggttaaaataataggtgtttcttaacatgctattatttctaccattagagaaaaataaaacaaaaccaaaaactcctctcttgacttcttccacatttctccccttccattgcctgctaaacttttgggaagagttttctatagtcactatctattttctctcctgtcctttgctcctgaactcagtttaaaaagggttctgctcccaccattccaaaacaaaaaaaaataccttatcagtctcaccagtgcctttgacgttggtacatccaatattcagtgttcttggtcctcactttatggacctaccaagagctttcaattgttatcattgtgtcattctggagatgctttgttcacctgacttccgggatgccatacttgtctggctttcctgccatctcactagccacatacattgtactccactgtcttcctcaatctctttttctagttccttctcatccccccaacttctaaacattgtagtcctkagagttcttccttgggctacttctgttttgcatctacactatttgcatgactatctcatccctgtattctctacattgataactcccaaatttgtctttctagaccagaagttgtacctgaaccccagtgtcatatattcaactatccatttagatatgtaacacagttctcaaacttgacatgttcaaacttgatctcctgatcttcctcccatcccaactcctacttccactgtcttctttatcccaataaataacaactgcactcagttgtttaggacaaaaaccttggagccacttttaattcttccatctctcttacagcctacacataatcttccattgcaaatgtcagtattgctcctgggttacattttttcatgatctccatccaytgctaccacctatccacacttgcatcatgtcttcttgggttatttcactggcttcccagctggtctccctacttyaccatacaaatcagccagggtgattttgttcaaatgtaagtcagattatgtcactctccaatttcttgtttaactcagaataaaagccaaaatctctactcatgaagtgtccatcaagccccaaatgctctggcctcctattatttctctttttatttttttaaaaaattactttattattatttagagacaggtctccctctgtcacccaggctggagtgcagtggtatgatcagagctcactgtagccctgaccttctaagctgaagcaatcctcctacctcrgcctcctgagtaactgggactacaggcatgtgctaccatgcctggctattttttttttcttcaaatttattgtagagacggaatttatctatgttgtctgggctagtcttgacttcctggactcaagtgaacctcctgcctcagcctcccaaagttttgggattaaaaacttgagccaccatgcttagctctcctgttacttcttcagtgacctcccactccactctcccctcactcccctcttctggcctcactgtcctcctagcctttctggatcaccaaggcacattcttttcaacgcctttgttgttgctgttctctccatttggaatgcctttcttttataattatttatgatccacttcctcacttcctttggtttttgttcaatgatactttttcatttgaggacttccctggacacactgcagtgatattgcaaccacctctcttctcaaatgtcctctgtcttcccctctttatttttctccttagttcttatcactcatgcatttttctaaattattttattctctatctcttcccattggaatgtaagccccttgaaggtttttgtgtttgttcaccatggagccccagaccctagcataatgcctggtatatgataggtgcttagtaaatatttgttgaataaaacaacctcttttttttttttttttttttttttktttttagtttgattttgcttgaatcctattttggctgatatcactgcttctttttttagcttgtattgccatatataacttgcattgtcattttatttttgacattttatgcaactttttattaatgttaaatgaaccttgcaaacatcatataatcacattttttgaccttgtctgaaatcttagtttactttttcaacattctttcttcatcttgtttgatttttcatatttatccatactaattgtgttacatactctccagtttttgctttctgcactgtctggtctttgcatttatcgtttctaggtcacatttttaattattctagacattaactagtaaaatgccttaagttttttttctgtcattgtcaaaagtgaagctgttttctgagtcctgcactacagcagagaagaaatgcattaccacccaccaccagcagctttcttccagctccctctaacttctctgtcactgtcatttagtaatgtaaatacaaatttgttattttaaataaagaatgttcttaagtttttttgttttttacattttctttggatagtcatacagcagccagcctaacaaaaattatttgtattttttatgtcttagcgcttatagtttgttgctttataccataattttagcatttggggttgggctgttccttgaagcaattgtttgaagtgttgttagataacttgttttctgtgtaagacatatatgttatgtcttttttctcttcacatgtgcaagacaacctggatgcaaataaaattatttggttacaacsttttttcttacaaaacatatggtccctgcttttttatgttatggcatttagtgttactgagaaaagaacggaaagttccacctcaaggtcacttcttttatgccagatttggcatatttgatggctgcaagaggaggtggggtggtgggataggaaatcttcaaaacttagtacctgcctggtaaaaggaagagacacagaactctgactagttgaggtattagaccataagagtattttaattttctctccatcaacaaaataattaaatatattaaaatttatgtatttgaatctttaatatttaacaagattattcacaagtattaaatttggcttttcagtttcaccatttaaagggcaaaatcattctgcctgatatatcttagagttcttcaagcatctcatatatatatatatatatatatatatatgtaatgtttatataaatgtcttgcagtgactcttaagaaaataatcagttctccataataaggcagttaggatttacctgaaaataaagataatatatcaagacttagcaatatgctagcttttcaaccaaatatatcattttctgcatggtagtgggtatctttgtttttttgaaaaatatttttgtgattagaaaattatacacaatcattgcaaatattcagaaataacaaaatatataaaataaaatttatccacaattccatcagagatacaaatttttaacattttatttaacttctttcctggcatttttctacatgcacatatatacacacagagaggcaggaaggagggagggggagagagaggaagagagaggtgtacatttttaacaatgattgccctatacaaatggcttggtgatctgccttttgaatctaaaatatactgaaactttgtcatgtcgttaaacatcatttttagtcactgtatcagttagaatatagtttgattgcatgcccaaaaaaaccccaaatggctgtgtggttcaaacaagaatagatttgtttctcttttcttttccttgtcagtccagactggtggacctctcttttacaaagtcagtcaagatggtttgcaccgtggtgtcgacatccaatgttcttttatcttgctccactgtcttggaagtattactctcttccatatttcctggttagttcacaatcctgtcagtattctgtcaaatgaaatggagaaatggagaaatggcaaagcctgtgtattccctttacagatacaatgcagaaattgcactcttcagtttgccagaacttagccgcaagtccacaaagaagactggaaaatttagcatttattctggatggccaggtgctcaggtaaacaatttgtgactgtagaaaaagggggaaatggttattggggagcaattggcaatcactgtcaaactagtatttcattaaaatatgttttgacaggtttttttctgttattcaccatgcattcatgaatattcttacatttggttcccctgtaacaacttcttaatgatagccaagatttcctaaatatttatagggttccagatagtattttaattatcttgtatgtattttttcaactgaatataatgatattattaggtagctacacttctttatcctccttcagggatatgactgaggaagtctagacttataataggttaaatgagaaagtgttgaacaacccgatcgtgtgcacaggrctagtaaatggttgattgacatgagactcagatctatgtctgaattccaagtccttaactcctactatctaatcattttttagaaaaaatttttcgaaggataagttctgccacaaagttaggcatatttctaagactgttgattcacattgtcaaactgcactctgaaaagcaggtgccagttggtgctcctgtcagcagtatacggaaggacccctttgccaaaacccttcccagcattaaatgcttaacataccaaaagaacagaaacaccactctaatacaycactaactaatacattagttgacatttatttgatgaataatatggttgaacatttacattggtatttattattgtttccatttcttttgtgaactgctttttgtacaaatcttttgtttaaattgtgcttttttttattatttgagaagggatctgcctctgtcactcaggctggagtgcagtggcataatcttggctcaccacaacctccacctcccgggctcaagtgatcctcccacctcagcctcctgtttagctgggactacaggcacgcacttccatgcccggctaatttttgtattttttgtagagacacgattttgctatgttgcgtaggctcacctcaaactcctgagatcaagcaatctgcccacttgggcctcccaaaatgttggcattgcaggtgtgagccaccacacctggtcctaaattgccttttatcccattcaatcattgctcttttgcttatagattattagaattctttgtcttaaggatatgtagtttggattccccctgacatttccttggattttgatagactttattggatttgggggaaggtgtattatgttcattgtctttgtcatatataattttttagataattttgggatttataactatggaagtggatagattttaaaagtgaaagatacgctaaatgtcatcatagttagttcttacttgagagtatcaccttaattttaaaaatgataatccctctcttagaagagaagacagaaggaaaatgtgtcctctgaaggcttttatttgcataaattgtttatatcttttgatcaacaatctttagctattttgatatccaaatgctttaaaagggtatattatttctttctcttctaaaacagaggatgtgcccctggtttttggagcccataaaaataggcattggcctgaaagtctggctgtgaccctaatgagaaaaatagctatgacctgtctctcctgtctgttctcttctagtactgtttcccctaccctctttaagtcttgcaggtgtaggataatcatacttatttctcttttttgggagctagattattgaattgtaggcttttaagaaataaggggacttccaggaagttgatastgttgggtagaattgatctcataagctaattagaatttttgcagcccatttgcaacaaaaatagcaatgccctttttcttagatttttattaagagagatgtaaaataatattttaaaggaaatgtgaactacaggagaaagtaaagattttgtttattacaagttgtaaaggcttagtttataaattattttattgtaaacattgctacaattttatgaatcttctagtgttacacactagaaataaagatctctcattcgtaaaggatcatatgagagtcttcaagacgactcagattggccttatgaggaaaggatataaaaggcgttggcagcctacagtctgtacactaaaccggttaggaaaataattgtcagtgaaatgcaaaagaccagatccttcagatattaggcagttctcaaagaaataaaagtttggcttagcatcttccctcttccttgatgtattcttctcctatcctccccagatacatattatttygttgcacttggaaggttagaatccccctttctgccccttgtctgggtcctccttctcgccaagtgttaccaggctccctagtcattctgcctattttcccaatcaaatatccatttctatgagtattcatttatagatatattcactgattatctgatcaacgtaatttatgctggactttgaatttccaaccttcataaggacatatgtacatttttaaaaaggaacrcattaacagcaatgattctgtaattgatatagwgtagatgttttaaaattttattgtgataaaaacacataacttgaaatctaccttcttaaatttttaagtgtacagtatagaattgttaattatatgcacgttgtacaggatctaactagaatgtcttaatcttgtataactgaaactctatatccattgaacaacttctcatttttccctctccaccagccttggaagctaccattctattttctgtgtctaagagtttgcctactttagatactacagcattattcacaatagctgagagatggaaacaacctaaatgtccattaatggatgaatggacacagaaaatttggtatatgtatcaataaaatattaatcacccttgaaaaacggaagaaaacccgtcatatgctacaacatagatgaaccttaagaacagtatgcccatcctggctaacatggtgaaaccccgcctctactaaaaatacaaaaaattagccgggtgtggtggtgggtgcctgtagtcccagctactggggaggctgaggcaggagaatggcgtgaacccaggaggcggagcttgcaatgagccaagatcgcgccactgcactctagcctgggtgacagggtgagactctgcctcaaataaaaaaaaaaaaagaaacaagaacattatgctaagtaaaataagccagtcacagaaaaataaatactgtatgattccacttgtatagattagatgtttttgagggcttggggtgagatatttctggggtgagatatttttcattgctccgtgcttatggctttaatctatttttccctcaattggcaatttgccttaatctctaaattgtcagtgggtgtatttgataatgaacatttcttgtacaaagaaagagactagcttggtttgtattgtccttattaataataaccatttctcaagacaatcatagtaccagacactttgtatttgtgttctcatataatctttataatgcaatgatagacactattgttgtttttcttgttattattggtcttttagcttccttaaagtcataagtggaaggtaacagaacttggacttgaacccaggtctactgatttcaaagcctctgcttttaacctcatacccttcagtgataacgggctttactcataataatggtggagatacagtttgaaataggtttgacatagatttagcgtacacattcctaagaactagtctctatggaaaaaaaaatgtaacatgacttcttcaaagccagaatctcaagttttttacattgatactgtgggttcgaggctttctgctgccatggtgctttcagagtatggacatttgttcttgtttttctaccttgttttatacattcctctatccccacagcccagcaatgcacgatgctatctggttggttagtctgcactctctgtcactgcccatcttaatatacatatttcaccaaaatccctccttctgctagctagaagatcttgttcactttctccactaagagggaaacctgacccgtggtcttcctgccaatctcacagcattactctacccaaaactatgcacagcagctttctctccctcctttccaaggttgcatgtagtgaatatatttacggctccatgggcagagtgagtgatcaagaaacactaagtgattgtggtggccagaaatgcagaggacatcatggtatatataaggcaaaattatccattgatgacttattacttatttggccattcaactagagtttttaagcactgattcttttccctaaaaccttattatatcataatggatccgttagataatctagtttaaattaaaagaaggaaaaaagaactttgccctcaggaaggaggaaaataacatcctaccaaatgtagaatgtaccacttcggtggtacatttaaatactacagtagcagaaaatgatacctgataatgtatatagagagctatcagtcctctcggtgcaaaaacaaaacagtaaaccatgtaagtacttagagacattcaggaatatgtgcagctctcataagtttcatcctactcactgaattcacttcagagaagatttcttttaattgtagaataatgtgatgggtttttttttttcatgttctatgaatgattctatgctgtggaacagccttcaatggagaaattcagaagaagcaggatgtgatgttttcacaatccaaaaatgctgttgttgcatacactccagaaagcggctctgctgttaaaggaatttcttggaaatcttttatctgctgttttgaatagctgtaatataaatgtaatagatattgtctccattgtattcaaattgtattttctagagaatgagaagatggagtctgatgtcagccttcattttttttaatatactgtttttcttccctgccagaataatgccaacttcatgtatgttgtctacacttccttcacgtagatgagggaattatcttgaatatgtttcttttgaggaaattgagaagtctgctcagggagtactactgaatgctttgcttgctaacctatacatcagaacaaggtggtatatctgctgctctaagaataagtacattttgctacaaagagaagtatttcatatacttacttaaaatctaccaaaaagttcagggaagctcttagtaagtagctgaggttacttagcttcaggggaaaaaagctagaacagagtgtgtgttcaagaagtaaaatagggcatggaatcactaatggtggcagtgcatgaggaattgatatgagatgagactacagaaataactcagcaagtccagtgtaaacttttatttattcatatataaagcctgatattattgctgtaatttaaagtatattgctataatttagataaaatttttccatcactgctttcttttccatctctcagctggtcttattattcaagtcccaggacagtaaacattttgtagtttcaaaagcccttcagtactaatggatttttttttaaaactagttgttttaaatgaaactgtaattatgagaacatatctctcttttcttccttttggcaaattccactaggcattaaagcttattacccagttcaaatcgattatatttattttcattcatgactcacaacgtttctaccttctaatacttgcaagtatattcatatgtgatttcaagatctctcaagtacattttctgtatctttcctgctttgtcatatttgtaatattttatatgtaacataaaatatatggaagataaattctgctaactataaaagttcatatttttttaagttatcagaagttttgttctatatatctttgaagttactgaaagctcagatttcatttgaacagaatggtattgtagggacattatctagtttctttcaggctatctctctcctgagaaagcttgagtcctggagctctttggaattacagctgagcacagagaagatgggaacttgggacaggtgaatacccatgccctagacctggggaaaggaccagatctgattggaagaccctatagctctgtgcaagtcagactggggctatggagcagccttcaactggaggttgacagatcccttgagagagtattacatggtgttcacgtattcagagttccttttatggactattggagaccaagcttgaggccttggacaagagagagtttttaaagtacagggaaactctagcaatagtatttatgcttaggaactagttctctaatagcagtgaccactgtttccagtggctaaacctaggggcctgcaaagctattggaayggacacagatcagttttctgaagaaaattctggcccagtcaatagatactctcatggctgaagcctgagcagatgtgagagggtcaattactgagacagaacagggcacgagaataggtattgaaacctgagagacaggttgagagcctgtatttggatttcagagtgcagaggtcaagtttgggagctggaagaaggaagaaacatgaccagggagaaggtaagcagaaggggtgaactgaaactagatgctgaagacacraggtcataaacgtgaacaaggatcaaagccctggcaactcaagaaaactgctcaacccaggagaggccgctcaccctttacaacagaatacaaactttgccttgtctctgatacctttctgtctgtcccaggaaggtcactccttttgtgaaatcacgctgttttgatgtgcctcttctatttattggattggatcccattgatggtttagaacccattctatggtaattgtttatacatttctcttcccattctactccatgaagtcctcagcaccagagactaacttaccacatgayatgtaaatgatgtacaattggcaaagagatcttgagagtctctgtatctgtttgtagggggaacccaccaacaaacagctttgatatagtggttcatctctaggatatagataagggtaagtcatgctgcccaatttattcagacgcctcttcctgcctggctctaaatctttgcagtaggagaatgacataggaccataaggacgtacctgaagccagaatatgtttatgtattcttttaataggcactgtaaaaggcactgtgatcagtgtttgggatgcaaaataaaacaatgaaatctctaccttcaaagtctaataataagtatgatgaccactgtttcttgtacatgaacgatgtgccaatcactgctgttttccatttatcatgtagttcaacataacaaccctgtaagacttattatatccattttacaaatgaaataaggcatagggaggtcatataacttgttcaatatcatgtagctgctaagtaggtgagcttggattagtgtgtctgaattcaaagaaaaagaattttagtagtatatgtcctgatctatgtaccccrttttctgtttctgatatttaacaccatgaatgcccttagattctgagtgattctttgttgagaatgaaagtagtaacagagagcaatgttataaaaagccccttccataattcaagcaaaaacattatgcatgccagtaatttcattttcgtcttcacaacctactcaaagtgagaaaacagagctaaaaatagggatgaggcaatgttatgtaaagttcaggaaaaatgtaataaaagccagatttaggtaaatattattgcagaaaagatgtattttgttaaaatggccttaaaatcttttctgtatgtttgtttcaagatataaaatatagatcactttttaaagaaatgattcagtgactattacacaattacagagttaccaaaaatgtcttcactgttagtatattctaaaatttgatgaagtattacacaagtcaaatcagaatttatttataattaatctcttgatattttattacagattagtgtttttagaatgtaacaattacttggcctttgatgctatttactgaaataatttttctaggagttatttcataaacgcctatcagagtgtagaagattattttattatcctgaataaagttttattttgtttttaaatgacacataacaattgtacatatttatgggctacaatatgatgtttcaatacgtatatacgttgtataatgatcatatcagggtacttagcatacccaccacctcaaacacttttcattcctttgtggcaaaaacattaaaaattccctattctagctaatttgaagaatacaatacattattgttggctatagtcaccctactgtgcagtagaacaccaggatttatttgtcctatctgactgtaactttgtacctgttggccaatccctctccattcccgactgtccccgctactctcaccagcaggtagtcactcttctactctctacttctatgagatcaatgtttttaggttccaacatgtaagtgagagcatgtggcatttgtctttctgtgcctggcttatttcacttaacataatatcctctaggtttatccatgttgtcacaatcacagtatttcattcttttatggttgatgttctgtgatgtatatataccacattttaaaattcatttatccattgatggacacttagattgattccatatctaggcaactgtgaatagtgctgcaataataggagtgcagatatatctttgacatattgattacatttcctttggattacatttcctttggatatatacccagcagtgcaatggttgacacatgtggtagttctaattttaattttttgaggaacatcatgctttcttccaaaatggctatactagtttacattcccattgacagggaataagagttctcctttctttatatcctcaccagcatttgttattttttgtctttttgataatagccatcctaactgagatgagatgaaatctcattgtggttttgatttgtatttctctgataagtagtcatgttagcatttttttcacttacctatctgccatttgtatgtcttcttttgagaaatatctattcagatctttgtctgttttttaatcaaatgattattattactattatttttactgctgagttgtttgagttcctgaactttcttttacctattacaatccagtgtcaagaagatagtgtattaatttctttgtttastttattgatcaatgtttattgataatatctgccttcatgcctacaatgaagcaaaaccttataatactgctttctgtatttcttcaagattccatagccatgcagtgtaatgttgaaaaatcagcagatttactttttgatgtaggagaaagaaaaaaaaaataaacagagataacagctgtctaccacaaatttcctattttgaaagttctatatatttgtttaatatggaacatttacatgtcatgcactgggctgactgctgggaatatagaggagaacaagrctgtccagtccgttgcttgcatagaatactgctgttgcacttagtactagagcaataccaattatgatagcatcacttaattaaggttgggcaactgtgttattatagttaggtaccatgtaacattgtgatttttaaaatgaatttatctcatttgataaaaatgcatatttttttctggcaggtatgaatttgctagaaattctctagttagactgtatcaactacagtatcatttattcacttaaaaagctgttgtcatgttcattatttgtacaatgaaaaaatgggagagatgcattttattgcaggcttctactgttgktaaagcactagatttttccactttgaattgttcaaaattattagtttatcaaacaaattgaaagaaaagccagggttctgttgctaacttttgaatgaaattttaagcattaaggcacatcaaatcaatggaatataaatatgaagatttttattttttacccagccattgtatccaaccaggctagggtgaattctacttttctatcctgcaatggcattctttgtgctttcggctcactttggtttttaaaagtccatttctttctaaaagattaatctccaggtcaattcaaacttcaccttttactcatcccttagctcgagtcctaaagcaagaagaagagagttaatcctagtaagcctcttattgttgctcattttttggttgagaaatgaagaaagatatggcacatagtatacattctctaaatatcaaatgaaagcatgaatgaacaaaatagcagaataaattaaattcagtgatttgctaaaagttaatctgaaatgtatgcaggattctgttccagtctttaaatctcacacacacacacacacacacacacacacacacaatagtaggtgtttagacgataataaaatttgaacaaaaagttcaaattacagtggaagactgcctttgaatataagttactttttttctgtgttagtctgtgaaataagtaagtattgaaaccttccctgatagatctccaaataatttcccattctggttggttggacatgtgcttagcaagagtgcatgcacctccagttcctccaagtaggggaaaacagaatggggagacaagggagattgagccgtttttcaagtatctcactcaggaggctggctgccaatcaaggacaccccagaaggaagacagtgaagggcacatcactggtgaggaggactaagatggatcgcagatggcagcctggaaccaggcctcccatatcagggagctgtgcagtgggggtgctcacagcctcactcaaagaaagcagacataggcccccaaagatattcaccttgtggaccagaatcttcctgttctggtttcatgttcttaaatgatcataattactataacaattattttgagtttttaatttttgatcttttttgttttaacacagtaagtaatctcaacattttttgccatattcatgaagcaggaaatgtactttaattccttatttataaaaatgttatggaccttataatcagaagagactcagatggtcttatttagtaagatttgaaaggatagattccggggtttctagaatttaaataataacttctgttgttacttctgtagtttccagagttttattgtttggttccaaaaaataaggagaacttgacttagcatagaaaacataacctttcatgtcagctctactttaataaatgcaagcacaattttgttcagctacctagaaaaataatgatattaggtaatctacaatcttttagcttttacatgaacctaagaattaaagctgggtctttaacttgagtttggtagatttaaagtaattacgtttttgctgtctacgaaagttgtttagttaaagatattgtaaatgaactataattatgtagatttacgtctgcttttaaaacacttgtgctctttcactgatttgaaccttcrtatatgctttcatatttattttgccaaagaaactatagataatttgattccatagcaggatgttgaggaagactttttctcttgccttggaatcactgctattggtccttgggagaacacaatgatgtctaagaattccatgttttatagcaaaccaccaaccatagtaaaaggtagcaccttttccaggtcttactaaaagaacagatcctactactgtcaacttttaccccagcatccctcacacctctccctaggccttatgagaagagtcgtggacaaaggagacgaggagagtcatcaaggacagctgcttcacacaatgctttggtaaagggtcttgtccccagtttcccacttcagcttcaacaaggccatgcagatatgaaattggagcatgagcatgagaatcattcagaaagatctaaaatatctgcaacaagtggaaattgacatctatagggagattcaaatctaagattttgttgaaagttaatctgaagtacatgtaacacttaacagtgatttctgcacccggccgaattctgggttctattctttacacacacacacacacacacacacacaaatggtgggcatctgtgctttaaaggtgaaagaaaaagaagggtctgtgatataaattcaaatttagacctgctgtaaaaatacagtatcttttctgtatggttgggccgcaagtaaatctggaagcatttttttgatagatcacctggtcattttaccacttgctctttcttttacagttttgctcaatcaccctgttggtatccctttcctgggtttttggcataatttacaagaggcactgatgatagtgagtacaagtaggtttatttctatttcaactgcctccactaaacaaagggcaaaaaaaccttgactgcatgagagattgcttctcaaataaaagctgtggttttctgtgtatatggtaatactcttaccttccctgtaatgtttcagtggtactttttttctaggaaactggagaacttaattttatacaggaatctctggtcttagaacttagcctagtggtaacagttttaaaaggtctctacctccatttaaaggaagcaattattccaaaagcacaggatctctggttgactaaagactgtatcaaggatgaaagattatgtctggaatatttcctgccttatgaacttttgtgttcaaaatataaattttagatttaaggaggcatgtgggtgtgtattgctcactctctgatatacaacatggttattttatgtttggtagtagtagttaaaataaaactatattarttgccttcttactaatgtactaaaggctaaatgaaagaaatttttcatcaaatgttataaattttgtttgattgtatcaatttgagatacggttcagtattttagaaccaatgtcttaaggtaggcttccatagttscaattaagcttcataagaaatataattaagttgaagcttggcattgtttggtaggtgtctggctggcaccacgttttccaaaaataagatttgtttgaaggggcttgggtttttcccttaatttcaaggttatgtcttggatggggcttgggaaagggcagtgggttctgactacacgtcaaagatgttaaagacattcactggcttgacatcatgtggacagtggcttgcttattcttcgtttcctagtatcaattaaaataataaatggtcaggttttgctcacactatttttaaaatgaagtttatgatccataattttgtgaaataaacttgagttgtattcagtacacatatggaatagtaagttattacattttaaagatgacagtgatgtaatggtatacttatatattatrtttgcagatagatttttcacagaacaagattcctcggttttaattctacaatgtgatattggaattaaaaacaagtctcttatgtgtgaatattttatctctatttgttattatcaaaataaacactattcatagagttcaatttcatcaataattaataatgtgactaatgcatgataaaaagaataagttaaattatgttttttgcttacaaatatcacattaattgaataactggagtaatattatgctgcttttattaaatatgtagtgacaagtctagaaaataaactgattggcacatttgttaaaatccatgttagttttcctgaagaactacacaccctaataaataacttacttatgttcaaaatgarttaaatgtggcaaataattccaagacatttattttacctaattatatgtggttgaacaactaggaacaaatattttacaagtgaaaaccataagacacatttttttaggacatatgtatatactaatgctttttaccatttattatttgctgatagtccaggaccatatattaaagagtgatttcagtatccatctaaattttcatatggtttcatttaatcataggattaagagaatattttaaatgattagaaaatatcctcaattttttcaaggtttagagtatttatatttatacgttaaaatctttggaaaggcctaaactcagggtgttttgaaattatgtaaattaatatatttaggatctaatttattttatatctacaktagcttttcmatgtataagtttcacaaataaataaacttcacaaataaaattaataaaagctaattaaaaatatcaaacacctttctttttcaaatgtgtaatttaatgagattctgaattaccttgattatttctaaaagttactattttttcaaatgaaaataaaacttagccaccatttgaaggctatatgctcttagcttaaactgatacacttgcaaatatagctatccaactgcaaaataataatcaaatttagatattcagactctgagtagagaatggaagaagttgtttggctgatgtgaaaattgaaccaatgattttaattttgaacatactaagctctaaccaaatgtgtcaagtgttgccaaataaatatagaggaagaggataccatgttttatattaagaagggttaatcatttgtctgtagaataatttctcttcaaggtgccagtgaaatgtattagtgatggttagttaactataacctgaccacatagttaccttatatggtcaggttatacaacaggtcacctgttgtcaactccatatctttctagttccaccactcctgtagcagctatatgcattgtaagtagcagattttataaaatgtgtagatcaatccctttggaaaagaatatcaactatacatcatctgtatttcttaattttatcctattttttctctttcttttaagaatactaatgtatccaacttttatattcctttttgtttgtgttatattttagtttctgcataagatttgttttttacctagcctttctaatggggtttcagatgttcatactccagtcttacaggtcctctcctctagaatggtatcttttacgtctgtaatgttctctttatttccattaccctttaattacaagtaaccatacttcaagtaagcagcttttaaaaattaaaaacttgaataaattgctattcaaaatgggttattgaataattttaatctaaaaatgttttcaataagtacatttcaggctagaataacattactaatgacactttattaatagtgctactcatctttctgggataaatgtgagatactcttggataaggaatgggaaagtccaaatatagttttgtatatggaaatatatataaaatatatagtgtggaattttttattgaatattcattggtgcctgaatatctcatgggaattcatttaggatttgcagaatatttagcagacatgttagactttagtattgtcacattttggattatttctgattattcgatgtattagatatatgtgctaatgtaattttggaatcaatttgcttgctctcttctaccttcaaattaaacttaaaattagagtataatggcacaacacaatacatgccttaaaaaactggaggacaaagttatttttagcctagaattgtgaagatagaacaagacaatctaaaaacttttatcttgtgactcttttttcagaagctgctggagtatatgctccagtgctcaccaaaataagggaataaaccaataaaggggattcatgggattcaggaaaccagagttgcagccagtgaaacagcaatcaraatgacctgagcacacaagctaggcagagcctgctgccctcagtccaactggaacgagttccagtccaactggaatgagaggatttcggggaggaaagtggaaattctatattacttattcattgactgcatcagacaatatattaatccatatgtgttttgaaaatctagaagtgttttacagatttggagaaaattagcaattggtcctgagaaaataatcaaatttaaaagaccttaattaactgcaagaaaaagtcgagtagaaagtataatcataatacactactttgctcaacagtcatgaatatttacataatgataacgttgaatacctctaaaatatgatatttatactctaggtttggagagaatagaactatttaagttagcataaatacttatacatgaaagtaaaaaggtaatatatagtatctaaaatttagaagtcaaraattacaataagagtatgttatctgaaaatatggagttaaattacagaagagatagctgaaagaattgaaaatgtgacctgtgggacactggactggagaggtggagtgaaatgaagcagggtacagctgctttccattatgagtctggcagtagtccttgaagttttaaactacatgcatgtctaacaaaaaagtaaatatttttaaaagggcaaaaaatactgtgataactcttgacagtttgcaatgtagaaaagaatggaagaggctgtcttcatcttttgaagctcatttcctggtaatctcccctgcctgctctcagcttcagccattctggcctttttgctgtttttccaacacrtggggcttggtcttgtcttaggaactctgcgcctgtgccagcactgctcttccctcaggtgtctgcagacttcttcgctgatctctttcaaggctttgcttgaatgtcacttctcagcaaggttccccttgaccactcagtctaaaattgcacctgctcatgcatctgccttattccgctctaatgcttttctccatagtgtttatcaccttcttaaatactgcatgattaagtcatttattatggtttttgttaactttctatctccccttgctacaatgtgaactacacaaggacaacatgtttgtggtttggatggctggggggtccaccagtgcatctcaagtgcctatatatatatatgaaacatatatatggaacactttttattttaatgagctattcagtatttcagtaagctattaaatggtgcttggcatacagtatgtaatcagtatatattagttgaaggtatcaattaactaaatgaagaaagaaaagactaaaaaaggaagggaagaaaaaagagaaggtgggacaaaacaagggacacaagttaggaggcaaatgcattatttcataagatggtggtggtttgagtttgggtagaggcacgataaatggagagaagtgaatgaatttgaaataggcttgaacataaatttggcattataatgaaaaatatgattatttctaaaaccaatgtttcatctgttttataagcaggaaatacctgaaaataaggaatgtcaagattctagtatatgttattagaagtgaatggcattcatagtcatggaaaataawgttaaattattaaatgctatttaaagccacagaagttctagacatcgaataaaaataagaatgatacaataacttagctaatgacaacaataaaagcttttgtagagttttcctacaagttttacagtttagcttgcctgtaagttacaaatacgaggatttttgtgctttgaactataaaagctcatacctaagagtaatgaaaggtttaatattgtacttatttaatagtgctttcttctattaaaaacatagtattctattcttatttataattttatggaaaccaatttcactaacatttataaagtttgatttgaaaataaattatatttcttaataattatatgcacagttatgacctgcatggatttaagctttcgcataatttaaaaatccatatcttcattttgactgtatatttgaaaatactgatgacagagtaatctgattgcactgtaactggccatttttgtgaaataaagtccttttttcttgtctcagtagtcataactagttacgtgtatattgtggttttcttccatataaatgtttctagattgcgtacatttaaaataacttttcatgtctaattctgatgcacatctttagcaaatatgaacagcaaccttgccactgtctctgattsttaacttcttccttctcttatcctttccttatcttatcttctttccttttcttatcctttcagagcctcttccttttctgaaacttagatgggagataggaaggtatggttgtaaaagcattacatctgtcatatgatctatcacatatcatataagaaaatgcattatattttggaaactttaattttatacacatatatatgaaatatgttcatatgaaatacatttcactttattaagctattcaatatctcaataagctattcaatattacaggcacctagataactaaaggtcagtcattacatttatttcagtgtaagaacttaacggggaaaaatttaagttctgttaatgagtttctaataaaagtagacctgttttgaaaacagaagtgtctgtttccttgttatatttgaaataaaaaattatgatgaagcattttccagtgtatgaaactaagattcttttatccataagggactaatgtgtagttgaagatgtccgtaattgaacagcaggaagtattagataaattcaagaaagcccagtaaatcctagagggaattagaaataaagttcatatatttattgttaactgcaaccattttatatgaaaattataacaaggcaaagcttacatttcattatcaatatagtgtccctatccactgttctttgatagcagtcaagtatgggaaacaatataagagatggttatgaagttgataacgtgtttagcactgstttgtactcattctgtatccaggaatctctttttattcattgtgttaaatattcatgagcacttaytctgtgtctgatactatgatgtagaggatcgaagagtgtactagtttctgctcttaaagtaatccataggcagaagagagacatacaggtgtatgttcattgaaatatgacagctaccatttgaaaaatgyatggaaatatagatgcttagtgcatttggtaaagaagcrggtgagactaagggaaggggaatttttagggtagcagtgcttaagtatgttacaggggcttaaaagaacagttcagtgaaggagagattgaagtccagaaaatcctggagaaggtaggaggatgggaaaagagtggtggcatctgtctctatgagatacaatgagaaagacgatgatgaaaatagaacttagttaaaaggtgaagaggagggaacttgcaaaatttcccgttttctgttttcttggtgagaacagaatgttcagtctgctcctgatcataaaaggaaggatttagcagtcactgatctgaaaaaggttggggaacagagacgggtaaatgaattatgggtgtcagggaacattcctctaagattataaatcctaaatttgtcatttattcatgtaatgaatatttacagagcacgtttgcctaggttaggtgttgaatatgcagcagggagcaagataggcacattttgaattcttaagcagttcatgccttcatgacacagtaaacaaatattaaaaaattattactcaattataattgtgagaaagaccgtaaaagttaaagaaatggtattaagataccatatgatgcatgagaaggcttgggattgggtgaggaggcagagaaaggagaaagtagagatacccagttggagaaatggctgagcaaaggccctgagaccaggtgcttgagggaggcaaggcttcccactcagtgtgctctggtgccactcgtgaattacacgtgtgtcaaatattcatccgctcagctcttatgtgttattccaaggcacaaagaacattatcactttctaactgagccataatatgaaatagtttgagaagctttgcattaggggaagtgacctcagaaagktttcatctgtagcaccagcaaggtgcatggaataaataaaatatctggatgttttattaatttggcccttcttgtgtgtttatagtcattgaattaattggtttattcagcaaataggtagttgataaaatgacactgcatttaacctggctagttttataaatattacaaattgacacagagacggtccacaatatggaagtttatcttggggttttttatgaaaagatttaaaaaattatcttaccttagcaggtatgggggaaagttttctctcatttcttttccattgagtattgtcagtaaaatagaataagattgagtgaaatttcaaattatttaatgttcaaccaaaagaattctcaacttattcacacatatatattaagtaaagaattcagaaaatcattaataaagttcagacaaaaaccgtctaacctaattcccgggaaaaaaactggaactctgcctagaattatccagctacacagtctgtattcattttttaattgcataccttatcctttttatctctgtgtatagcacctatttaaaagaaacagaaacctggcctggtgtggtggctcatgcctctgatcccagcacttttggaggccgaggcgagcagatcccttgaacccaggagttcaagagcagcctgggcaacatggtgaaaccctgtctctaaataaataygtaaaagaaagaaacagaaaccagacatttctgtttttagctgtgggttgctacacctctgtgaaatcataggtgtttaccactgtcttaaatcactggtttatgattacttgatattttctggatttttaaaacattacttctttttttaagtggtgtagaagtaacgttttagcatactataaatttctggtaataatttgtattacaaaggtgcatattgtttaaggtcccaagtaagctttatgtatagaaaaggttcctctgctctttctttttgtcctcaaacgtaaacttctggagacctggagagaatgaaaggcgtccgagtgtgtgtccatggcaatccgctagctgtgtggaggaagttacagtggcattaagccatgaaaaggatcaattgtttttgtgaaaaatccttgggacgtgccttgaatttaaagaatcaagttcattaaaatcataaatcatctattaatcttattttgttgaaatatccttggtggtccatggtattttaaagaccaaaattgtaaaaaatgtagttaaagtaacaacataatgggattgttgaggaccgtgaaataatatcctcaatgccttttcttcttgagggtttttactggatacttgctctacctatacctctcctaactacagaactgaacatgatgtgagatgtgtaactttcatttattcactcatgtgccaggcaccatgctgacattacatgtgaaaagtttccaaggttttcttgttacgtctacaattactgctaagtttcccgtaagtaatttgggggactggaaacgagggcaaaattacatgaagggcttagaaaactgcatcaattctttttggatgtgtcagggagatgggggtagtctttctccctgctaatcaagacccactagagcaccgccgtatactgcacacatacttctgaatgacaggagctttgtgtgagatgagaaagctgtgtcaggctgatggtattatcatgattccttggaatggatcaccatcccaaatcaccagacactccctgatcagsagggaacagcacattctccagctactgtattatttgggaggttcaggtaggaagtgagtgcatagcctcaaggggtctggtggaggtcctcttgggaaatgcagaacttctttgcctactaatgccccttgctctgagaccggagaggcttctgggaattttatcctcacaagaaacattcatttcatttaaatagtatgtgaagcaagacatttaagttagttagargtgcatatcatttaaaatggcaggagatgacagtttctgcaagccatttctgaagttaaaaaacaaggtagtttaaaataaattgtatttcagcagtcactattttcttaatttrccaatgaacttgaatgacatattaaagaactttaggcattatactctggtttgtgatccgcttgaacacaaaatgcatattatgtgatcttatttccaaggttaaatcagtgtatccttggctagatctataatagcttatcagataaacatcttctgtcaaaataatatttgccattaatgaaattaatggcagaagtataaacttcagaaagatatgatcacttagatgctaaaaaatctattaaggaaaacaggttacatttcaatatctttgtctttgtgttctatgatatgtaaattccaaggtgtaaatcctttcataaaaacatttttttctttttcctagacttagagagaaacattgacttgcccacagagctagctcctttgatgtgcaataatgctacctgtggtctgttttaagatgctcttttttggccaggcgcagtggctcatgcctgtaatcccagcactttgggaggccraggcgggcagatcatgaagtcaagagattgagaccatcctggccaacatggtaaaaccccgtctctactaaaaatacaaaaattaactgggcgtcatggtgtgcgcctataatcccagctacttggaaatccgaggcaggagaatcacttgaacctgggagccggaggttgcagtgagccgagatcgtgccactgcactcctgactggcgacagagtgggactccatctcaaaaaaaaaaaaaaaaaagttcatttttatttaaccgttaccattatcacattagacagtgcaggagtatgttaattatctctaggtgtcccagtggcctagtaagtccagggcaaaatgccagcagagtcctggccaaaaacactacattaacttgttcagtctcttgacatcctcacaaacagaacagtaaacctggagagaaaacatgtttgttccaaatgagttaactattccaaaataaataatatctaacccctggccaagaatttgtaattgtgtataaaaagtaactaatgggatgtattctccaagactattaattatgtactgaacaggaatgctttttaaatgttgttcctctgagtgcaataaacctgtgtaatctaggctacctaatgagcatctttgagcatctgccactgcagagtrcattcaaatttcaggcaaaatttgggaaatgctgttgcagcagtggcccagtaagacccagtgctgtcattggtcaagataggtcaccaattacaagacttgaagataagcatgttgtgattggtggttgaagtgaatcccctctccttaaggcctcactttggggattcacagaatgggcattgtggaggccccaagttccatggagaatgcaactattaaattgagaaagaaaagaaagtacaagtgagatgttaggcaaagagtagaggcatgagatggggactaaaagtatccagcagaggaatgtgaagccactaaaatgattctgctagccagctagaccgtacttaagctgtactaattgagacaataggatttgcacagtttccgctcacttcaaataaactgtacaatacaaggaaataaaatgataactagtaattatcacttcatagtctactggcaatgaaagatttttatgtaccgataaagcagtagatgtaatcttttttgtacagttatgagcaaaatcagtgatgaatatagctaggtgctcgttaacaatgaaaagcctactaattagagatgtcatcaaagtgtttaatttttttaaattgctagtggggaaatggttcacccttgaatatcaggatttgtattttcaatgtgcagtgagtgtccatacttacccttaaaactaaagagcacttcagactaagaatcagatagcatcagaaaacaagtgaataatttatgaccaaaaaaacatgcagggcacattagataaatgtcacattgctgttgcatttaaaacgaaattgcttcactattgaaagaaaaaacccaaatgcctgaaaaataaaattcaggaaatgataattgtcgttataagcacattttttacaaagagttcaaaatggttttacacatgccctatctcttgttacggtattattgtaagtaaacaggagtttacttacagtaaaaatatatatccctatttttaaattgtggaaatacaagcaaagagatgtgacttgtccaaggtcatcacttaaaggcagaatgtaagattccgatcttaaaaataaagtgaaaagaggcataaaaaaatatgtgtttatagttaaaattagtcagatctcccttgctcatcctggtttctttttgtaatattgcccaagcttaagtagttttaatgagcaatagcaagtggcttataaaagatactggcaaattgaaaatgtcttaaatcattgaagatccattgaaaaattatsaatttattatagtaaatrtgcttcttgggaataaaggtttcttatttctagaccrgctaaaaaaaamaaaaaaaggaattcatgccaaaaatgaattttcagtcaatatactgggaaaggagtcaagaaactctgccttgtccagacataagtgcacagtgaatcagtcagcatcctgacagcaacttaacatgacccgcacctattttagaacaggttgttaacacataaagctgccagattgtcctgcttaatggatagacagtgacatttgggtttaattttatctaagcaaaatgtgctgttttagaaataagataaaaattaaaataagactatttcaaggtttacccacaaaatgcagacccagtgcatctgatcatcatggccaataagatgatctgtgagtttgttgcgtttcctgttttgctatggttcttgtttttcattatcttggtagctgaagtacttaacttgcctactatgtgtcaacttggctattatttcataagcttaactttaaaatgctgttaatgctgcatctatcatgcagtctcttggaagaagattttaaaatggatttcaaatgtttctttacagtcttaaaacatatttacaatctatctttaatttatctagttgtagaatcagatacattctttcagacattctttaaagtgcatagacactttaaattttttgaatatttaacaaaaactcatcaaatatttggaaaacctgaaaacatatgaaaaaataaaaatcactcccaatggcaccacataaatttacatttctgtatatatgtactatttataaaatagtatcataactgttgatattttatatcatgtatatttcaaaaaaaaatcaataaatatatttgaaaatatacttataatggcttcacgtcatttcatattaggaaccttatataatttatttaaacttccccactttttgtatattaacatattttatagttattcaacattttttcaatgttgtaaacatcttggtacatcatgttaatctctgttaatcttttaaaatatgttctttggaatagaattattgtgtccaagatatgaagagttttaaggatcttgataacccttgtcaactcacttcccagaaagtttatagtagttcattcttctacctgtatataaagaaacatatcaagatttctggatcatcattgaatatttaaaaagtaataataaacctttgacaactggttagctggaaaactgctatcttcacattattttagtttctgtttctttgacaccagtaaagtctcacagttctttataaatttattaattgtatttgcattcttaaaacttctgtgctcatattttgcccttattgatttgtgataattttgtatgtgtggaatatattgtaatatttgtttaatgtattttaacatttatcaatagcttaattttacaatttgtatttcattatacatttctctatacaagttttaaatgctatataatcaaagctataaatgtttcttcataatatccttttcttcatacatagaaatgcatcccccatcttatgattaatttaatgttcactttgtaaatagtttttatgcatctttttaaaaacattctttattccacttgtaatttatttttatgtatgtgtcaagtacaatttaatttttttcacaaatagtgttcccaacctttgaaccttcatacttttccttatctaattgtgatgtttcctttaacatatattaaatttgcatctatagtargttctatgttagtgctgtttgcttttttctattgatctgtctatcaattcatttttttagtaattgattaaccaagcctttattaattcacacttcttctaaatgttctagtcaatttttactctccatttattattctatataaattttcaaaaaaattctccagttagaaacatcccagtgagatytgacctattcattaatatggaaaaaaaaatcacaacttccccaaattcactgtttccattgaagaatgtagtagatctcttcatttattcacattttcttttatattaaaaatagttcatatctttgttcctttatgaacttgcttggtgttttgtgcttttcacggtaaatgtgaatggaatcccattgtatcctctaattggttatttgagtgtgccagttgtccagaacttcctgagtgaccccaatcagaaaggggcacagcagatgttcttgctctgcgtcagctttcagtgaaagtacgtgggcataagatttcaaaacagcaatcttatcattgctaaataatactattatggtaagataagttagtagcatataataacataatacataaatataataacacattatttttgtcatttgatgaattgtgtttkctactcccttttatatactttttcttacacagattgggttttcttctcacttctaatattatttttagctcgttcctttaattgttatttgtatatacgttgatatttttgtctctgttcctattatcactgagcagtcaacattgggtttttctcttatgatggaacaaattcactgttatagacataaaactaggtaactataatgattgtagtacaataacaatgagtttgtgcttagtgttttgttgaaattatagaaggttgacaggaaaaaaatgtggtacttcatccacagattttattttatacctgaagctcaagtaaagctagtttaatagaagctatcctcatgcatatygtttaagctcaagaaataaatcttctgacattgtcaacttttaattttagcacccaaaaagtagagaatgctttaagtgaactgttatgatgctgtaaaataatatttattaaattgagaatatgtcagtgattcattatcatgtaaagaaataggttaccaaacagtgtcattgaatttaagtaaagtccaaatttattatatataaatatataacatctagagaaacatacatgcatgggcaaaactgttaatagcagttatttgtagggcataggattacaagtgatttttaaagtatttttgcctacctgtattttttctaatttatttgaaataggcatgcattattatgtcataaagatcaaaattattaatatgttttaacaaaaaataactcaactttagaaagatagataaattacattagcttaaatgcatctaagtataggaaaatatactaactacttatcaagattagcctgtgaatattttgagctttcattgaaaagtttgaatagtaaacaaattaccaacatagaaattctctctctgaaagcatgtccagtgtctaagaaacataaaatctaattgctcacctttgagactctccttggtcctgtgagacatatgcatttaattggatgtctcactaccaaaataagcatatgtaagaaatgactccctttgttcttttccattatccttatgttcaaactttccatctccttgaatgattttaccattttgattatatagtgcctcaggcatctactttttatctctttaaacttattcttaaataaagaggttacctggactcttataactcatatttttccagaattacctctttttaatgatatgaattaaaatatcctcttattttgcataaagtttctatttaagttttgagacattcaaaagtacttttattttgaagcctttgaagagaggaggaaaccaaaactctgcttcctaacactggaaggtagttgaaattggaaaacaaatggcttgatatatatactataaaaagtggtattttttaggtcttttggttacacctgaagtggttaacagtaagtgcaatgtttgagctagtattatagcctaaacaaaccatactatctgaattaccataattagctaaattaggtttcataaatgtcgttgcatgtatactgaataaaagtttaaattccagatgggtaaagataggctgtatgataatttaacttcacagcaagccaatccttaacattgaatgacaggaagatccacagagaaaatttgccatgtataattttgtagactctgtactcgtgggcaaatttaattttacttggaaagtttgtcttagcaaatcaaggttttgggttagatcatttggrtcataaactcagctttcttatcaaatggagaaagacaacaaaaatagaacatctgaagatacaaagtatttaataaccaggtgatgtgttcataggtgttctttaatcaaaagttgattctggctgggcacggtggctcatgcctgtaatcccaacattttgggatgccaaggcgggcagatcacttgaggtcagatattcgagaccagcctggccaacatggtgaaaccctgtctctactaaaaataaaaaaattagctgggcatggtagtgcatgcctgtaatcccagctactcgggaggctgaggcagaaggattgcttgaacccagggcgtaggcgtggggtgaggtgcagaggttgcagtaagccaagatcatgccactgcattccagcctgggtgacagagcgggactccgcctcaaaaaaaaaagttgattcttttcttaaaggaattcctattttttattttattctcagagaaaagacttattttgtttccagtgacagatgattgtgactgctgtcactatcaaccgttgtttatcaatgccacttcagtcttaagcatgtcttgcttcaaattctttggtggatgataaccactctgatgacagtatactatctccagagggttctaagtccttcttcaagccttcacaaactacctatatttcttcacaagcacacatccaaccctttcatttcagttaaaatattttttggattatttcatactcttctttgaaatttttcctcaaaatatatgcaacatatgaaatacattcaatgccattcagtcaactcagtagactacctcctcacttttaaaagaaatctaggtaagaagagagagtaggatgaaagttaaaagtgtgaagatggatagtgatctgtcaccaaaaataagttcctagtsatctatgaagatcctacatgagcgctccctggactgtcaaatcttgagttctgtgatttctcacctcttgatcctcatgccttttcttctacctggaacattcagtcccttttctcaggtctcttctttgtcagtcttcttcaaggtctttaatggttcatctctaattctatcatttctttgccacatttctagacttctgctatcaactgatctcctttttatgtcctcggatattctttagtaacttctttaaaggacgtgaaatatgcaagaagtatcatctaccttgaacaaattcactttaagagatatggaatcctagaattcaaacttagatctgtggttattttctatctgaaagttatttttcttaggagcactgtatttctccctattacagtaatattttggccacttatggcaataacgtgtgtatgtgtttgtgtgtgtattttgtcagagcactgctgctagaatttttagtagaatgcagttgataaattgttaatcaatatgaaacagagactttctttagggtaagrccacaatcagaagcatttttagaattcaaaatatttataatgattttttttagtagaaaatcagcaccctgattttaacttggtgggggggtggtaaaaattttgagaaaaattggtttccttgatagggagttatcaaggaaaacaaaactttgatttcctttacataagtgtaaacagaaatgaagaaatatgtctttataatacatatactaaataaatatatgtatttttatatatgcttgtatacatacctgtttgcatatttgtaagtgctygaggtaagttcaaggtggaatgggttgaaaggagaatgtttaggttatctgaaataatataaaccaaattcctctcaatttagttaggaggttagaaagctacttcatgaagaatatttttgggacaaattttaaggtaaccttaaaaaagatttgctaatatgtattttcttgtatatcatgtgaacaatcacttcctgaaatttcttagttttatcactacaaaatagtcacaccataaccgccttgtcaaagattttaaatggaaagaaacaaaatataaaaactacaaagaaactgaaatccacagaaacagaaaaaaaattctatatttcattattttaatggatcctaaaatgcgtaagcactttgatagattcttttttatataggatttcctggttttcaaagtatataatgcaacaaaaaagtgaacccagcttctttttttcttgttcattggagctatcacatctcatctatcagacctctaagtagaatttttaaagtggggtactctctcacgcccaagcactatgtaattagcatatgaatgtgtaacggattgtttgaagtaacaattaagggaacaatacataaaggaactgaagagagctaccaacacctgggaatcttgtattgaaaaagctttcttaatgtaagtaattaaaaaccaaggataaatgttcattgtgtagggataaaactctacaaggaaagctaaaattctgctgatgttttgctgttatcctttagaaggaatcattaaaacaagagcttacttttttatttatttcaataaaatgcttgttaaatacaggttttgcatggtatctgatctcctgaagtcaccacaatgcataacaaaaatgtcttacatttctaaaatattcatatttaaaatgtatataaaatgtcaaggaatcttcttcctatggccagtgcagtttcagagaaaatttcaattgattgccaggttaaatcacgtatatagtcaattctttataatttatttgtccaagtaattcctgctaatgaatctgtagcccgctctrttgttttgcactattttgtgtctcttgaaggcaagcatgctatagaggctcctgctgaggcggagcaccttaggagagtaaccagtagctcaggattcttaggaatcgttgatattgagggaggataaatgaagtggaaggcagggaccccgcattatggtttccattttttatcacttgctgcctgtacaaaccacttatgttttttggcataaatcttcttatctctaaaataagaattacttttttctagactgttaagtctcagtcagtaaccttttatggccctttctaatatccagttgtatatattcatttgtaataaagaaactcttaaccccggaatttaacttaaatcagtttagtcttaaataactagcattttatggaacaaccatatttgaaaaataaattgtgagcctaagatttcatttgtaagtagaaagtgaaacaaaaatgtatgaatattcataacagcattgttcataatagccaaaaattagaaacaacacaagtgtctattacttgatgaatggatgaataaaatatggtatattcaattgtcaaaacaaaaattgcaccaaagttaaacaggaaggaaatactttactcaaggctgttgcagtaggggagagaagctggatccgagtctgaactcaacacacatgaagcaaactgggtcaggtttttaagtgctggagtgagcttgtggaaaagaactgcaggacattcagggccataagctatctgtatttgctgattggctttatctaaactacctcttgtcataaagatatgagtttatctaaataaatttaagtttatctaaataaatctaaataaattcatatctttatgacaagaagtagcttttacaacttggagcaaggtgccccactgaagttaggctcctaccctcccacctaaactggaagataaaggtgctgtctctcttgttgattacttttcaaagaggtagttcccaggtccttgagaggtacatttctggattataaagttaccaagtggctaytaaaaagatttacgcctcacaggagtagagaaagaattacaagccgggcacagtggctcacgcctgtaattccagcactttgggaggccaaggcgggcggatcacgaggtctggagttcgagaccagcctgaccaacatagtgaaaccccgtctctactaaaaattcaaaaaaattagccaggcgtggtggcatgckcctgtaatcgcagttactcaggaggctgaggcagaagaatcgcttgaaccggagaggtggaggttgcagtgagctgagatcatgccattgcactccagcctgggctacagagcaagattctgtcaaaaaaaaaaaaaaaaggattacaattacaatattcttaaagtaaattctataataaagggaaatcaagggcctatggtcaagaacaaccctttctaaagtttagtcaaaccaaggggaactttcaggctgtcctggtcaccatatgatagaatattcttggacagtgaaggaggatgatgtattgatacatgctatgccatgtataaacctcaaaagcattatgtgacgtgaaagaaggtggtcgcaaaaggccatgtattgtatcattctgtttatatggaaatgtctagaatagtcaaatctatatagtcaaaaatattagtgttttcctagggctgggggatgggcgtgggtgtggggtggcagctaagggtatggaatttctttttagagtgatgaaaatgttctaaaattgtttgcaggaatgattacaaaacttcgtaaatattctaaaagccattgacttgtacactttaatggatgaattgtgtgatacgtagattatattttaataaaactattgtaaaatatagatttatgttgaaatgtcttatatagccaatagaatatttacttaatatatagatttttacaaatttaaacacaaccaaaacctttatttttccaaagtacgttttggctttggataacctgtgaattttaagtgtgcatttctgatagctggcctgccttttagtttttataaaatagtaacttattaccatgttgtaataatcagatagtatataacatgaaagaaagaaaaataaattctgaaatgtccttgagatatttgcatccaatagagaaaacaaatgtataaagagaataagaagtaatttcatactatataaacagagtgccaatgtatgaatgaataatgttctacaagtacatttgtaaactagctatttgtagctttctctrcagaaacagttctgccatccgcaatcaggttccaaacctatcctgcaaagatttattttacccacartgtagctgaaatgaagtattaatgttagtacagtcagggattaagggacaatcatacaggaaggaggagaatgaatctgaacactcccatttattggaagcaggcatggctcctggcaaaattttgaattatgcagagtgagactggttttcacccatcttcttttgtctatcccttgccccatgttctagatctagagactctctctgggtcatggggcattgactatttttatggccctaagtttcccattgcattacctaactcaagcatctctgttcctccaagtgacaaattcactcacgctatctgacgtaacatttctccgaaacaacatatgaacatttaaattctactttctgaccgcagctaattttgttttgcattaggaaggaagcaaattttgaaagcgtgataaactctgggtacactagaagcattttcagataaaacttggattgtaaacataaaggtatctttaattaataagatttcaggcattagacttagggaatggtaacaaaaatttggaggcatgacaagctgtcctttctgactccagtccctctttggggctgaacccctctaagctgctctttcattacctaaatatgtactttgtttctgcctgaatgtcagcatcctttaaacacaccctctaaaatttgcactagctaccagaactagggcattggagtgtataatataatggtggtggttgaggttgagagaacacattgagaagatgacatggaaaggagtaatcaagaactatttatggtatgaataatttgggcatcttttatttttggacatatatttttctacatactgattacttggtttttcttttttatagattgggctaatggatactacagacaacagagaaaacttgttgaagagattggctggtcctatacaggtaaacatattacttatataatgagatttagcagaaacttttattgttttgtatctatttttatatataaaaggaagctttgtagcacaacacatcatgtcaacttagctaaatggatagttagattaattaatagatatataaaatataaaacgatatcttatgggctttccataaacaaatttggtaatgtagggcttattgacatccacccaaactgtatttgaagctcaggcccaagctgtctatataccttcaagaaataacataacctggggctctgtttttttcaacggtgaaatrgggggctgttctgagcattaaatgagataaataaagtgtgaagcacttgtcacagagcctgcttctaaacagaaagctctcaacaaatgttagctgctggagttgttatgatcatgctaatgattatttttgttcatttaacaaatattgatgggattcttgctctcagaaggggcattcttctgaattactgttgttaatttattggtgttagagtaaaaaatgattttgtcacattactagactttgcctagaacattatgaacatctgaagttggcttgaaatagttacaaccaaaaatcatcagcagaaactctgggagagaaagttctagccctgagtggaagaatatgagtggaatttgggtgaaccatgacatgcctagtaaccatgtgggatggagttgagcattagagttgggtactcattagcagtaaacttgggttgataagataaagtcagattacaagggctttaccatgagcctggccaattttacttaatagatgaagtgcagaagcatgctgaattttgtagataaggatgtattttctttcttctttttaattgctattttaaaagtagtaaatattcattgtagaaaatttagaaataggttcaagtacaaagaaaaacataaaatcattattttatttccctcaggaatagccacttaaaaaactgctatagtccttttagacagtttttattatccaaaatttatatattttatttatagagttatgcatgcagtttactcttaaaattatatttatttcctcattttaatattcctgctgatcatgatagttaatctgcttactaatccattgaataatttttttattatgtaaccacttccttatttttgtatatttaagcttctataagcaatgacagatgaattgacagatagatgtgtttttatttttattacttctgtgctatagaattattgatatgcaattaccgagtaggaaaaaaaaaaaaaaactttcaagccaggtgtggtggctcaagcctgtaatcccagcactttgggaggctgaggtgggtagatcacaaggtcaggagttcgagatcagcctggccaacatggtgaaaacccatctctactaaaaatacaaaaaaattagccaggcatgttggcgcatgcttctaatcccagctacttaggaggctgaggcaggagaattgcttgaacccaggaggcggaggttgcagtgagccgagatcacgccactgcactccagcctgggtgacagagcaagactccatctcaaaaaaaaaataaaaataaaaaataaataaataaataaataaataaatagatttgtgatgcacactgcctaaatgcttcctagatgggttacactcatctgtcatataaatgrctaccccactgtatactacccaagattgatgattgtcatattgaaaatctttatgaattcaacagatttttaaaaatcatgttttgttactttaatttgctttttttttattaccactgaagtcatgattttaattttttattagccatttgcactatacctcttcagtgcaataagttaaattagaacctggaaaacaatcaagatgtttatcagagcaggaagagtgaacaaattaaggcacatctcgactgtggagtactctgcagatgggtatgaggtagacctctgtaatattgtacagaaagacctactattaatttactcatttataataaggacccatacatctataaaatactacttttgatattttaaatcctaaaaaatacataaaagcaaaaattattcataatttgactccattttgaattaaatggaattttcttttttatttttctatgtaaacaaattatacccaatttaataaacatcagcaaactctatttacttgaggaatttcttttttcagaaaacatgaagtttaatcaaaaaggttgttggaccaaagggcctacctatttataatattaacagatatgttcaaattaatttcagaaaattgtgttaaaattatctatttccccacattttcactaacactgactctaaaaatctagtcaatttgattagtcaaaaatggagtctaaattttaatttgtatttccctgattacctacaaatttttctattatgtttttgtatgtactaccaattgggtatatgtttattaaataatgtagtattgtcttttaaaaaactttataattttatatactttataactttacatctgacaattgtaactcattttgtcttcttttcctacgaaagagaaatcctagtattttataaaaatcatgactgttttttaatgcccctaataattatgagaaacatgtcaggagggactaagaatgcttagagtgcatccctaaccatggaagatgacattacaaggtgaaatccttagttttcctggaaaatatctgccagtgtcaccatctgggcaatatttaatgcaggacatctttttaaatgattcatttaaatattgctagttgtggtttcggaatgctacttccaggataagcttttccccaagaggttctttatgagtattaaagttctacatgtttgggccttttatgtttatatttttatttttaattcctaagaatatcacaagccatcttttaaaaattcactattgtgttgtttttaagataatgtttgctccattaagagtaatatataactgctttaaaaacgtgatacatagagatgttatcacagaataaaagtcagcctggtttagttttgtyaacagctaactttctagtttcagaagtgaaactagaaggaggtwattttcctctaaccaatcaattttcaaacagagaactcagatatttaccaagtatgtatgagtaaaatgaaaaacaaactttaatgcaccctccactctccctaaacccagagttagaaaacagaggacctactgcctagggaataagaaaattatagttctcagctccaagcaagggtggatgtatgttgactaatggagtgatggtggtgtgtgtttcccagcagcccagggaccctatgcatcttgggtgtgcctcmtaaggtcaggagaagacaacagttttaccagggtttcagcagatatgatagcaacagcacataccattgtgcaatatcttattatcttaggaggcaaccacagagctgctccttttaatgggctgagtatagacacagcacctatagagtggctaggctttgacagatgggtctttgaagaaacaatgtgtagttctttgctttaaaatcaagttgaatcatcttgctcataacctaaggcctattggctttagcttctttcaggaaagtctagtgatcaaagggatagactcattaaagcgtggtatttgttgtaggggggtggggtggcagatctcaaaaagggatgttccagagtcagggtgaggatggaagcttaccaaagttttttaaagagtgaattgctttatttatattagtgcttcccattggtttggaaaattattcctagaatatttgaggatcctaggaagaaactaaagatgagtacattttacaacccttcgtttagctcaaaactgagatgacataattattttgtctgaattactagactatcaaagagaaaacaaataaatgaaattctttatccaaataaatgtatttcacccaagcaaattacattaaaaccaaacctttaacgtggattattcactataaagtgaattatcactttttatttttaatacaaatatttaaagtttggtagtattttttaatttctatgctatttttccatttagaaaatgaacgactatgctaactgcttgaaataactgtatgaaaataatgaaatgttagtcttatcattcttaaatgtaactaattttgtgaatggcttgaggaaattggacttgaccacattcagttctagtttcaccttaacagtttatcttgttgagctgtatgtttgtattccttcccatattgtctcatcatttaaatttatcaaattagtggcaatcacggaagaaatggcttgcccttgagtgtctgaacatataggattctattaataaaaattactaagtacattataaggcttgtctgyaaaagaactaataagccatttagaaatattacattacacatcaaacattatttaaatgcaatcacttgagctaaagtaattatgaaaaaaattacacaattatgatatatgaagtaacaatgtaaatccccgctggctaccagatgggtggagaaagggaggagaggtaatactcttttagttgtgttttatgcataggttaagaaaaactttctattcaggatgtatgctacaattatgctaagaaatgacagggttggtaaatacagttgacagtcccatttttaaaagttaatataggaggttgagcaaggcttgcttgtcactttgtgatgaaagagtgaattgtaaatctgggaatgtcagcactaagaatctgactctttctgtaacaacttcatttcatttaagggtttcagaaaataaatgtcactcttcctagtaaccttaagttttctatgacaattcctaaacaaagacagttcagtgaaaaaaaaaaaaaaagataaagtgaagtcattttattttttttaatctcatgaacacatagcccaagattatcctaggagatgttaaaaatcttcttttcgagttgttagatctttgattgcaacctcaagcaatgataagatcatcagaaatgggagtactttaactgctttattcttagaagtagtacgacagaaatataatctttattttctggactttaaaaatattatattatttctttttcaccaatctttaaagcagcttgaaattgaaaattttatattgatatgttctcaggtattcttaaaaccttaacacctttaaaattttagttaaagaatgcattcgattcaaataagaaagtatggctgttctggtcacacacaagtctgttatacctcgctggatatgctagaatgagagagtctttaaataycgaattgattctatttctgtaaatagaatatcctgtctaaatagtctttccattttgataactgtatgtagaaaatgctacttatagaaaacaaaaaggccataatttaaggttgtgtatagtatagtttggtgtttggcttttatttttggtttagtgttttatttcttttggcccaggagaaagtaagccaaattttactcagaaagaaaatttgaatccatgtagaataatgacggatttttggcctttctttaacttctataatctagaatatccttttaacatattatattttcctctttgattcaccacttcttatataaacagactgttcctttctaatttccaattgagcagtagaaaagagagttccagaactctaactatagaattatctcatttctgttaaaaaatatgtatttatatggacatagatgaaaggctggaatgatatatactctaccctgttgaccatggttacccctggagagtgagtctctagatgtggatgaaaccataggaggcaggagcttcacttctcactgtatactattcatactggaggaaaaaataatttttgacaaatatgttgacacaaaatattttcaacttaacgtgaaytaattttagcaagaagggcaaaggtagttggacaagaaccgtagcttcgtgtagtcacctgtcaaaatgtagggcctctgcttggctgaatctcagtgagaggatatcacagaccctaacaagagcatggacagtgctcagtgcaggttttctgatcatcattaacctacagactgactaggctgcttaagagctctgcatttcgagcttgcagtgagccgagatcgcgccactgcactctagcctgggcaacaaagcgagactccgtctcaaaaaaaaaaaaaaaaaaaaaaaaagctctgcatttcgattttcccgtttgtaaaatacttcttaataatgcccaacttaattgtgtgcagatcaaatagatgcttcacattgttgcagaaaagctctttgagcaagtacattatgaatccaagtaattattattgaacagtgtcttaacttgatsccaaacagattgaacaagcctgggcccatccrataatctcacaagaggatttagaagtggttgatttgcttgaatggatattatagacagatatttcctatcatctgtagattttttttaaagyttagctaagatttatattctggtcaaactttttctatgctagataatggtgactaaagcaagcctcgttgtggaggctgaacagggttcagttaagtgatctgaaactcagaacctatgtgtattgactctattcatgaaaattgctaagagtagattttaggtgttctcaccacacacacacaaaacagataaggatgtgaggtaacgtatatttgaattagctcaatttagtcattccaccgtgtatccatatttcacaaccacatgtgtatacaataaatatatacaatgtgtgtttgttgatcaaaagataaataaatatgcttaacaattttatttggtcgcaactcttatgtagtatggacttaaaaaaattaagatgtggctacagaatagcatcgcaattagataatcattgtttattttctctgctagtaaaactaaatgctaatgtgtctcccctattaaaaaaaaagttaaaattgcatagattctttmctgagtccagcttcacaagtatcattgctggtagcatctagtagaagcttcaatgggatgggcaagtcctagcagctcagaatgaggaaacttggccccttcttcttctgtctgagctggaactgtctgggctttgtgtrggacgcattgtgcttcttccccttgctgggcctcctttacttcaatctctgtggtttttgtttgttygtttgttcgtttgtttttgtttttgytttttggggttttttttgtttgtttgtttgtttgtttgtttgtttgttttgagaaggagtgtctcactcagtcgcccaggctggagtgcagtggygcaatctcggcttgctgctgcaatctccgcctcccaggttcaagtgattctcctgcctcagcctcctgagtagctgggactacaggcgcccgccaccacatcccggctaattttttgtatttttagtagagatggggtttcaccgtgttagccaggatggtctcaatctcctgacctcgtgatctgcccacctcagcctccccaagtgctgggattacaggtatgagccacctcgcagagcctactctctgtgttctttactcagtagggctctagttcgtgaaatagacacatttcataaaagaaaaagggaagagaaaattacatggctaattaaaagaaatctaagtctaggctgcagtttgyattgtcacacaaaattcacttaaatgtgttacacttttaggcaaaatgccattataataattttatgttgacctgtgttgccctccaatttcatgyatcagtaagggcctagtggaaggcttatttagtttcaatttcctttgttttctgtatggtaattctgactctttaaaccaagaattttcaaggagcaaaaagataaaaaatcattatcaaggagcaaaaagatagaaaaatcatttctattattcagacaaatttttattaagtgaagcatattttaatgactgaggcacagamtcacaaaaattattttgaaatatagtgagacacattttgacttagggattttatttcctttatcccttaggaggaatgtrtatatggctgtttatcctgttatctgtgaataccatgtgacaactaaagaataaaaatatcaaactwttaaagaattaaagttagttttattccraagcctgactgaggactatagactgaggcctatagccgggagcrctgctgctgcacactgttgcagccacggcttttacacaggttgtggaggttcagtatgtgcaaaatcacatcagattcactyaaaagttacgttaaagtagaaacacatcgaggtttgggtgtgagagtctatctaactacagatgactaaagtacattggttatagattacagaagcataaacactaaccccatcagatgttatcttatctgtaagaaaaggcaaagattggggtcatttgtcttctagggaatacagtgacttaggcaagagacgtgggggctttgtgctgtatcctcttttgtcttcaaagcctccctccagagagttgcacattgtcgcagagtcaggagcttgtgaaattacagtggcaaacagaaacgagcaaacatgccttcctacatttaccactttgtctcatacctttttctgcttaagccacatagtgttttgttcagatgagataaccgcttgactgaaccagagctgggccttctcttggctggatgcagaggatcttggagatcgtctgtggcccttactacaccagcatccaaactgttatagactgttatagagcttctaactaccacagaatattctggtatgcttacaacagctgcacgtattcattcttcaattgcataattgtgcaattgcacaattgcacaagtttctttggaagagagggaaacttgaaccctattgagaggtagggtccagaccagaagagccgtgtttgataacctcaggacagtgggcctgttggaagccagaatcaagggagaggcaaggaggagcccctgagagacaggagacagttgggggactgaggaagaaatatggcagcagagactgagggcagagtggagcctggcaccaggaggagcaggttcccagttcattgtgatgcacctggyggctcccctggggccttccccacccagagtgttcctctttctcaaatgcctacatgctttgtcctggaaacaacagagccccagcaactccatagtggggctccytctgaaagaggcagaaatgagaagaggaagatgctgggggttcagcagccgaggtgcatgtggtgcaggcattcagtccaattaaacaggcacccagagtcagggtggagactgatggtctggaggaagaagcagcaaccttcaacaaaatcagattctggtccatgcaagctaaacttcattcccttaggggatgctattcagctccctaatttagtagaataacttctgatgaccaataaaaaggagcctatatacacacaggctgaggagacttagtgtgataagatggtagatgccttctgatcggattccattaatgccgagatccttaaagtgtagagatctgagccattatcttcacaagtattgtaagtgccaatctgatatttttttcccacaaggaaaacacttttttatttatcattataaaagtgtgttcatctaagaaaatcatgtatgtatcatatatttcatattacatatgtttatatatatttatctacctatctattaatatctatctatttatctatataatttcaccttccagagataactactcttaatgtcttctgttggggaaatataattaaaaacaaaatctcccacctcagaaatcctctccataaatgtaataacaacaacaacaaaaagcagttttattatcaaacaagcattaaaccagaatgtaatacacatcataggcaatcactgaaagattgcgaagataggaagaaatctcacccccccatatagccaaataggtacaacccattgcatgttttcaagataaacaataacttgtctttaagtagaaggacttggcagcaactttgtcacacatggttcagctaaactttaactggtaattggagtgactatttgtgttaccctattggcttcatccagagggaaaataaacttcatatttttgagacaagaggtagctttacaagttggagccagaggctcatggaagttaagctcctgccttcccatagaaattgggagagtggagcaccatcttcctcgatgtttgcatttcataaggatggcccccgggtccttgagaaaaacatcctggatcataaagctgacaaagggcctatctagctttcaaaaggattgatatacattgcaaaacaaggagaaagtatttacaacgatctcttttctaaagcaaatgctctttaaaaaaggacggggtgggggtggagagaaaagtgtcttcctggttttcaatggggagaattaagcctcttacttttactttttatttgtccttacacttcctaattatgcatcctgaattctgatggcctcttactagatgtactgcttttatctcaatagtagtacctgcttttatctcaatagtagtttgtgaatatctttctaagtaaatgtaactaaatcagtgtgagggcaacagaaaaaataagcttctaccagggcaaaactttgactatccatgtgtctgaggcagagactcacacatagtaggagcccaatatatatttgatagttgttactttatttccagtctcatggggaacagaaataattttgcctgagaggaattgtgactagtaataacataatttcaggggatcatcccaaatccttcttgcaacaaatagattatacaaaagataaacactgtggagtgagttcagagcaaggcttagcatataagaagtagctaaaaatcgtaatgaattggaaaacagggaaggctgcattttatagtgctttgccacctggaaattgaaacaaaggcagagccacctagaaccagtgccaaagcaaatccaaaacttggcatatgccaaaatatattacctctaaactctgtagtttccattctttcatacttcattagcatatctaggaagtaagatctayttgcagcactttgaaaaaaataaataaatgacatgtagtttttcttttccaagaccctaaaagtttgttcttgaagatcagttgtatttatgcatataacatactcatatatcattcagatttttatgttcagtcaacttgtgttagaatatgaaggagtaaacttctcatcaactccctrgcttgccttctaccttaatgatattttaaacttactgacaaaggaaaatttaaagtgtggatattattagtttaatcaatactcattggattgtacagcgtaagccagacactgtactaggcatcagagatgcagtgatgagtgtaagtaatcacaagtatgcaaacaatagtgattaagcgtgattttttttttaaagcatggtaaatacctcatggagatggtgttaatgtaaggtacrgaaccctaattggcctaagagtttcagggaaggcttaccagagaaagcgactttagattcagataaagcataaataggagttaaatcaacatgggtgaaaaattgtgccaggcaaagggagcagctatcctaagatctgtaggtgaaggagaaatcactgtgctccagcctctaccgcattcttcctgcttttggacagaaaattaggaatgtgatgagacaagcttcttggggcccactgaattaattcccatacacttaccctattgaaaattctggataacaagatttatgccatagtttgattggcaatggcttacattttaactgttgacttctttgcatttaagagatgttaggcatgattttacatcagcacactagttaggaaacgaaaggaaaagggactagtaaaagagtccaaaagagaggggtatgagaaaaggagctttacctactccaagaggggtacagcttcaagttgataggattaatcaacattgtcacacatagttctggggagttcatagtgagataaagactatggacttggatgtattttaatgaagcaggttgtagtggggattcttttgttagtttgtctgatgggaatacaagctccagagacagtcctactctttccttctaatctgggctccatcttacatgtcatcttttttgtcccaaagtttttcacctgtaaaaagaactaatgttagtaccaagctcagcaggtgctgcaatgattacatgtgtaagtatatacaaagcagttagaatagtgtctggtgcatataaagtgctcaataaaattattatttaaagtcagataaatcttctgtcatattcaggacttctgacaggtttatgtccatcacgcaattatctttcaatagtacagatataattatatgattctccccatcacctgccaaatgaaaaaaaaaaaagggctctttagcttggcatataatggctttaatgagctggcccacctatcctgtttcattcctcatsattaccttccccctgcctgctgctataccagccttttcaaaagcaggtctctcygattctgtttataatcctgcctgaatagcagactatgcaccttcttcaagtgaagccttctttcctgactcttcttttctgcaggccagagcacatcccttgctttcatacactgtccctgtccctctctctttgttgcagtgcagcagcataacaggttgcatgtctcactcatcttcccttgttcagaatgtagtacctcatgtgtgctcaggaagtgtgtatggcatgaatggacaaagctacgtggattgagcttttgttttacaaatggagaaataaagagacgtagtcatttgcctagagtcacaaagtaagcagaagactggaaacttggacctgggttttgactcctagggccctggccagagaatttctgtggccacatctgattttttgtttgtttgtttttgtgttgtttaagtgatgtgggaaataatataagatataaagctgttaggctttgagttcttgtgtaaatataaaaacttctggttccaaagccttgtgtatggtcttcttagcctttatgcatgtcttcttaggaaatttgtaagagcagtcatttctggaaagtggaattgcaagtgccctttattttcatctgtttgcttgtccagcatcttctagtttttctagactaaacatatatttgttttataatcaggtgtgggaaaagggagcttaaatgtctaaattaatttttattccaggattattaagagattgtttttgcatcatggaatgtcttctgccttttgatatttcctcattttataatggtccttttatgtatctgaggggcctgtgtctgggcctatttctacttcactgtaccaggtgaacttctttaccaagcaataaagtcagaaatggtatattaatcacctatgtccttaaggagtgataataaatagtaattagtgtgaaaatatattctcttaggaaaacggtcatattatacatttgcattttatctggacttcatctagccaggattccactgagggcacttaaaggatcacacaacttgattttcttctctgctgtgacacaatagcctcactttgcattcgtttcacaatctgggatcattatccaagctcagtragaatcaatttctcatagatgattgcctgaatcactgccagctcagccacattttttacatcatttaccaggaagtatagtttttaaaaagtcagaacaattgtgcaggtaacccagaacctgaatatgccctcaaaatattcttcagaggggtcacccacccctgaaactcaaagtcttctgcaaattgattgacaatgttactgacctgtaaatcaaaggattccccatttcaattcaccattttctaagtgagtctctattgacatgaaagagttcattctcttttgaaagaaaagttcatctttagagagcagcctcaattgtttgctttttagcagaataattacatctttaatttctgtggagataatgaagaaagccagtttaggatatatttatgaggtttcagagtatatttggggagaaaattctataacttttaaatatgattctttagcttcaaaacgtacatgtttaggtaaattgcaataactgttttactttcatttatggtgattgcttgttcatgcttgagcacaagagagaaagcttgatttaaaacgtaagtctcattgatgagtttttatgccaccatcattttaaaaagtaaatttagtagaaagctaattttggcatataatgcaaattcctctactttatctggccttcatttaatgattttggagttatcactgcaaggtgtttatatagattagataccacagagatctaaggaactatatttatttgatcctaattaatatttggccttaaatagatagtcacaccactttccaatttcctaattttaagcaattaaacagctagcagctgttggccagataaatattaaactttgccaagtagatatatgcaagttttttaaccatatttggactatattagaatagattacaaaatgtgttgacatcatatactttagaagattgtatgttacaggttcatactgaacaattatttattatctgtttggtattgttaaaactcatgctaaaatatcatggatagttgtatactatctatgcatgccggctcatagtatgtgaagacacatcaaataaaaactcctatgastatctttacaagcgtgctttgtatttaaataacattaaagataattaaatattgtgttagtgaggaactttatttccttatttggaatattcttaaacttttacagtatgttctttttttgacagtgaaattgtcaaatgagcaatcacaatgataaagaatgaaaccataagtagtgtagaatgtatttatgtatttatttatttttttgagatggagtctctatcgcccaggctggagtgcagtggcgcgatctcggctcactrcaagctccacctcccgggttcacgccattctcctgcctcagcctcccaagtagctgggactacaggtgcccgccaccatgcccggctaatttttttttgtatttttagtagagatggggctttaccgtgttagccaggatggtctcgatytcctgacctcgtgatcctcccgcctcggcctcccaacgtgctgggattacaggcgtgagccactgcgcccggccaataatggagaatttaaagcagtggttcctaaattttagagaccatcagaattacctggagggcttactgaaaaaagattactggtcctgattttcagagtttctgattcagtaaatctgagatagaagccacaaatttaatgtctaacaaattctcaggtgttcctgatactgcagatctgaggagccaaacgttgcagtgtctagactctaggtcaatctcagcttatgttatcttaatttggggaatgaatgaatgatggagtgaagaagagaaagcacatgcatgaatatatttatttgtgtaaaagtgcttcagctctctggatgaggtatattgacatttaaaaagtagcagtattgcctcagtgtaacatgtaacaacattgaaaatgctattttcaaaagctgctatctgcatcaatagagatgagttaagtttttggacaatttttaatgcaacttgcattaatttccccatctggatggggcctctttacctacatagggaaattcctggcctaggtggatccagcaaatccttcattactgaatctggctgtaagttatctttaccttacactactcttgacacatttatccctagcaatttccaaggaaatttccttttttataatctttgtatttacctgactccagaagatcctgggtcctgaaaatattaagattgtgtttttcattcttatatatatatttttaagtttttaaagcctggtagtagagtccttttaaattgtgttgttaataatcctaataataataatttccttctaatatttttggctgttggtaatgtaatttatgggtatatccaaaatttttaaaataggatctgaatatttctggatttctattcagtaaaagttgttattcattctttgcttcagtagctgtttggagttaaacaactcatgtaattgtcacttttcaagtcaataatgtaaaccccacaggacaaattattttagtgccatacttacagattacatttttttttttaaagacagtcttgtcttgctctgtctcccaggctggagtgcagtggggtgatctcagctcactgcaacctctgcctttcaggttcaagcaattctcctgcctcagcctcccgagtagctgggactacaggcaggcaccaccatgtccagctaatttttatatttttagtagagacggggtttcaacatgttggccaggctggtttctcactcctgacctcaggtaatccacctgattyggcctcctttagcgctggaattacagcgcaagccaccatacccggcccagattacattttttgtcattgggctccattttkcttgaaatttagtctgtaaccctggggagtatgtttgaaagttttaatagttgtccaaaaaaatgttatctgtcagttcccattactctagcagaggatttatttgaaaatctcataatgaatggtagagcctgcatttgttgtgtaataatttcattcacttattcatatattcaacacatcttaattaagcactcctatctgccagcagaaaataaaaaagactaagtgccccagatggagcttgaattctaaaataacagagaacaaatatctataggtaaaggaaatgactcacagtgacacattaaactatactgtgtaagatgcagtctcattcatgaatattgagtacagtcattttagactattattctctggagatattctagaattatagagattaaaaccattgatacatgtagatcaacagctactaaattttgaagatcaagccattgtctttttttaagtaggtaatttttttggtacattttcaaagttgtaagttttgcaaattcatttttttatttttcatttcctcagactcaatattcccccttggcttaggaggattcacagtatacctccaggttacatgagtagctccaatcaagccatgcctaataatgagctagttcatgtggggaactcctgaaaaatgactgagctcatcccagttctcacagatatttgcaaccagtcatacctacttctcctttaaattctgtacctcttcttatacacaccctagagacagtgtgccaagcataacatcttaatctatgcccaatgcaagaaggaattctctctctttttaaagccatggaaaactcctcgtagtttaaagacagcctcttctccacctccctaggaagaatgttagacttagtgatggggtaattttctcaaaagtttgtaaaaaagcagcttgtcattttggtcatattattaccattaagtacaggaagttaccttcagagtagaattcagtaggcaccattccctaagtgtaaatctccttcactcattaaaagttctgcaccacacccacactgtatatagtattggaagttgctcaggagtcttggctgctagtaagagaagcctgagaagtactcatgctctgatctgagtgggaaatagttgttcagtgctcttgaaattgaaacaagaattttctttcaaccagagaaatgggaaagganttagtgattgcctgtaaaaacctaaggaactgttcaactatatagagccactgtttggccgcatggaggatcttaacacatccctaggtattcctgtatgtggtaataaccacagacatgggaacagcttttgaatcctaagacctgtaccccagtgaatataatgagagagaatataagtcaragagggaattcaaattgttcctctgggagcctgagaaatgtaaaaaactggtttactccctatactaatcctaaaaacagttgtcatcactcttaattcatttcctggaaaagagacaactgacaacaaagtagcgagaaggtcccatagagctccaataaacagtggtagtaatattttgtatcctgttgaacaaaataggaaaccttgagttcaaattaatataaattgagaattgaaaaaaataaatttaatgaagaatgagatattgctataacttcaaaatacctcccctcaaaatactttctaattacaagacagagaataatattgcagtggaaagcctgacagatrctttaatcaagtgatcaaagtaaacgtcagcaaaaattacctttacagagatcctgtaccactgactaagatacagtgagaagaaaagagcatattttttgtgacgtttctaataaaaatgsataacctgaagagacatcagacaaactcaaattgagggacattctataaaataactgtagtcttcaaaaggattgagattacgaaagtcgagaagagatggaggaactgtgtcagattgaacgagagaggacaagtaaaggcaacatgtgttactgaatggaaacttattccctaaaggttattatattggcaatatctgaacgaagcataaggactccatggtactaatgttatcaatgttaatttccttattttgaagagtatattgtgattatataggaaaatattcttgtccttaagaagctcaggctgaagtactcagtgtcagtgggatgttggcactattcactccagtggttcaagaaaaaaaagtctgttctgtacttgaaccttttctctaagtttaaaattataaaaaaaaaaagatatacaacaattacttaataggacttgcattttaaaagagaagtacaagttgaagaaggttaaaatgaagccttttaatatttaactccatagtcctatgtgttgctctgctatgctgacgatgcatgaaaattttaattgcttaataagaaagaaagggaaagataatatcatagagctcacaaatatgagcctaccaaagcagaaattagattatactagtttcaactattgaattaccctgtagtttaaattgaaaaacaaagataaatcaattagtaattctatatccagtttaatgatttttccataaaaattatttggcttataaaacaatacaaaagtctaagaaatatatcatttaatatgggcttccctttattcatgtctgccagcggttctaactaaaataaatggaagcrggatgttgcactgaggatttgctttgtagctctttaccagtttattagcctctatttgaagattttttttttatgaggccaaatccagactaaattaaatagatctggcatggtaacatatcattttgggttctaaataagtgattccttttaatgtgcatactgaaattttctcacatgacaaactgggacacatgaaatggaatttcacgcactattgaactgaattctcrgtagctgctgtgaaatgtttggggagttttagtggatttatccattttagtgaccatatttcccctcacatttgtgaaatgcattttgctgttattttagttattctgaaaatgtgaattcatttacctgcctgttcagagaacaggcatgagagctaagggaaatgatgataagcacaataacaacaacaaatacaggtgatattcactaatttattcattcaatactaactacagggactaatattgaatgaataaattggtgagtatcacctgtctgttaacagaacaggtaagtaagtacctgctctaattaagcttacattctattagaaagaaaaagaccaaaaaaagcaaataaataaataattgcagagtatgatagctattgtgaaaagaataaacctggccaaacatggtggctcatgcctgttatcctagcgctctgggaggctgaggcagcgggatctcttgagcccagtagttcaagactagcctgggcaatgcagtgaaaccccatgtctattttagaaatataaataaataagaataaacatgttgatatgatagacaatagcttagcaaaggtggggaggacctttccaaatgggagacatttcatctgaggtatgaagaaagaaaagtagccatctggtgacaagtagaggatgaatgtttcaggcaagggcagggaaagtgcgaaggcactgagataagaaaagtggctgcttatggaagagaaagcagagtgtgataaaatggagagtccagcagccattattttgttatttaaacctcacagtgatgctgtgaggttggtcctcatacaatccatttttttttttttttaggtaatattcctgaggaatagagaagtgaagagacttactcaaggttatttgttgataaatggtagagacagtgttttcacccagaaagtgtgacttcagaacccatgcattctgaacattatatagtgttacttcctgtgaaccctaaaaatgtgagacaggtctcagttaatttaaaaagtttatcttgccagggttgaggatgcaagcccataacacagcctcaggaggtcccgatgtgcccaaggtggtcagagcacagtctggctttatacattctagggagacataggacatcagtcaacacacacaagatgaacattggttctgtctggaaaggtgggacaactcgaagcaaaggtgggaagactggaagcaaggagggggcttctaggtcataggtagaaaagagacaaatggctgcattattgtgagtttcttattagcctccccaaaggagacaatcagatatgcatttatctcagtgagcagaggggtgactttaattagaaggggaggtaggttggccctaagcagttcccagcttgacttttccctttagtttagtgatttgggggccccaagttttttttcctttcacatttcccaaagaaagtaccacgcacatatgaattactgttgttataatgataaagttgaaggcatgttttatagcctagaaaactcatctatattatcatattttgctccattcaaaatactgtgcccaactctaggtgctaaactttaaaaagattatggacaaatcggagagtatttggcagaaggccccttgattggtagaatcttgacatatgaggagcagttttgactgtatcatgaaaaagataaggctcaggaaactacaaggtggtcagagcacagtttggctttatacattctagggagacatgggacatcaatgccagtattgatatatttatggggccttcatatggaaaaataactaagcattttggatggcccccagtaggtacaatttggagagaaatataaaagctacagaaacctactttgatagaggaaatattttttttcacattgaaaaatccaaaattggaataaagtattctgggagagatagagactccaatatcaaaggtatttaaatataagtagaaaaacctgttattgagagtgtcctatagtgaattcaagcaataatgggtaattgaactgtattagcccattttcatgctgctgataaagacatacccgmgactaagcaatttacaaacgaaagaggtttaattggacttacagttccacatggctggggaagcctcacaattatggcggaaggcaaggatgaccaagtcacatcttacatggatggtggcaggcaaaaaatgagagagcttgtgcaggagaatgcctgcttttaaaaccatcaggtctcatgagacttattcactatcactagaacagcataggaaagacttgcccccatgattaaattacctgccaccaggtctcttccacaacacatgggaattcaagatgagacttgggtggggacacagacaaaccatgtcaggaactaatgtggtttttcccaatcctgaaattctttgatggacaagttatcatcagaagacaggataatcagaaytcaacatacttgatttgacagagcatggaatagaaacctgatgccagatagtgataaagaagcaaagtaaaatccaagatagtaggcttgcaatgaaatacagaaactgccatgtcttctctagttatcaaggggactggtgatctggctcagactagaaagcgggagtagccctgccctgccttagtaagtatgtatgcaaatttctacactgaatattatctcctcttcaaaacctatactgagaccccagggaagtgatcatgtgcacaatccttattagattacctgtaattctcgttgcattgatttgtttatctgtatgtcttcttcttttagcccttagtctcactgaaagaaaattcatatttgtattttcagacttaggagtgttactagaaaatatgtaataactaatacaacaagtagcagactgttgaatatccagggaataagagaagttcaaacaaagtcaaatttagaaacagaacgtatttgtggccataatttattttctaattacccatcaaagttatagatatgtatgctttgaatatggtatcagaagactaagtcataaaatataattttgatttagaagattataagatccaaatgagtcaatacaaggcatgaggaattatgatcaaattagattttagatctggaagatttcttccattttatgttctagagttctaccaagtgaaatcacaatgaattaattgagaataaatgttttattccaaatcagtttgtcagtttttatagagatatgatctagaatcaacttatttgaaacttccaaaattttagttcaatttcttaaacaaaggatactgctgtcttcttggagctgagagagatacaacctcattgctactagcattacctttaccacagaagaaaaaatactttgtaataatttttgatattactagtatcacttttaaaagttttattttgagtagtgaaaaagagtgatttatttgaagaaatgtcctaatatgactctgatgtgaacacctttcagaagtgtggtgtttattatttggtagtggcaaatgtgaaaacataggcattgcattcactaaactatagcgaacagagaatttgctgacctgtaagtgcattgttgacttttaccttgtccttaactttgacccttcctcagtattaatgagttaaaaatgtctcaaacaggtgtcagctggggttctcaacctttcaaagatgtgagttatgctcaaaagccagcctgcctcttcatctcctcaaattccactacctgtagaagtcctaagccctccttagaatttctgtgacttctcaggggttttcacttcttagtgcctgcttcacttcctttgccccagcttcctgataaaccttctctgtccagttaaacaaaggcaaggaacctsctcatccaaaaagagaaactacttaaatatactgttactgaatagactgttagagaatcttcccctgggctgaaaaagtagacacaagtttagatacctttaaatccatgcgagtgtatttwtttatttattttwttttttttgagacggagtctcgctctgtcgcccaggctggagtgcagtgacgcgatctcggctcactgcaagctccgcctcccgggttcacgccattctcctgcctcagcctcccgagtagctgggactacaggcgcccaccaccatgcctggctaatyttttgtatttttagtagagacagggtttcaccgtgttagcgagcatggtctgtatctcctgacctcgtgattggccggcctcggcctcccaaagtgctgggattacaggcgtgagtcaccgcgcccggtgagtgttttttttgtttgtttgtttttggttttttttagcataataaagacttgaaggtagctggcacctgtaattccagtgctttgggagaccaagacaggaagattgcttgaggccagaagtagaagaccatcctgggcaacayagagagactctatatctacaaaagaattttaaaaattagctaggcgtggtggcacatgcctgtagtctcagctacttgggagactgaggcagtagaatcacttgagcccaggagttcaaggcttcagtgagctacagtcactccactgcattccagcctgtgtgacagaatgagcactgtctcaaaaaaaagaaaagaaaagaaaagaaaagttttgaagaatcaatttattaaaaatcaaatatagttggctttcataatgagtttaataatttactttgagattaataatcccttggcaatgactcctaacattttagtttaaagcttttctcttagcctttttatgtatacatttaaagagcagaggcacatgctaatataatgaactattgcaatgagtctatttgcaatgtaagctgatgatcagcttgttttagctgatttataaattgccaygtaccagaattacttatactaaaacacataatttaaacatcatccttaagaaatgagatagaaaaaaggaaaagggtcagtattcaggcttctgccctgcttatgagtctcttgattgacactaattaaaaaaaaaataagtggaaattcaggaaagaggttagaggcagcaataggcaagctgtttaatgtcacatttgaaaaaattatctctaattcttgaagtcacttttaagattttaaaaagtcaagccataaatttgctatctttaaataggagtttggtttaattatcacttaagcacttttttactttctcattttaggtctttaatttgggtattaatttttcatctattttatatttcacaggttgtattgctctcattagactgtttgttacaaattgcttgtgaagaaatacattttaggtgtcataattttcctcaaatgatatctgtatgagtgtctatcaaactttcacttggtttgaaaagacaatgatgcaatagtcagactgggaaaaggtagatgaatggaaaaggcaaacaggtctttatgaaaaacaatgcagatgatctctggtgtcacataatgtttattattattcagctatgtacatacttgaaaagatccattgtcattaaattattttttatgtcagcctttattatcactttgcaatacaaagaaagcaaggtgaagactaacttttctcttgtacagaatcatcaggctaaatttttggcattatttcagtccttggagacatctgagagattccgggatgccagtggtgcctctctgkccacactgacaacaaataattcacctaaggaatagttcacttcagctattttttgctactcattggttgtcagtgccattgaggagagctcagtgtagatcaaagaaaacggtgtagatcaaagaaaacggtgattcggtgattgttccccttcttcccagccacccaccatctgaacctaatgcatcattgtacaatggccgtaaaggatgacaagggactcagcaatcagttcctggaggaaatgatgctgtggcttttggctggtggcaccatcatcctcagtcatcagtcagagtcatcaaagtgatcattcatccattcactccctcctctgtctccaccccacagctaatcaactaaccagttctgaattttttctcaaatattaaatcttaacttttaaatctttctcaaatctatctttcttcttatctctgccctagtttagatccgtaataatcttcaccttaccaattggtagaaccttctaactgacctatctccttcagttttgtcttccttaactctgtaaccacagttacttccataaaatttaaatatgaccgtgacacttgcatcttaaacaccttcaatagcttactggaaaaattttaaagcccttgttctggcatgcaaagcccccaaatttttccatttattcttacagcccctccactcactgccttgcattccatgtctgagcacatagaacctcctactattcttcccaaacagccatgcactctgtcttcctagatgccttcagccatgaatttcttccttaccttcagttggatacctgtttattgagacttatttcaagtaccttttttatctagaaagccttacttgtctcatatcccatctgggttaggtatctctctttggtgtccctggaataccctatgcatatttctgctattatattcattagattatattataattgacagtttttatatctttggttctcactagaacatgagttctttgatgatggcacttttattcatctttgaatcttttgtaccaggtagatattctgtctcacactagacacatcataaatatttgataaattagtaaacaaatgaacaaataaaagctgcaatcagcagcgttaagttttcatgggatctgtggataatataaaatacagaattcccagctgtggcagcagatttattgctatcataatggatccacagcttctttcttgttccttgaatgtgaccagtaacaatgcacctaggagatctgatgtaagagtattctgtgataagtgtatacagaaaggaggaaccgatgactcaaataggaatcaagccagaagcttctgccatatgggcagcatggacttcaaccaaaacaatgaaacaktgctgtggtttagcagaggtcctaccatgaatagaaggataccaggttgccactgtgtctcagactgcawctctgtgtcrttgacccttttaccaaaggtaggaaacagagctgtagtcatgccccatatctataataagtatgtggataataagcatcgagtacagccctgatggtagtgtcactgtcagagacttgtgttgttttccattgcactgctatttctgtgctatgagaacttagctcatcagttattgaagaagggggaaagttaatgaccacaagagggcttatgatgaccctaaggcaactttcagagctattctgcaagaagagagatttttatttcccaaaccagggggtaatttccaccagggckttgtttgtttgtttgtttgtttgtttgtttgttttgttctgcatttgccgtctcattggtaataacaagactgcagcaacaaaggaaagaaatctcacyccatttctctcataattccataaatagtttgcctgcctttcattgagggcagttagttaacattgaggrcagctagttaacagcaagagctacagaaaagtcctgtaattaatcaacctgcattgccttcagtctgaatctgagtattaaaattcagtaggtgcaattagacagaatcaggcaaatataaaggtcataacattagtcacagtgtcaccttatttctgagccttttctttcttctgaagtrgtgtcttgtcagtggggtgatagagcaacaagaactctctgttgttatgggagtttgttaaattttatctgcgatttttccaattttaattaaatacttgataccaggctgcagcaacagaaacactgctgtattgggtttcagcactatcactctatcatcttataatttaaagtgaaagataggaggactttggggttctgacggtttgatagctttttaaaaattacctttctttccccataccagattagagatgggggtggtggggagagagcttcascatcctctcgccagaacttccggttctctagctttttatacatcctactcacactcgtcctactgatttccacttaggactgcaactacccgtcctctctgcttgtccatcaggaatattgactttcccaaacatttcttaaaaattgaaaagttaaaccaaaaatacacacttttattttcttatttttattttttctaagccaaactgtatccagctttattaaagacactttccataaacaatcctggaatttcagtcaggacatgggcagacaattattaacagtatacaacaactttcaaaaatccttctctaatggactaccaaaaatcagaaagccactataaaactcaatgaagtcttcatctgatgcactgagcagggaaagttttgagtgagggttgacatttcacatttagcatgtttttaacaacttttcacaaccgaccctgactttcagaaatgaaatgaaartggcagaatttatttgaagattcacaatctagaaacataaccactgctcttttgaggcacgccatctcagtggcaccactggaaagtccagattgcctgatgcattggtgaccaattaatgggattccggtcccaacagatgtctgggtttaagggagttaagtctatgctggaaggtggaaagggagaagaaaacataagaactaatttgttttccataccacaaggcttttgcaccaaggtggccatgtatgtcaaagtcaggaaatctttcctcctgggaaccaagaggaagtctctcaaaactagaagggaaaggtgtttcacacatcaatccagatttggagacatttattagtgacatatgctccttcccccccaaaaaacaataatgaaatgttgtgtcttaacaacatagcttaaaaaaaaagtaaaacaaaattctgcatttttataaaacttgataaaaatatttcaaactgtacggtcaccagtgcacagttatcaaaaatgcrcacacttcgcttggcatttccagcaccttcagctttctgtgcctggtctccatttctgcagggttattcccctccttgccagtatcatcttttccctttttccctctgggtaccttctgtcccttctttgcagggcctttttaggcctgggctctggctttggaggagcaggtttagcagacaatctcgcggatcttctctgtggttcatccttcactttggctgtatctcctttcgcatccccttcagcctttctcttgggcatggtggcggcgatggtggtgggatgtaggtgctgggtgtgggatgcagctgggcacggaatgcagcgttgcacgagctttggtctgtccwggggtcattctcaccactgcttcttccaatacacacttttaaatggtgcttctatggtctcccacatcaggagagccctcagtgctttccctcagcctaaaagtccacgattttattcttcactatttcctcaagcctattctcacacctgctcctcccttgcagtgaatgatactgattccagtttttctgagaaaatagggaaaggcgctgaaaagattgtactgtctgcctgcccatttacatatattatctgatttaatttgcacagtctgagatgtggagattattctttcttttacagataaggtaactgaggctcatgtaagtggtggtgctgagactgagctcatgttagttcaactgccaaacttctcctcccatgtgatgggatgcagctgtaaaacagaaatactagggcatgaacatcagatttctcacttccctattctaaatatagctaaatccatatgaatacatattccatgactctcttgtgcttctttcctccgttaggctaataatagtctattcatgctttgttttttctcttttgggatatttgatcatcaactttccataacttcaaactctttcttttaataattctttcctctcaatatatacacatacttatgtttccctctgtcttaaaaaaatccatttctcatccttgcgtctgtctctgtgtgccaccttatcatccttctttcgttcacagcaaactgtttttaaaaagtgctttaattctactggttccctctaattcactctgtagtcygaattgcaagtctatcatttcacggaaattgatttattctatgaatgtggggtttggagttgggaaataaccaaatccaaactcattcttcactcatgacacttagacggtctctgctgtgtatgatacccactttgggatactcattgttgaaaccatgtttctatgactttcatgataccattttctcctgggtttgcaattccctttcaggccactcattcttaagtccatttggtgccactgctcccctttatgctgcctaaatgttagtgctttccaccatcttatcactgatcctcttcttgcttgtcaactttgattgaagtatttcacccatatctgtggttataaatgtatgctatctgtacactgatgttccccagaccagtgcctcccagacccatattttttgttgtttaatgaacttccattgaaatttccaagtctgcaggttcaaaacgaaattcaaagtctttctattcataatctctaccaacgtgactggtaccatgatacactcaggtatgtccccgtcgggattttagaagtcatcctttgccattctcccttcctcactcccaaataagaatcctctgraacattcctaaccttcaaaatgacatcttttgttgttgttgttgttgtttttgagacagagtctcactctgttgcccaggctggagtgcagtggcacaatctcagctcactgcaacctccgcctcccaggttcaagccattctcctgcctcagcctcctgagtagctgggactacaggtgcccaccaccatggctggctaattttttgtatttttagtagaggcggggtttcaccatgttagccaggatggtctcaatctcctgacctcgtgatccgcccgtctcggcctcccaaagtgctsggattacaggcatgagccaccacgcccggcccctagttaatgactttcttaaatatcataatgctaaaaggaatttgtgctagaattttcctaaataaattgataactaccttctctgacctgtaaccccctgccaatwgcatatatcagccagacttgaaaagattttttgctgtcctgatgtgattgtcccattagtacagaaaacaaaggaaaatgtagtttgacgaaacaggttctcattctgaaattgtttgcatttgatctgcctttatttcagttttaatagcagctataatcaacgttgggcaactgctttgctctttctagctgcagaaacctctggccaaaaacacaaaaaggcacactgatttgtgcatggaaacacatcctcattcttattttcaacatgagaagttgtcacagacatccctcttcctttgctttgagtcagtttatgtgatggcatttatcattaagacatataatctgttagtgattgttattcagcagcttttggttttagtttcttatctttgaggaagccccttttttcaaacagctaactcttgcatctaaaaagtgtcttcttaagtatatcatctttccattttgctggaattctaaattttatgctacttatcattgaaaaaatactgaattacttcrtttttgtattttattaaactaaaatttgaatccaagtcactcaccactgatagctttatactgtttaaatgactttttaattttggtgtttgggtatgtttgttagcatgtagaaagcaagcccarggtaatttataaagctatgacttacagtgtatggagcactaagtagagtttattcaaggcaactggtgctagatgctatgaagattactgtagtcttcacttcaatattacacttattttgccttttcagaatatttttatatgtgaatatgtggagacacattctttttgaggcggtgtcttgctctgtcacccaggctggggtacagtggcatgctctcggctcactgcaacctccgcctcccaggttccagggattctcctgcctcagcctcccgattagctgtaattacgggcgtgcgccaacacgcctggctaatttttttgtatttttagtacagatggggtttcactatgttggccaggctcgtctcaaactcctgacctcaggtgatctgcccatcttggcctcccaaagtgctgggattacaggtgtgagccacccacgcctagctgagacacaaacattttcttacctcaaaacctggactacacaagaaattcattaagaatgaaagtaatatatattttttcttaacaatatcttgatctttaaagaatcagttctatgtatactgttattaaaatctgattaaatagcaatttataggaatctttaaaagaaatcaacattgagatttttattatatatctattaattttcagtggatctctgctgaataacttacaaacaattataattatttttccattaatctgatatttgaaggtaagactcaacaagaacaatgcaaaaatgagagaaaataagagggaaacattaatttttttctttgacttttatttcatctgcataatttaatcattttttccttcaaatattcaaaaacctgcattggtatttttttctgacacatttcccctgttagactttagtttttcttagttcatattcttgtgttaatggctggtggagtaacgtttcctcacacacaatgttttttaaggtatgtttctatctggaacactaattggtcaaatatgtatagcacatgaacattaaagggtgctaactacggttatctcactgaagcattttttttttttgtcgttcagcaaacgttgatttaattcttaagtgccaggctctaagaaaggtactgaaacattttcttccattaaagaaacataaataagagacagacatattgtagtttaaataagtacagtgatgctgtaaaaatcaaattaagacaaataggagatgtctatgaaaatggtcattacgcagcctctcccttcctgcctatcctgcattcctgcctgcttagtttctctgatgagacatctatgagctccttcctcttccaaagcctccctgcctctcactggtctccccaggcacatggatcataatctgcctttctgtctccctctgtagaatacccctgcattcactctgctcattggactaagctggcctgctcactgctgtcagcattgcctgaacttttctgccaccatgagtttgctcaggctcatcattcagcaagatatgtgcttggtttctcctctgcctgtcataattctgtccatccttcaaggcctgcattagtgtgtcttgttatccatgtttactttccttcattgcatctactcctttttagcatttgtctatttatttaacagacccccacccttctggaatgtaataataaacacacaggcaagctaacaaacttgaactcatgcgtatcccctgcggagcctagaattgctttccattccgcttggaatagaggatgcatacgtatgcaaatattgaagacattcatttgatgcacaaagtctatttcacaagcatttaatttctaacatatgccagactcagagtttggcaatggcatgtagatgaaataggcmagttaacagacaaaatacagtatgttaagtgcttcagtggaggtaagcatgggaaatttataggagtgttactaattcaggtaagtcaatgagtggatgaaagcatggataaatatgtaaatgaataacttaggttaattctctggagctcctatttagtattctgctgtcctctttatgtgttaatcagcctgataatctgctgcaactacaggcagtgtcctaatttcttccttcacaatagttcctaataacactcaggtggctacaatatagtgaattctgtatacctgctttctcagatgcatcatcctggcctttaaccactatatgaactgatgtctccagttgccacattaaacatattaatttgggaattcaaaaaagtaatgtttaaggccaggcacagtggttcacacctgtaatcccagcatttgggaggctgaggcgggaggatcacaaggtcaggagttcaagaccagcctggccaacatggtgaaaccctgtttctactaaaaatacaaaaagttagctgggcgtggtggcacttgcctgtaatcccagctactcaggaggctgagacaggagaatcacttgaacccaggaggcagaggttagagtgagcagagattgcaccactgcactccagcctgggcaatagagagatgctctgtctcaaaataataataataataataataataataataatgttttagaataagattagtctaatgtttcattattaaagcagataaaatgtatttaatggttcttttgtctttgttttattcctgtgcacaattttttttttgagacagtcttgctctgttgcccaggctggagtgcagtggtgcaatcttggctcactgcaacctccacctctcaggttcaagcaattcttctgtctcagcctcctgagtagctgggattacaggcacgcatcaccatacccagctaatttttgtattttttagtagagatggggtttcaccatattggccaggctggtctcgaactcctgacctcgtgatccgcccacctcggcctcccaaagtgctgggattacaggtgtgagtcaccacacccagctcctgtgcacaatattaacacttcactagtttatttcctttgtttttctactcgtggtgatttgaaacagtctttcttttagagtgctttgcatgaagaatctcaagttcttattttttcaacttctgtttatttttctgtttgttggtttttccactaaaaaaaaaatcattttttaagttttattttggcctcttttattttgctttttaatcatgaaaattaagaaagcatgttgagcccacaaggtactaagtactattgttgacagctgaagtgatacctcagttcttcttggtttaaaatagtttaaacaagagctacacagcaaaggaggtgtagcatagagtartttattacaatggataaagatattttgaaagttaggtgcagaataaacagtataccctgagagagaaagaagtcaggacaggctgcttgtaagggtgagacagcaaaaactggcactagggagacacccttttagggagttttaggtggggacacagccaaaccatatcagacacctactatgtgtcattcgttttttcttcagtgcttggatgttgaaataatgaataagcataagactccctttttgggagttttaaaagatgattcataaggaggtgggaagaggtgttactagtaagcatgttctgggtggtcttctggtgcacatgtgcagtaactgtacatgcttgttcatatgttgcatgtytcattagcatcttaaaactccacccaggggtgtggtttttactattataatgagcatagggtcagtttggggacaggtaaaatcaaaatatgcatgctctctagaagggaaaggccctattgaagatagctttgcttgaatgagctcaattacaatgcaaatactgaggtttattgtgctgactgtatgatcaccatggttgccccatcccaagaacatggtcacttccttgactgcctatcctgcctcactatgatctagtaggtgatttaaatttggtccacactcagtgtaatcattccatgcactttaaacataatctagttacctggtgtcattgcgctatatgttgtcctaacctcgtgtagttcagacttcaggtatctctgatacctagccataaaagtttagtagggactactcaactaaattatcatgtaacaatcaaatgagacctacagctgagtaaagaaatgcttctcttattgatcaaatttttttggttattttttcattttcatgccatgttatatttgatccttacgagctcaaactcataaaacaaaaggccaccacttcttgttggtttgattcagttattcaacaaatgtttattgaacactgtataagttcattctcatgctgctataaggacatacctgagactgggtaatttataaaggaaagaagtttaattgactcacaattccgcagggctggggaggcctcgggaaacttacaatcatggtataaagggaagcaaatatgtctttcttcacaagacagcaggagagagaagaatcagagtcaagcgaagggggaagccccttataaaaccagaagatctcatgagaactaactcactgtcatgagtacaggatgggggaaaccgcctcaatgattcaattgtctccacgtggtccctcccatgacatgtggggattatggggactacaattcaagatgagatttgggtggggacacagccaaaccatatcaaacaccgactatgtgctagtcttttttttttctgaagtactgggatgtagaaacaatgaatragcataattaatatgttaaragaagaaaaatgaagcagggagagggcaaggagagttaccaagggaggaagtatactatttaacagggtggttcagcgaaagtctctcctgtaratgcttttgaggagagatttgattgaagttagaaagcaagtcatttgagccttacagacatctgtggagagtattgcgggaataggtgatagccagtgtcaagcttttgcatgctcaagggacagaatggaagccagtgtggctggagcagagtgatcaaagcagaatggtagagaaccggagcagagaggacatgagcggggacatcatataggatctgttggccataacaaggagctcatgttttattttgagtgagatgaaatagcattgtagccaaggagtaatgtgatctggcatatatttttaaagtgtactttagttactgagttgaattggttttcttttgctgcataacaaattactacaaatttaccaccttataatactgcatatgtgttatcacacagtttctgtgggtcaggagctgaggaggaagggctgcttagctggcttttctgcttagggtctcacaaatctgaaattaaggtgtctcatttgaagcctggggtcctcttccaaattcacttaggttgttggcagaattcacttcctggaagttgtaggactaaagtccctgatttttgttgttgtgtgtttgtttgtttgtttgtttgtttcactggttgggtgttttttgttttttgtttttgtgattataagcctggttatgctctcagctcccagaggcaggtctcagttcttagccacacgccagctcacaacctggtaggtcacttctccaaaactagcaaggaaatctcctacattttgagtctttctccaatttgctgaaatggagctttctataacataatgtaatcaatcacagcagtaatccaccatcctctttgccaacaaatttaacctaatcaaggaagcgactctctcttcatattcataagtcctgytcatgcccaattggagggaattgtacaggatgattacatcatagggtggaaattttgggagccaagtcataattccacttactacataggtggtactactacagaattgtgaaaggagcaagagaagattctgaaaaccagatagaaggcactagtggagtctaagccagtgtttccccaagtttaatgtgtatatcaatatcctaggcattttgttaaaatgtagattcagacttcataaggctataatagtggcctgaatctcccaacaaactcctaggtgatggcgatattgcttgcagagtagcaaggtacaggcaaatgatgacagtgacttgggttagggtggtaatagtagagataagaagaggtctgattagggaaatattttgaaggcagaccctaaagagcttgctgaaggagaaacaaaggcatcaggataacttcttacttcaggggatgtcaaagactgtgtggaaggagcttatttcagagcagaaaagagttcagtttgtgatatgctaagtataagatgccttttaggttcccagtagagagaatcacaaaatgcgatggaaaatagcaggtttatacattatattcagtgttattgaagatttaaaattttgtttctgtgcaccacaactatgtaactctttctaagtgtgcttagaatttattatattgtattaaaaatgtgagcaatgaagaggacctaactgatttgtgctgcagattctctttcattctcttgcactgacattagtaaaataagcagtgttttcttgtccctatgccagagttccttacagtgaaataaacatcattactcaaatcattaaaactgttcctagaatccaaaatacacatcactgtgcatatttaaaacacaatgtattcaaacactctttgggtacagacctagactttaagatgattttcagtacctattgattctggttgatgcctcaytatgagatgtattaccagattttccatgactgtatagacggcttcatggtgtgactaattattatttattttcagggcaaaattatgcaatgttattttcatcacattgtgagaggtggccattagatagagcttgcataaaagttagttctcactgactcacttatcacaaaagaagacagtgtagactaggattttatcaaagataaatttacttataatcccctaaacctcaatcatgtaaaatcttggccttacccgttctcattttcagaaagaaaagcattcagaagaatataaaatgaaaactacrctgccactcctttcttccttgtgatggccatggaaatgctagcgtttaaccagagacttggactctcaatatttcaaatgttttaaaagaactttaagtagaatatacctgtgcttagcactgcttgggtgctaagttaacatgcagtgaaataagattacgggaggtgattcatggtttcaggtaggggtgaaataaaggcaacaaagggcagtttgggtttagaggacgcttcatactgtggaacatgtgaaaatttagtttattttaagcaaaaatctttatagaaatccctgttttgcttttcttattgttaaacaataaaatgtgctaggctttacgaccagagaaaaatgggaaggagatattttaaggacagcctgatgattatgtttttgtaaataagatcccaaacagatggaaattaaaccaaatctttcaatgacagagggtgacagtaggtctgaaggcagctacttttatggagagtgttgaggaagtcagaactttactcctatatctggattcctttcaatctggaatcctgggctaggactaactaccttacaggacaattaagctttttgttgatttgaaagaattgtgatgactggacaaagccattgctgaaccctgaacttgtcacattatgagaggtggccattagatcaagcttgcataaaagttagttctcattgactccctgatcacaaaaagaagatgttgtagactaaagttgtaccaaaccttggttgttgttctatagacttgtttttttatagtggcatggttgttctacagaccttttgtagtgtttcgtattgaaatccagaatctaaatacaggcataattatttcatgcattagttcaaagatgtcaaacatttttctactattgcatctatttttatgtaatgtattaactataatgtaaagtttaatttttgcatggtaatttaagaaactaaatttcttactcctycttttccctaggagcactgaatcaaaaaaattggggaaagaaatatccaacatgtaatagcccaaaacaatctcctatcaatattgatgaagatcttacacaagtaaatgtgaatcttaagaaacttaaatttcagggttgggataaaacatcattggaaaacacattcattcataacactgggaaaacaggtaaaatatttgcattctgtttgcctttaatatatttttcagacctggagtatgtttagactagtttcatctcattttcctttgaatagtgtactatgaactagatagaagttacatgtagaagaaaccaaatggagcagagaaaatgggaaatttagacaatattttgacaatttgtacaaaaaaaaaatgaccaatgtcatcatgtcatgttttcctacaaggtaacaataatgatgctgcctctagaagatgtgataatgtratttacagctaatataatttagtcaattacttagtcaatcaggatttctttttcttgagcattatagtttgatcttttctgcctagcctcatgttatagtcagtatttggatatgaaaaaagcaattggctataattgaaatttaagaaaataaattcctagctcttctatatagaaggtttaaagttgtatcccatccttaggaaaccctctctaagtgtctttttattgagcctatcttttttttttttwaaaaaaaagcaaaatataatacattaaaatttaagtacaaattctaataagctatacatagataaataatttccaaaaagtgacaccttttcttttttgatattctagtttttttaaaaattgtattttgggaaattatgtaaaggcaaatatacacgtaagacaaagaytagaaaaatattcaaaattataatagtagctctatggggataagctttatcattggtgaattttttttatattttctatatttaggtaatgtaattatttgaacataataatttaatttcaaaactcaagagagtagtagtcaggcactgtggctcacgcctgtgatcccagcacttcgggaggccgaagtggctggatcacttgaggtcaagagtaccagactagcctggccaatatggcaaaaacccatctctactaaaaatacaaaaattagctgggtgtggtggcacactcctgtaattccagatactcaggaggctgagacacaagaatcacttgaactcaagagttggaggctgcagtgagccaagatcatgccactgcactccagcctggacaacagagtgagatcctatccaaaaaatcaaatcaaaacaaacaaacaaacaaaaaacaactcctgctgggcgcagtggctcacgcctgtaatcccagcattttgggaggccaaggtgggtggatcacctgaggtcaggagttcaagaccagcttggtcaacatggcaaaaccccacctctactaaaaataaaaaaattagccaggcatggtggtgcatgcctgtaatcccagctactcgggaggctgaggcaggagaattgattgaacccaggagtcggaggttgagtgagctgagattgtgccattgcactccagcctgggcaacaagagcgaaactctgtctcaaaaaaaaaaaaaaaaaaatctcatgaaagtagagatttttctacatcagtgcctgatatgtaataaacactaagtatttcttgaatgaataatttttaaaattattatgttacatgtaataattacctaaaagtatattgtcccaaatcttgacattattattttcagttttgaagggtgttagaaagcagtagggcatggaacctctgctttggtttttttatttttattctttttatatatatatttttattatactttaagttctagggtacatgtgcacaacatgcaggtttgttacatatgtatacatgtgccatgttggtgtgctgcacccattaacttgtcatttacattaggcatatctcctaatgctatccctcccccctccccccaccccgcaacaggcccaggtgtgtgatgttccccttcctgtgtccaagtgttctcattgttcaaatcccacctatgagtgagaacatgcggtgtttggttttttgtccttgcgatagtttgctgagaatgatggtttccagcttcatccatgtccctacaaaggacatgaactcatcattttttatggctgcatagtattccatggtgtatgtgtgccacattttcttaatccagtctattgttgttggacatttggattggttccaagtctttgctattgtgagtagtgccacaataaacatgcatgtgcatgtgtttttatagcagcatgatttatattcctttgggtatatacccagtaatgggatggctgggtcaaatggtatttccagttctagatctctgaggaatcgccacactgtcttccacaatggttgaactagtttacagtcccaccaacagtgtaaaagtgtttctatttctccacatcctctccagcacctgttgtttcctgactttttaatgatcgccattctaactggtgtgagatgatatctcattgtggttttgatttgcatttctctgatggccagtgatggtgagcattttttcatgtgtctgttggctgcataaatgtcttcttttgagaagtgtctgtttatatcctttgcccactttttgatggggttgtttgtttttttcttgtaaatttgtttaagttctttctagattctggatattagccctttgtcagatgagtagattgcaaaaattttctcctattctgtaggttgcctgttcactctgatggtagtttcttttgctgtgcagaagctctttagtttaattagatcccatttgtcaattttggcttttgttaccattgcttttggtgttttagacatcaagtccttgcccatgcctatgtcctgaatggtattgcctaggttttcttctagggtttttatggttttaggtctaacattttaatatttaatccatcttgaattaatttttgtataaggtgtaaggaagggctccagtttcagctttctacatatggctagccagttttcccagcaccatttcttaaatagggaatcgtttccccatttcttgtttttttcaggtttgtcaaagatcagatagctgtagatgtgtggtattatttctgagggctctgttctgttccattggtctctacctctgttttggtaccagtaccatactgttttgggaacctctgctttattatatattgtaagcaaaaatctttatagaaatccctgttttccttttcttattgttaaacaataaaatgtgctaggctttataaccagagaaaaatgggaaggaggtatttcaaggatagcctgatgattatgtttttataaataagatcccaaacagatggaaattaaaccaaatcattcaatgacagagggtgacagtaggtctgaaggcggctatttttatggggagtgttgagggttttgtttttcttaggggagagtggttattagattattgagctaatagagccacattacttgggttcaccactggctcttgaaatgacagtggggaacctttgagcaacstacttagcctttctgtgactcaatttcctcatctgtaaaataaggtttatacagtatctacttaccaaggttgtgcgaagatcaaatggataatatatgtaaagtaactagtatagttcatggtacatcgtaagtgatatgtaaatgttggctgtcgttgttattgtgcttgttattattattattagctggagtttgtatccctagctggctggccartatgttgtattcagtccctgatgccaaagtgatttatccctaatggaacagagactatttaaactttattgagggacatccaaatctttcactgggctctcaagagagctctccagaagactgttaaaatatagtcagataatatctgctgtggaactcatacaggggagtttaagcttctgccactcagggttcaaacatgagatggccaaaactcctccataagaatgagtttcctgcctttcctgccacagccagggacccaggttctggaccttgctaatgaagcctgggtgatacatggagggataagcagcagcctgataaggagtagaaatgggctgaaaataggaaggtgagagaactctgaggagaagacttatttttttttttcttttaacccttcagttccttccccctttgctctgtcttcttattaccatctgacatcttagggaagcagagctttcaagtaacagctatcttaggacaccaaacaaacagagcaggtggactggctgtcttctgcccttgaagtcatacactagtcaatatcttcagcttagtttgcatttgtggcaataagatvtaagtatattgtgcagacctacaaagtttggcttccaaaatggcgacttcatattttgtaaatttatcaaataaatgatttttcttaatgtaccttaagtagatggaaattkagttgaaatttaaaattttgattttcagaagcttaggtgcaattgtatttctttttttagtggaaattaatctcactaatgactaccgtgtcagcggaggagtttcagaaatggtgtttaaagcaagcaagataacttttcactggggaaaatgcaatatgtcatctgatggatcagagcatagtttagaaggacaaaaatttccacttgaggtaagtcaggagatctgctgtgtactattttattttctaaataattgatgtttttatttagcatataatttgattaattttaaaatccaatattaaaatttataaagtgatattttgattacttgattaatatactagactaagctaaattaatgtaagacttatctttgatttgccacttgctggtaagtagcaacccaaagtgccacaaaatggtaatcaataaatgctgatgaattaatgaatgaaggaaggaaaagggggacaatttcattaacatactggagaatcctttgatttaaatcttttgattaaaatgagaaaaattttcagctttaaaattggcaaagtaaataattataaaaaatgagtgtgtagtgaaatgttttcttacatgtctagagaaagtctaaattggtagactttctgggaagcagtttgcttgtttttattaagaattttaaatgatttacactaaatacccwacatttaaatttaaagccatttagtctaaaaatttaaaaattgcaaaaatttatttaaaatataatattgaaccaaaaggcaatgattatttaaatacattatgatggatattatagatttcacaaaartcatgtttttgaatgatatatatacatataaaaggctcatgataaggtattaatggttttaaaaagaaacatgttaagtggtataaccagtattatttttgcaattttttaatacattaaaattaattaaatattgactgagagtggagtctgaatcaaatggactaggtttgaatcttgactccaccatttggttattggttacatgacatacaatatataaattatttaacttaccaatgcttccatttttcttccrtgaaattgacatagtagctgcacctgccttataacattactatggaaattaaatgagggattgacttattactcataaaagtaattgaggagccaggcgcrgtggctcatgcctgtaatcccagcacttcgggaggccgagatgggcagatcactagaggtcaggagttccagaccagcctggccaacatggtgaaatgccacctctactaaaaacacaaaaattagctggtcatggtagcactcacctgtaatttcacctactcaggaggctgaggcatgggaatcacttgaactcaggaggtggaggttgcagtgagccaagatcacaccactgcactccagactgggtaatggagtgagacgctgtctcaaaaaagaaaaaaaaaaaaaaaaaaaaaaagcaattgatggaattcaagaaaatgctagtaatgattttctctgggtgatggcattataggtgcctcttattttctcctttcaagttcccatgttttctaaaatacctagaatgaaactattcattttataattcaaaagttattaataataaaaataagatagggtgaattacctcttaaaagactaaaaagctttttttaaaagatggatatcgacattcatttacagcttatactatggattttttctttattcaatatttttaaagaaaagcacatttatcaaatttgctttgtcaaagtagtcraagtcaattcattaagcaacatatcacttctgagagtttagcttactcacaatattacctatttagaacaaagatgaagttcaagaaaaattctatcaacaagagccctgagcaatcaaaatacatggtacagaatccatgcactaaacctaatacaattattttaatgcraaagcctctcaaattgtctctcagtggtattggggttttgttgttgttgttgttgttgctttgagacagagtctcgccctgtcgcccaggctggagtgcaatggcatgatctcggctcactgcaacctccacctcctgtgttcaagcaattctcctgcctcagcctctcgagttgctgggattacaggtgcatgccaccatgcccagctaattttttctatctttaagtagagacggagtttcactatgttggccaggctggtcttgaactcctgacctcgtgatccacccacctcagtctcccaaagtgctgggattacaggcatcagccaccatgcccagtcttstttgttgttttaaaacactctctatgtaattgtgtaagcaggaaacccaaggatcatccctggcttgctccgtatttcttatctcctacatctcacaatcaagtcttctcaattcaccaggcatggtggctcaaactgtcatcccagcactttaggaggctgaggctggaggatcacttaagcccaggagtttgagactagtctgggcaacatagtgagatcccatttctacaaaaaataagagaaaatagctgaagacggtggcatgcacctgttgtcccaactactccagaggctgaggtaggaggatcacttaagcccatgaggtcaacgctgcaatgagccatgatcatgccactgcattccagcctgagtgacagagtgagaccccctctcaaaacaaacaaacaaaagccttatcagtttttctcctaaataccatatgggaggtcagaaaaaagtttgcttacttggattattaaattaataattattaagttttaaatcatatttctttcgatttcccatgcttgtcatactgtcttgcctaataggcctttgccaggtggtacttctgacttgaacacatgcccttctcttctgcctttcacctggctaaaagctgctcattcttgaagggtcagtttagaaatcctgtctctgaaaaggttttggtgactcgcccaaagcaggagccactgctatcctctgttgcacaccctctgtttctcccatcagagcactgactatgctttaygctctcagaggcttcctactcttaccttaagtctacttctatctagcctgagacacctgatttccaaacccagacaggagaagcaccaaattatatagaggctgttacagagagatacatatatggactgaagcagaaattaacaagggatagcctcacagctggaaaggagaatcaaaatatgaaacttaaaactcttttggtattttttaggtagaagctgagagtccttgagagtttcaatattaatagaccacaatatgggaatatcaaagaatggtaactctggactctcaagaaaggcatgcactcttgagaaagacagaaaattatatttaaaataattccataaagcagttaaagtaatatatgattatttattttatgtaattgttctaataaattttacggcacagtcccctggtaatctcaaaatggtcattttggttttagatatgtctaactttctattcccttccttattgaaggatggtaaatgatagcaaatgtagttgtatacatgtaatttataaaagattttggaaatacttagaatgtagaattctctttgctgatttttatgaagtctttgtgtatcataaaactatcattgttacttttatagatgcaaatctactgctttgatgcrgaccgattttcaagttttgaggaagcagtcaaaggaaaagggaagttaagagctttatccattttgtttgaggtaatatatakacactttacactaatgtaattcctttttaagtcacattaaatattgacgtgaaatatcaagacataktttctaacaaagagaggagctcacaagtaaaattaaaactggtggtcattttcaaaaaaagatgacccttgcctggtatttttaaaaggagactcttgtgtttgttaattgggtgaatcttttctagctggggcaaagtgttctattaagtacacagatttgcttatagtacataaaagcatcatattaataattatgtattattatcagtaactatgaatcataaaattttaaaatttacttttcttagtgaaatatgtaagttacctggtttttgtttgctttatttgttttcacctagctataaaaaaagtgtttttggaacttactattttttaatgcacatatttaaaatggaattcattaatcttcacatttttattgaatagttatccaaatgttttattctttttttagaatgtgattcttttttaacaggttgggacagaagaaaatttggatttcaaagcgattattgatggagtcgaaagtgttagtcgttttggtaagctacttggggaactatctttcttcaggattctgctttggatggataagaatgttgacaatacgacaaaagtcacttgttccaaaaggtggaaagtactacatttttraagaggagcaatctctcactttccacacttgataatttatacatttctcaccaaataaataacaatttatcagaaaattttgttacatcaaaagcatgaaacattaatgtaagtaggaaattgaagtttttaaaattcttgaaaataatctaattatatcatgcaattaaagcctatttatctattatgtctctgcattatacatccgttaaagactaattcctaatctgaaaccagctaattttataaatatcatattttaaagtagaaaaggaattgttactcaagttaaaatttattccctggtggtttccttgataaatcctttgctttatcaacatgaggagatgagatttttggaagaaggtcaacacttacatagaagaagatgcaatatgctttgacattgttctgcctgctatctcatggatcttgtaatttgtcacaacaaatgcttttaacaacatgggcagaggagtgtaagcctattaattttactattttatttttattaagcactcacacacaggatcttaatgctgccctgagttaccaataaaatgaggattattcctctctggaagctgcaaaatttgaaatcagaaacaaaactcatgtagatccttttcttgaaagcagaagcctggcctaggattgatttatcattgtcaattacatgtgaggatctgaattgacccaacttttcagaagtcaggaatatgtgaactcctgcagggtagcttttattttttttttttttttagagacacagcacaagatgaagctgttacctccctccatcaacccagattgcaaaattctacattgaatgcgataagtcacatttaattttccccacttgagtcacaaagtagattctatccagactgaaataaaacaacttgtttgaattcctatacttaaaaaaatgtgtaagatatgaattctgaatgttccagaccttgcaccagcctgtggggacaatgaaagagatgttaacactgggttgttaaccctgacttgtgcaactatgggacctttgagactttctcttaaggcctctttactttcccaggtactttactttttgggggtgccttggaaggcactcatacgagcttgagaataaacttgctcatgttctttaaaatttcctttctaatatctactgtctgaaagccattcaggaagatactttgtcagatacactgtgactacatattctctccctttctgagaatatggattccctaacagcattattctgcctatattctggctcttaatttgaaagcagaacagttcttggattagctgaggacggattctagtcctttaccccctctctctctgtctctctacctcacttgtattagtccattttcacactgagagtaagtgatgtgtaaaagaaagagattgaattgactcacagttctgcataggtggagaggcctcaggaatcttacaatcatagtggaaagcaaagggtaagcaaggcatgtattacatggcagcatgagagagagaatgagagtgtgagcaaaggagaaactgcggaacacttataaagccatcaaatctcgtgagaactcactcactatcatgagaacagcatgggggaaactgcccccatgatccaatcacttcccacttggtccctcctcaacacatggggattacaatttggattacaattcaagatgagatttgggcagggacacagagctaaaccatatcaccactatttgtgcaccaacttcctcatttaccaaaaaccaaaatccttcatgcctatccactcattcatctggatacttagtatttcaatatactcagcaaggacaactacccaaaccaaataagttaagtctttctaaagtcaaacgtttccattttgagagttcttgaattaaatccagtctatttctgactctagaaaatcccctactgcccaataaactgaaggctcccccatattggcaatcagacattgctgctggcaaccttgaggatcaaaggtgggacttgtctttaggcagtgattctggaaccacagctaaayccccaaatttggctctgtattcaccatataatgtaagttattaaaaaaaaaacaccttttcaaccattattcagattataagatctatcttactatgctgtgggctggttgctcatttcctgtttcctctctaaaggacaaagcccatttctcattcctcccctcaacccctctttctttctttccctcccatccaccatacctactctatgttaggcattatcctatccatggagtggagagagagagagcatgatgttgcagcaatactgagataatgaattaatattttccaagcagagcccacaaaagacrttagttgcaatctttcgagttgcagggaagagacacatcccaggtaacatcatcagtgattatctgatggaaattctcatcagactgatttatagtgctttcttaatcacaatttcagcccagaaatttctgtactgaaaagtcctcataggcattggtgtgaccccatgctaaatatcattgtcctaagtaataggagctggttttatgtagttaccagcctttctctagtgcttggccctattgtggtttcttcatctttgttcctccccatcttttttcttccaccattagccttctcatggacggatctgattagttggttggttgatcatcattacatgttcaagcaaataatgattgcaaaaatgaatgactgaccccaaatagagcagcactggctctgctgtgcttctctcttgtgttaacaatagtgaggttacttggatgaagcaggtgtttttttctcaagccaacaaaacaaaatgaaaaccacaaacacaaacaaaggaaaacactgtagtgaaattttgttagaagaaaatgtaactgaaaagcacttctgtaatttaaaaatcttgtgatatctagttaccacatccgtaagagagaccaggtgactgctattgaggtccagaggcagaagaatggattccacattggggatagggagaggaaaatgaaaaaaaaaaaatcttcttctgattcttttgcttctttttaaattttttcccctttaatttctttcccaataataggaaaattctctgtctcactctccttactcaggtctcacctctgctttcccttccgggcccctggctctcctggggtcaattcatttccacctaacttagcagcgagtcaatttctggctctttacctaattagtattctcaacacacacatttttcatgaaatatttgtaagataaatttagtcttcagtgggaaaaggaacaattacagtccacttgtcagttaaggaggtaatttaactacaacacttttctagtattgaaaacataaatctaaaaaacattcacagattaaaaaaaaatattcttcttagttcctgagaacttgaatctaatctgaattctgatcatgttatcttggcattggagaagaggaggacatacttttagaagttactaatgaatccgttaaatcaaagaaaacttgaactttctaatggattaaaactacatgtaggacatattgacgtgactatcaattcagttaagaaaaggtttttatttctaagattcagttgttaattcagactgaagcagttgtctgtaactttagttaataacagtactccttttcccttcagaagtttctgttacagaaaagttaacatttactaatttaacttttaaataacttatttttctttgaggctttctgagtatgttcagtcttcatagagtttacagctggaatagacttttaagatcagatagtctagtcatttcgtattctaatgtggaaagtgtggttaagaaagactaggccgggcgtggtgkctcacgcctgtgatcccagcactttgggaggccgaggcgggcggatcacgaggtcaggagatcgagaccatcttggctaacacrgtgaaaccccgtctctactaaaaacacaaaaaattagccaggcgtggtggcaggcgcctatagtcccagctactcgggaggctgaggcaggagaatggcgtgaaccctggggggcggagcctgcagtgagccgagatagcgccactgcactccagcctgggcggcagcgagactccgtctcaaaaaaaaaaaaaagaaagaaaagaaagactaaaaccttgaaaaggcttcactttacttgggattttctacactagcctactaccctgcatgtttgcatcacctggggatgctttttaaaaatctagatgmccaggcctgaccactagagatcttaatgcaaatggtctagcgtggggcctgaggcattggtatttttctaaaactccctggattattcacataaggattaacaccactgctctacactccgccacctcacttagactacacggattggcttcagggactatttcttaatggccttaatctcatagagagggcagaggacttgcactgggctgggtagttcaggagataggaaaacaaattagacacagatctcactggtaagtagattgctgcctacatgagtgagggctggttcacaaatagctaaatgaccaaggtattgctattggtaagtgctattggacagatacaaatgagactattcaaggagacagatatatttggattgtttcagggtttgaaggccagatggcccacctaagaaaactctaccagtttttggatagaaattctataatctgtatacaagtttatatataagaataracccatatttattggtgtgtgtgtgtgtgtgtgtgtgyrcacacacaaacacatctgtgtatattgtatcaaaaatatttttttccactctttggctttccttttaactctcttaatgactattgatgaatagatcttgattgtcatatactaaattttatcatttttccttttataagtaatattttttgtgtgccatttcagaaacctcaacctaccattaggttatgatgataattttttaatgttttcatttaaaagcattatgaatatgttcatttaaatctgcaatcagtttagaactgatttgtgcttatgatgtgaagtagggaatcaagattcacttttttccatgaggatattcaattgatatagcactgtttattgaaaagaccatccattccacattccataataattttttctatcatagatcaaatgatcatatttttctcttttattttctcttccattgttctcttcatcgatctttgcacaaatacctcactatcataatttctacagctttatatgtaacagtatgacagctcttcctatctggtagtgaaagttttccagctttattatttttcaagattgtcttaacttttctttggatttttattgagattttagaatcaatatgtcaattacacacacaaccttctgggattttaattaggatttcattgaatctatgaatcaatttggggaaaatcaacaccttcacaatactgactcttccaacccatgaacataatctttctgccattttaatatttatttaattctctccagaatgttttgtaattttcagtgtagatattctacacattatttgttagatttatttgtatttgataatgttttcctattttaaatcatattgctttaaattttattttctgttgtttgatgctggtacacagaaatacaattgatttttgtatattgatctacgtgcagtgactttgctaatttcacttattatttctcattctctgtagatgattttctttctttcttttttttttgagatgcagtctcgctctgtcacccaggctggagtgcggtggcgccatcttggctcactgcaacctccgcctcccaggttcaagcgactcactctcctgcctcagactcttgagtagctggaactacagacacgtgccaccatgcccagctaattttttgtatttttagcagagatggggtttcaccgtgttagccaggatggtctcgaactcctgacttcgtgatccacccaccttggcttctttacaggcgtgagccaccacgcccggcctgtaaataattttcaatgttttacatgcacaatcatgttatttgcacaytgtgatggtattattttttcctatacaatcttaagattttcgtttcttttttctttattgcactggctcagtcttccaattcaatgttaaatagaagtggtgatggcaggaaatcctggtgtcattcttgatctctaggggaaacactttcaataagtcattcttaaatatgatgactagtacaggctttgatgatcatcttcaccagaataaggttgtgtttttattttccatgaactggtattgagtcttatgaaatgatataactatatctattgagatgatcatctgatttctgagtatttttatatgtaaaatattctgttcaccatcttgatgtaaagataagtcatctaacactgtatagtgacatgtgtaatacaatttggggcatgccagctttattaccatttaaaaatatatctaaaatgtttcaaaatctcagttttgattaaatacataacaaagcatgtgtctctgtttcatagaagttttgaacagctaagttccagtgttgagattccagctgagatgtatattattcctttttagggaagcaggctgctttagatccattcatactgttgaaccttctgccaaactcaactgacaagtattacatttacaatggctcattgacatctcctccctgcacagacacagttgactggattgtttttaaagatacagttagcatctctgaaagccaggtaatcttagaaattcaaacaaatcaagtaattcaaagccatttaaaaaacattatgttctaagtttgctataaaatatccattttaaagcatttaccaatgcctttgaagcagatatgttaaattatttgatctttttttcagttggctgttttttgtgaagttcttacaatgcaacaatctggttatgtcatgctgatggactacttacaaaacaattttcgagagcaacagtacaagttctctagacaggtgttttcctcatacactggaaaggaagagattcatgaagcaggtatgtatttaaatataatcttctacaactctcatagatgcagtgttataggaggtaattttggtaaactgacaaatatagaggacttagagctttagaaatgttttaattattaattttgtagctttagataagctgtctaattttctgaatatcagataccacatctataaaatggcaactaaaaaaatctattcttcccataagaataaccccattttacagatgagaaaaactgagatttaataaggaaaatcatttttccagaatacacagtaataagtagcaaagcaaagtacacacctccaagttcactttctggtatttgcctgggctgagaggtatgagaaaggaatgaataagaggctgaggtgttcagagcttgggagatcatttctggttgggataataaggaaaactttatgggagaaccgcctttgaactgagtcttgacacagtatttgggttttaaagtgctcatctttgtgttggcagcccccaagaaggagcctagcaccttatcagtactgaaaataaatgcactgagttattaatgaataagaagtgaatcttcttcccagtttccttctttggaggaaaagaaatttgctctttttaggtacagccaagggaaatgacaccagaggggtgtctctagaatgccgtctgttttttgaagctgacacagtagttaaaagcatttttaaatgtccagagaacacaatcagatacatctgctgacttgtccttttcagtttttactgaggttgtcacttgttcattaaagaagtcgttgaagtgacctttgcactggaaaggacttctaacctttccaagtagatggacctctttgatatcagtcctgcaatgaattcaatgatttttttttgccatgtataatattaatttaataatcatctgcttttgaagattaggcattaaaacaacaagcttttattgttttaatgtgatatttccaagaatcgtttatcctttaacaaaaaaatagaattcaagacaacagtgatgaatagctatatttactatgacactaaattttaaactaaattgccccaaagtgaggaaatttaattacatttctatcagtagtactaaatactatagcatactgtccagtaaataatagacaatcgattagaaaaaagaaagtggatttaaccatcccctcttcttaaatataatagaccaaattactaattaaataaatatgatttttttgtcacacagttttatcaattctgttttattaaaacccttcactggttctgcatcacttttggaataaagttcaaactgcttgttattgcatggcaggctctgtgtaggtttactagtcttagtgcttaagcctccccaactagcatccttcccttacattgaactccatgaagtcccctgaagatgcaagaccacattcttccaggttgcatttgtacatttggcttccccattgatggcatattcctctccactgtcttcatttccctgcctcctcattcttcaagactcaagttgagcattgcatccactaggaggccatctctgactctgcttctgtccccctaagtctggccctggcaatggccacaggactgcacactcaaggagacaccatacccatagatggtaaatggtgctcctctggaggttgtacgatgtgctcagcttctccagacttcatagcagttaccacattatggtaattgtctatttacttttgtgtctctgccagcaatctctgagccccataatggaagtaaataagtcttttatctctttatctccatggccaaactaaagtaaagctctctttcactaaatattcactgcatggctgaaagactccatttccacataataaaaacatagcaagttatacttaatgggtgcttcctgcactgtttaatgtgtagatctgtatataattctgatttaatgtagaacattgctttcacagttaagtgttaaaggcccaaagtaataatccataataacaaaaacagtaatagctactgtgtattgtgtgactctaccaggcattggaaccagacaatatttgacgtagacctcacttcactcttatgaagttggcctcattgtcttcattttacagtttgggaagctgatattaaatggcttgcccaagtttacacaactagaaaggaatggagtcagtatttgaacccaagtctccctgaatctaaagctttgcaaacttctgtccactgtacttgacatttatacaggaacataatttctgcttacataaaaaactgatgactttaaagacatgaagcttcaaaaaaatagtaatggattttgagtgttttgtttatcctaaggtcaaacacagaaacaacactttcttaactacttggtgttttgggttctagaaatacatgataggacctataaagtaaggaaaataattttcttgaatggagcttgtaggaatygattttattcccttagactatgtgtgtatattgtcacagaatttcacatccctgctgcaatactattatgactgccatagtaataataatttatttatcacctatttgtctgtggtttggttccaaaataaatggcagaactaactagaaaaacagcaactcaaaatagactcactcatttaaattgaagggacttaaatatgcaatacttaaggaaaaactagaaagtttaacaataaaaatgcacatttacaggctgtttttgttgtctacttatcctatatgtgtgccttccccagcttcctcaagaaaatccagtcacaccaactactttgttatgtttgtatttttgactaaatatttatggagtgatggggagaggctacaaaactcagcatctcatcaaaatatctgcctacagcttagacaatattgcttatatagtgttatccgcttatattgtatatccttaggataaataaaagtgctcaaaagacaatcctagtttttattagtgttttgtatctttatggccatcagtttttattctaaaattatgttagcagaaacacatctcttctgcagtctcccttgctgggccttagagtctttgccttcagattgtttgaccctcctctttggtcagttcccctcacagagtctcagctgctaccctcatcccacccaagtcttcacgtcttcttaaggcaggaaaattagctttgtcccaggtccttcaaacttgcctgcccgtgctcatcctaatgagctcagcaatcaaaaaaggccctttttggtagaatgatttattttcttttgggtgtatacccagtaatgggattgctgggtcaaacggtagctctgttttaagttcttgagaaatctccagattgctttccacaatggctggactaatttatattcccaccaacagtgtataagcattcccttttccctgcagcctcactagatgcaatgtttgttggctttttaataatagccattctgaatggtatgagatggtatctcattgtggttttggtttgtatttctccgatgattagtgatggtgagtagtttttcatatgtttcttagcagttgtatgccttcttctaagaagtgacatatgcacttatatgttcattgctgtgctagtcacaatagcaaagatatggaatcaacccatgtgctcagtggtagattaaaaaaatgtagtacatatacactatggaacactacacagtcataaaaaatgaaatcatgtttttttgcagcaagatggatggagctgcaggtcataatcctaagtgaactaatgcagggacagaaaaccaagtacctcatgttctcacttataagtgggagstaaacattaattacacatagacataaacatgggaacagtagacactgtggtgtacgagagagtggagaggtgggtgagttaaaaagtctccctatcaaatataatgctcactagctgagtgatgggatttgtactctaaacctcagcatcttttagtattctcatgtaacaaacctgcatatgtgctcttctatctaaaataaaagttgaagtaaaaataaataaatacataaatattttttaaaaggggcccttcgtttgccaaaacatatccccttctaggggggatcagagatgatacagaactttttttttctggttacatagactaatatgcacatttatgattttaaagtttcaatcattgtcaaaatatatcattttgagacagcaatgaaatagaaaagtcaggtcatgttggttggatgagtctcatccatacagttacatattcagtcgattcttttttggatttaatacaaaccactgtcaaataattaatatgcccttatgcgtatagggcctttctgattcctctttcttctgaaccatcataatccctgacctgcagctgtggcactttgcctttcttgccttgcttcaggggtgtttatgtgcatgccttagtttcttagtagatccctgtctaattgatctcagtgttacctgtaacatctgataaagtacctggcaggtagtaagagccctttgattccttgatgaatggtgaataagtgaatgaattaaaacattggccaaagcttactcatgtctaagcctctggggttaaaaagagcatatgtgttattggcaacaaacacagaagraatgactggctttagatttccagacaggttggagccaagttcttcttgctgaacatcctttaaataatttaaaatttgcaaagccttcagaagaatacagtacagtaggattagcatgtgtgtacagttcatgttcaaaattaaagatcattccaggaaaagaaagattctaattttaaaaagatagtatcagtattatgacagaattgttatgaaatagtttcctctgtgactgaaaaaaatagcaaataatttacattcttcattttgactctgttgatcctctgtaaaattattgtacttaacaataatgaacacctagcatatcaagatttattatrtaataatttttatagatgtccattgtataacagtctgcatttactgaaatcattataaagaagtgagctacttgcttttatttttgcagttaaaaaagaggagaaatgaatctgattagacccacagaaattagttgtttctttcttcacaaactaggacttgctgtttccatcacgagtctttacactcaataagcatttattatcatttgtcctgtgcatagaaatactgtgttcctatgaaagtttttttttttttttttgagttggagtttcactcttgttgcccaggctggagtgcaatggcacgatatcggctcaccgcaacctccgcctcctgggttcgagtgattctcctgcctcagcctcccaagtagctgagattactggcatgcgccaccacacccagctaattttgtatttttagtagagacagggtttcgccatgttagtcaggctggtctygaactcccgaactcaggtgatccgcccacctcggcctcccaaagtgctgggactacaggcatgagccaccacgctccaccgaaagttttttcttaatggatatactatctccttcggaactgaatttgagaataagaattgaggattgtatttatattcagttttgatttttattaaattcaatctgaaaatttttattacatgaamttataaagcgtagaaaatatagataagcacacagaagaaaataaaaataccctgtaattacactacccagagataactattatgaagattttggtaaatatccatccagatctttctctgaaattttttaaaaatgttattatacttcacaaaaaatgagagtataccacatgtctgtttactgattttttttacttcatattatacctttaatacatcattcttaattttatgttgtattccatcatatagttataactgtatattaaaccttaaccagttcctcaattttggaccttcagttcatatattttttgccattataaatatctaacatcctcattttgaccaagaggagaagtaaaagctagcataaaaattgtcaaaatcttgctctcaataaatgcattgtaggaaaatgtatttttagaaatacattataaataatcgcaaaaaccatgtgagatttatatattcatataaactctgtaaggttagagaccaggccttattcattttttgcattcayagcaggcgctcaatagattatttgtgaattaatgcatattttatctgtatttccatttgtatggagagtgccatttattaggaaggcatttctttttggcatcatggaatggacactggytcttctaaggatcacagaatttaatagaaccatctgstcctgaaagagttagtgaaaactgtctttttttttttttttttttttttttttgacagagtctctctttgtcacccaggcttgagcacagtgtatcgatctctgcttactgcagcctctacctcctgggttcaagcgattctcctgcgtcagcctccctagtagctgggactacaggcgcatgctaccacgcccgactaatttttgtattttyagcagagacggggtttcaccatgttggccagactggtctcgaactcctgacctcaggtgatccgcctgccctcacctcccaaagtgctgagattacaggcgtgagccatcgtgcttggccaataaaaactgtttgtttgtttgttttttaaataatgagtactacatgtgaataacagtacaaacatagcaaaagtatgaagtagattaagttcaactgtatscacgccttccaggcatcagatgctttcatgctgccttcttaccaccttacaaggtttttctgctaagaagcrgggacctgctaaagcacaggggggaaaawcagaccttaaagttcagtagacttgattttaaactccagcaccaatacttattagtcatataaaaattgtcaacttacttaaactccccaagcttcagtttcttcacctatagaatggaaaagttaaaaatggtcaccctatagggttgtggtgaggtttaaatgacctaaaatttgcaaagcagtacagtcccttgaatgtaacgtgctactgactcataactagtatcattgtcatgtgtatatatggacagccaagatatcacagtgagtatggtatactattcaagtttttcatgattaargtgttcttaaataattgttgaatagaattatggatgcacttcaaatctcatttgctagcattgtaatatatttaatacaaacttaaaaaaacmaaaacaataaaagataaaatagttgtcaggacagagtagcataaagggagtgtctttgtagcataatattttgacctatgagaaattttgtacaatttcctgaaaaaacgtcataatgaattatacattagtagacttaccttcttgaaggtcagtgggttgttactagcatttgttaargtcacatgtatgtaaacactgtactgcacctatgttttaaaaagtgaaatgaatattatttacttcttggaagattatatactacaaattgaactgttgatgaagtcactctgggtccctaaagactgagtgaaagaggtagaattagaaagacttcttttggctattaatctaaagtgaatatgtaatcattcagaagtacaaaacagggatagatcttttccaattacattcagcatttgtgtcaatgtttacattagttgttttaggatctgctactgcctgaggagaagtcacaacctcattggttaccttctgggtctgtaagtcattcagcttttctctcagcagtcattgtcttactacttttaaaaatgaggctcataaacttcaaataaggaagtggtggacttattagcatgtatttacgaagcacttttggcatgagctgtgttatactgtacagaacttcaaattagtgggaaataactgagtgagacctagtgtagtctcaggtaattatgacattttctctgccactccctaagaatcacctccctgccatttcgtatcaatccatattttactcagaatacctgaagctaagactgcgccttttccctcagggcagattgtgcttcttccaaggcaggctagagaggaacagaagtggaaagaatctcctatctccccttggtcatctgcatcaactttcttgattaacaaagatttgtcacagccaaggaatgcatttgcatttctctgtctcttttctttttttcttcatcattcagtgctttgcttattaatattttagcaccggttccacagatcacatccattcctacgtactaggtgttcactcttcatttaagtaatgagaggatgaatgataaagcacaggactttgtgtcagctaaaagtttaagaagcttataccatttttagtaggaaatgtgtataaatttgaaaagaatttggcctaaatggcagaatttttcataagttttttatacattcctctatcaatggagtgcagaatttagaatctaaaaccactcgttacatctgagagcttactaaatctaagtgtttgaaagctatcacaggaatgagcatcctaaaggctgagacactatcttcttcttctgtatgtctagagtgcctagaaccaagcagatgagagtggaatgccaaaaataagtttttaaagcaagaacatgtatagctccctgataaaggagactacattctcattctttatagtgaggattctttgctcactgctcatgtatggtgcagtgccatttacttgtactctacgtgacttgacgtgggccccagactcacagccagaagcctgcactaaccagtaactaggttctccttcttagccagtgtgccctgaagaatcagtaactatgacccagatcacatgtagacatggaaaggaatcagtatgtgagatataggcctgagggagagaatgaagcttcaacagtttcgaactcctcatgatcaggaaaattatatttttgttactattttactttatagtagcttgtatttgatgtctgagtacatattgatctggaaaaatgttattgattttcaatccagaaaatgtactttacagagtaggtatgcttctaataagataattgggctggccgggtgcggtgactcatgcctgtaatcccagcacttggggaggctgaggtgagaggatcacgaggtcaggagatcgagaccatcctggctaacacggtgaccatcccggctaacacagtgaaacctcatctctactaaaaatacaaaaaaaaaacagccgggcatggtggtggacacctgtaatcccagctgctcgggaggctgaggcaggagaatggtgtgaamccaggaggcggagtttgcagtaaggcgagattgtggcactgcactccaacctggatgacagagcgagactgtctcaaaaaaaaaaaaaaaaaaaaaacacaaaacaaaaaacaaagataattgggctgatttcaataggaaatatatgcaaaacctgggaaatttagtgtctattaatcacttcttctatggtcattccatggtttgaacaccaaatagtgtgtatggaattaactaaattgttatttaaaagattcagctctatcttatagaaaggaaaccctttggcaagatcataaactacatatagaaatataggcttttctgttaataacattctaaagtatgyatgtttttttcaccataagagcctgtgtctccacatctaaaataaaagatttacctgaagcttgatagcatacaactatattgttgattaacaataaacacaggtatttaaaaagtaaatttctaattaaaatataaactcaagctattaaacaaataactaacaaactcttacagatttacaaggaggagaacaaagaagtgaaaacttatgggcaagaaaatataactttctttttggagctctactttatattaatgttgattcataaattttgacacgtctactgattgctactactaaggcgagacaaacatagacatccaaccaaagtcgtttctgctgcttaggcagtagtcctttggatgttttgcaatgaatcctttatttttttcttaagagattgttatgctttgtatgtatgcataaaattaatgcatttcttttttttttttttttttttttttttgagacggagtcttgctctgttgccccggctggagtgcagtggcgcaatctgggctcactgcaagctccgcatcccgggttcacgccattctcctgcctcagcctcccgagtagctgggattacaggcgcccgccaccacgcctggctaattttttgtatttttagtacagacggggtttcaccgtgttagccaaaattaatgcatttccaaacagtttcatcttgaagtgtatagttcactttaaatcattcccattctgtaaaaagtggaattgatttttggaggacgaagtctacaaatgatattgtccagagtcacttccaacttttctaaaagtgaacttgggattcattagaagcaagaacgagcttgttgctccaatgatagaaacgtgaatagctcacttgagacaatttgaaggtcttctgccatctggtggacatcagtagaagtctcactcagtagagtaacatcatgtagtatacacctaaattaaaatatattttcttattctgaattcatgttttttgacaatgaaataatttytcttttatttctaaaggaacaccccaacctaagccctccctaaacaaaaaataacatcaaaggtttgaagtgaaaaataatttctaactgatataaagctatacatgtatttatttgtaaaaggtatatatatatattcatatttcctaaataatttctgtaccactgctagcatactgtacatatgctatgccattgctatcatattgtacatatgctaaaattgtgactactaagtattatatgtaaaatttgtttccatttgtaagaccaattgttagttgtgggtgccctccggtgttcatgaggtgaactgcaaactagcagagacaagtcattttggtcacaatcggcggcagttgttaacatatttttgagtccttgtaattgttgtatcagtgatgactgatttacctaagtctactgcatgctctcattgagtggctttgtaacttcaggtgtcacctgaaaacaagtaagtatattaattaatattcagcctgagagatctttctctccctctgctttgcaaatctggcccatgaagagatatttattactctgcttcgttagtaawatatcataaaatgttatagtttttcttttccaaattagtccaaactatcacattataagtgcattttggaaagtaccagggcactctctgatgggactaaatttggggcatgattcccagcatgggcctgaattcattttaagaagtctctgaatgatttttcataatactactttttcagatgagacaaacaagtctcttaattccctaaaattattttcttaatttacttatgataacaaaatgggatttttgtcagcacgtctgaaaaatactgaaatggcaattttaggttttctttggttttctctggttgggaattttaaattagttcaagkattgtytaataacaaaatgttccgataatagtatgtctttcataattgaaattatcctcatcctgaactgaatatattttcaggtaccaaacaagagaaattaagtcatcatgagcttgcagatattctttgttcatttatttctaaaaatgaatctgtatgccaggtatattcaaaacaatgttctaggcaatatagaactacagagctatggttcttatgtttataatccactagaggagtcaagattcattcaggaaaaatacaatacgaaagtatgcaaataatgcagtaataatgataaaataggcaattgacaatgacagagatcacttcagtagagattaatgtgagtaatgaaggaggtagcatttgaccaagacctttccagaatggaaagctgggatttgaacagatagagttaagaggggtggaaagagtattttagatataggaaatggaataagcaaaagctccacagtgggaaagtgtaactttttactttacattgaaataaaacacaataaaatttttatagaatatgttttatttattcaagtcctcaaggctaagttctatcaacaactgtacttttttctctctgaagtttgtagttcagaaccagaaaatgttcaggctgacccagagaattataccagccttcttgttacatgggaaagacctcgagtcgtttatgataccatgattgagaagtttgcagttttgtaccagcagttggatggagaggaccaaaccaagcatgaatttttgacagatggctatcaagacttggtaactatatgatcagttgttttacayagggtaacattataatttaatttccaaggtaagaacttacaaatggttgtatattattttcctccattacttttagactttatgtgaaggtggggtaggctgagtatttttaaatttaaaaaaaaawtttaaattagaagctatactaaattatgtttaaagttacatttaattaaatggatatcataactttgccaacaataacactatagagtagatacatatgacttatgaactggagatcatttagtgtggcctttcttaagatttcagttgtagaatagtgccagaatctcagtgccctgatacattttatattgtgtcttccattacgctatatcagcacaggaaaagtagagtaggggacatacaagtcctctttgttgcaccaaaaaattttcagataacagctgggaagtcatgattgggtcagaactttggggatgtaagaaaacatttcttacaaaaagatccacccctgcctccctccaccagcgcatgcgaataaagtacagattccytttgtggcctgagcatgtcagtattaaactttgctctggtagggaagtgttggccatagattagggtgtagttgacaaaccttcatctggatgtagrtccagaaagtccccactgcaggttaaaggacactggactctgcactcaggcacctagagtcctgcaagtcctgggaacctgcatttaaataaaaatgcactattaattatgtttcatatcatgtggacaaaatggataaaattttagtaaccttttaattcagttgcctggaatatggagacacaatgacctgggaaaatcgtgaaataaatagtaataaaaatgtttatttcataattacgtgaagaagataattctattactgttcttgcatatatattgtcaagaaaaagagataacttagttgttcactttttcacattgctccttgtttgcaaatgccccccatttatttgtctaaaatattaatttttagtttgtagtactaatttatgaatttgatgagttctggctaaaaatgaaacttcctgaaactaaatctgatttttaaaaagcaaaaaaaaaaaaaaagcctagctttccagttcttcataattcacaaataccacaagtttaactaagcaacattgcataaacttttccttaggttaataaaatagaagtattttccacggaccagggagaaaaagttttctaggaaagatacctagtgtgttggtagtcctatgagaataacatttgtataattactaacatctttcttttagggtgctattctcaataatttgctacccaatatgagttatgttcttcagatagtagccatatgcactaatggcttatatggaaaatacagcgaccaactgattgtcgacatgcctactgataatcctggtaagtgccaccagatacatctatatattaactcaataaatgaggttagtttaattactgtatgcattgatgctttctctctatattcttttggccaaaaggcaaagtgattttctcttaagtctggattgccgggtaattttttggggcatgggacccatttctcattcagcaggtctggtgccagacaataagtaaacttatccttaatattggagtttaccatttgtaaaataagagtgactaaacatatttataacattgtaataatcattaaatgaaaattgctatgtaaatgttgagactgttattttggataattaagagttggtttaatttgtatttatttcctcttttcagcccccaaagcattatgtagtaagtgtatacatgatcctaagaccatgtgaggtactttcaaatatctatacaaagcatctcaagagtttgtcttagatctatttttctactttttataatttggttatggggagtggggtgttttcctcttggttgattgcccttactcttcccaaaaataagacaaacaaaagttgtttctacttgtgttttatttgcatgtaccttctctaaatgtatgggaaaatcttttgatcttagagcatatgcaataactgaatcaaatgctgaccatcataatttgacaatttacaagtttacataattaagttagttttcctcttgttagtgtaagcagttttaaataatagaatagacrtgcatatatgtatatatacatatgtataatcacatacatctgcataaatacatacgtaaatatatatattctttggtcatccatattaggagcctactcattgaaacttttacaaattttaatgtaagtgagtggttacaaattatattaattatagcctattttagttttacctatggcaggaaaactgatgtgcacggtttgcattgttgtctaaatgctgtagcagggactttaatccaacatgagcttaaataaagtacttgctcattgatcaccttaccatagctgttcttactagttgactttttaagttaaagattatatgtgagagcatcagatattatagtatgcatcattccaaactacaggctacaaaacttgccaaggtatctcccaacttgatattaacgactaatgaatattactactaccatgatggcaatatcattatttagtatttcttatgacctgcctcatggcctgggtataatcatctttcttattgcctttatttagcattgtttttcaaaatcaggttattttttaatggaatgtgagctctaagtcttatagaaaggcgagtatcaaagtaactgaccatgattttaactatgccatatcacgctacaccattgcatggcaaccatcaccaaagttcctcacaatgagctacccagaaaatgacacctttagccatacaacattgatcatgttggccaacaccatatgtgaattgattgaaatatggcatataaaaaaatctcttctacctttatttatgcattttgagtatgaagtatattgaacacattcacttaattttgttaccttggtttaattatgctactctaatttcgtacctaaaacaatttctcaggagtttgcaaaaaattattacttttacccatttatttttacactgtttcctattttattcgctatgccaaagctttaaactttctgaatttttttgttcttttttattttgsagaaacttattgcatatgaaagaaacagattaaatatgtattttctccataagtgatttctgagtgatcctgttagactgactctatattggcacaaagtataatattcttctatcatttgttgtattttcacatttgtactaaataataaatattattaaaacttaaaatttctatttatttaaaggaccgggacactattgaacgttgtaataatgagatgcttgtttggatacaccattaaatctccatggatgcctcagtctcttaaggcattttgtatagtaatgatgtgttagtaaaagatggtatttgatttgatgttttgatatgctatgcctcttaaaaactaagggttacaaacttaggtagattattccctattatttctaccaaaaattcctgcatcaaaaacctgttcctccaaagtttgggattatcctattttttataaagaaaagattggttctcttaggagttactctttctgatctgaaaggctgcaatggcatttttatccacagatttacaatttagtattgaaattacattgtcttaaatattgtttctttggtaaatatatcccaatgaaagtcttgacaataatactatcttgtggcttggtaaaacagatttggtgcctacaagattagtgaattttattatttgtgtgactaatatagatgtaagtggcttttgagtttgctgcttatttcatggtttttattaataccacttcattctgttaatcatgttattttattagcttggtaactgtaatgtagcctatttaataattctattattatttaggataaactgtttactaaatattgtattgctttttgcttttgttaaaaagaaatgaaaaagataatttataattgctgtcattctttgatagatttcatatatatatatatatatatatatatatatatatatatatatatatatatatatatttgaggtggagtcttgctctgtcacccaggctggaatgcagtggtgcaatcttggcctgctgcaccctccacctcctgggttcaagcgattctcctgcctcagcctcctgagtagctgagattacaggcatgcgccaccacacccagctaattttgtatttttagtagagacggggtttcaccatgtgggccaggctggtctcgaactcctgacctcgtgatccacccacctcagcctcccaaagtgctgggatcacaggcgtgagccaccgcacctggccagatttcaaatatttaaatcagtttccctgaagaaaaactcagtcttccaaatagtgcctttaacttcctaaatgtgataaaactatgcatttaaattaataatttgcttacattattctttgtaccttttaattacacttgtgtacaaaagtatcaccataaactatgctcattaagtattatttcaaattgtcgtttaaaaaaatgtgtaagtttgcgttcagaaattaatttaaatttatcaaggagcctttttaatgttaaaaaggaatgtatattcttttaaaagacttcttagttacatttatgaataaataatttcataaatatatttatcttattgttactaagataattatgtttatttctcatataaagataaagctaattaacatacagctctggagggattatttaagtacatgttttagggccttgataattatatgtgttagatttaaatgcatgatgaattaaatccacagttttcttgttactgtgtgctttcagttgtataacaattgtcttaagtcaccatacatctgtcctcactctacctgtaccatccttcctattagtgttattacattattatatgcagaattatagtttgaagcagttgcggtctacattgcttttatttcgtgcactgtgaaacttggcttatcttcaaacaattaaataagccttgcttgctcacctacatcagtgttgcttttttgtgttatagaaaattaatgtgttcctaatgtgttttttttaatttaacattacatgtgtcccaaaacaaaaccagaatgagtcaacagtttttgttcagttattacaaaaatgtgaattctaagtgttcactcaaaacaaaaaatactgatagttcttcactatctgacttttttctagcctttatggagtctattttgatgaagggagatgattctataagccagtataatttttgaactatttaatatattggtagtgcctgactcaaaccagtggttactaaaatatcagttattacttgtgagaaagcagcaggtttaggggtacccaatatgagagcttgtgcccatcagcagagctaaactttgagttcaggatgttgaattcacagttccagaattatggcttcaaaatctttaggaagatagaaacaatcttccaaattattttatttcaaaattgttatgaagagactcagcaaaagacttctggattctaagaaatagaggtattgaagtattcctgggaatttcagtcagttcaaatgatctcagtccagttggaaaccagaataaagagccttcaaggtggttttataygcagtaatatgaatgtgctaacacttgggggtgctcacccatgagagtgccaaggagacgtgcctaggcctacacatgttttcccagagccaaggaggcccaaagaaaaagtcttgcttttattacagtaaacagcaatccaattataagtcattaatattctttaggggatgtgattggattaaaaccctgtattgtaatttactagaatagaaaccataatccctatagttagttgatgctctggtaaaatgataaaaataagtctaatgcaatacacactaaaaatattaaagaaaaagggaaataaatcctcaatgtgatagttatacatacccttccccaacccttattacgattaaataagaaaattatatttgcccattaaaagtatgaagttaggtggagttagaccattttttaaaaattttgaacaccttcttaggcatgttgaaacaaatggaaaatacttgatatttttgtatagcctcttggcagaggaaaagcctacagtatgtgtaccactaataagtatttgattatgatttgccattatgagcattaaatatttcaacagtctatgaaaaagagtggctacacttcaaattattttcaataaaactaggtattgtctaatgggcttaatttgaagattttttatatgcatgaacttctttagtcatagcttttagaaaatcataaggaaggtcatttgtctgtcacagtttagttgcatctcatttttaaattcaaatgtattaatttgcatggcgattacaaagacacaagtgtttgagatgattgaaatcactttagtttggaaacgtaaagaataaagagcatgaagaacagacagtgaggaaaggatttcataggaagagaaatagaactgggagaccactaatgatcaaaataaaatttccaaagtccttcatggttagttttaacgagaaaaaaagtgagaattaaaagtaagattgtgattgtttctagtgagtactttcctttttaaattacaggagttgtttagggtaagtaattttgaaacagctaagttgtcaagagtatgaactttatctgaatcttcttggaagctaggcatgcttaatagattttacataaattctcattttatggttttcaatatattaatacccagcagtcttggtaaaaaataaacgcaagaaactttgtattggaaaacagacctgggtatgatcaacatttaatgttggttcagttataccttgaaatttctatagagtatgcatttcctttgaggacataaaacatagaacataagcagcattaggatagtgcagagcataaattttggcgatagcctgagattccataaaggcatgggagtttgaagaacatcattataataatgctcaaacctcacagttactttgtctaccattttcctaatgacccaggcagctcagaccaagactaaagaaaaattctctggccgctcagtaacgtggtagagtggctagattccttcttaggagagaaagaaccagcttagtctttcctgacattccctgacaggtcctgttttagaactgagatatatgttgattctgatttgttgggacaaacagacgtgaatgattgtggtcatcagattctttaagtagacagcattagctgagtttccctggggagaatgcacaagattcactctgttagttcttcttgctgacagcaaggctggaacctgctggaaaacactcttcattttacctggtgcagcacccagtatagaaataggtatgaggccagatttgaggagtaaagataattatttgtccctcagtcaaaatagaaacttaaggaagaggttgctaaataagaaaataaattctaccaattctccagaaaatccctggcatttcccyaaccatgcttttatcagccctgctaaggatgaaataactctgtactgatgaaaaattatttgcgtttctttacactcagttttatcagtttcactgacctcctctccgttcttagcttcaatcagacttaggggcaggggaaatggggaagggagtggagtgggaggtagagatcaagatttgggtagagttacatataagctcatgtagtgttgtgttgtagtgttcagtaatgttgaaaactaaaatttggaatttttattgtgagaaagtctgtattttcaaagctgacattaacttttttattctttttaattttttctctttcacccaaaggtaaatccacaaaggccgaaatagttgaataaaaactttaataattttgtttttaattttgtagaacttgatcttttccctgaattaattggaactgaagaaataatcaaggtatcatagccatttttatattcaaatgttttaatattaaatggtctattttgaattgttgcttgggtgttaggtattgccacatgaatagaagttgtgtgtatgattcactgtttgtggggttagttgctaagctttatatatagatagtcacataatttatatacatgattctcttatgaagaagttgaaagatgttttgattggtatagtactaaaaaacaagaaatataaatggtgatgaagaaaaaaacaatgaactttaaaaataattatagctatgcactacagctataaactggaatttttttagtctccaaatttttctgaaaaactaaaattatatttaaccagttcttaacattctacagtttatatataaataaccaacgattgatagattaacgctaaatgtggcccaaaatataaattgtatatatattttttgcccatttaaattgtttattatttaagttgataaatattaatttactcaaagaacattgtgctgacaacaggcacttatactacgagtagtctatactttttaaagataaaatgtataggtatttgagactataaattttaacattattttatttttttaaatagagagaaaatgattgtttaatatcttttatatttcatcatatgccctaatgtgctgttcatcataactgaaattatatattcagttcaggtgctattgttgatgataatacgaatgtgtacatgtgtatagattgtgtaggagctgataaaagtgtgacaactagtgctgttatctagcaataaataacaattaggtctttcataggtataaactatcttgatattttatgtatcttatggctagtctctcttacaagggactattttaccaaaatgaccagtctactttgtaacaggagtttatagatttcagctaagaataactttatttgtatatgtacatacatgctcacatgcatatggagatatatatatatatgtatatatacacacacatacaagcgatcaacagaattaagtcaaaaaagaaattatatttgtgctgagttgttaattcaaataatgggtctgacatactgatgtaagcccttttttcagtaattggtgccatgtattaaatgatattctgtttaagttctgtcttttatataagtattacacatcacagactttttagaaaggaccaaggaacaatcaattatttttcatagtaattcccattaccatgattcacgatccatgcttagttactttagttacaagatccatgtttagttatttttcttctctattgccattaaccctaaggcaacttttaccataagcctacaaaagttatttaaaatcttccaatgttaattactagtaaatttctacataaaactataatattgtatttagtataatatttagctgtgtgaataggctacacatgtgactttatatgcattttaaaatattttccattttttaatggacatataatacttctacatatttatgaggtatatagtgatcaaatcagagtagtttgcatatccattatctcaaacatttaccatttttctgtgttggaaacatttgagatccttttttctacctatctgaaaatatatattattgctaactgtagtcatcctatagtgctatcaaacactagaacttattattcctatctagctgtaattttgtatcatttaaccaatctctgcctgtcgccccctcgccactacatttctcagcctctaataaccactattctacactctacttctattagatcaacttttttagcttccacataagagtgagaacatgcagtatttatctttctgttcctggcttattccacttacataatggaggtatatctttatttttgtcatacactctacaatagagatacctaaagctattcctgtcatggtgcctctggtcttgccatgtacatatatgacaaacacaagcagatcttcctgttagagaagaatgtgaagatatgtgagcaggctggcttgttgtagtcagagaaaagttcctagataggaggaaaaaaaaagcctcagtgcatcagcccaggtctcaacaggaaacagatgccacactcaagtggagtcatggaggttaatttaatcaaaaaggatgattcacaggtgtgggaagtcttaatgcaaacaaacaaggggtggcattgtacatttggtatgaattatatcagggactcgttgttacatctaaactgaaaggcaagagggcaaggagaaggtgcagagagaatggcacagcagatgctgtggcctctgtaatgagacagcaccatcctgtggtgaccagttaggtaaggaacctcccaaggaataaccacattatctggccacccrcctagaatgaatggagacaggtggagagaggctgtggaaagcaaaatgagaatatacaacacactgaggaaggagtcacctgagaaagcagagtagaattaaaaatcaatgtcattacttgttggtagaaggctatgatctagaggaaaatgaggaggagaaagaattcttatgacattaggcttatttggtttgtggggctttacccatggtggtagtacccaaagaaacagcagctctaattctttgagctggaagaatccttggcactgccaagggggagggaaccagctaccaccacacagatggggatttaaaataaaggatacaggagcagtgattggtaagcttggcttggtaaattggtagtagttcttgctattgaaattaactattgtattaataatatattgtcaaatcgaaagagacccatgtcacaatatgtcttcctggagcatgattatgagatgggatgaaaacacttcttaaccaatccactattcacttcctttgcttcatgcaggaatgaatgacaggctggaaaatgcatggaatatattcataatgacttttaatccctgaatatagaaataaagagtttgaaggatatttcttagatcctctccaaacagaaatgtatgactttgcaagacaaagtatctgtagcatgatcatggctttacactaacttttaaaaatgaagttgtgaaggataacatatgacacagatcaaaactacagtggaagagtcacaataactctataaagaaattgtaggaaagagtatttgttaaaatatttgtagtcagatatgaataaagtaatcatagggtatgaatgatatgttcttcttaaaatgttgacatagccaatgtgaccttacagcgatcaacaagatatggtagggtaggattaatgaaggtctaatcaccctcactgggttctgagaggttctgaacctcataaagtttatagaacgcatatgtatctgatgtgtgcatagttttttcccaactatgtaataagaagaggtgtgtagcattatgttacaataaaaattttatgaaaatttacattgcttataggaggatatgataaaggatgtttatgtggaaatataagcaaagagaaagaaatgtaatattattgtggaagtcaatagacattgttagatcatatagagaaaatggatgacatatctttggggaacttttgctgtgaaggagagacgagaagtagaatgataactagaaggtgaattagaggttttcctttgtgtttcctttaaataagagagatcagagttgatttaagctgatgagaattatctgtttgagaatttgagaaaacaaatcagaaacacaaaatagactgaactactcaattatgttcaattcccaggttcatgatagggactagatctaaaacacagaagtgcgaattagctttagaaaggaaggaaaacaactctttagttataacaggacaggaggggcagagataacttggttggtccctgtttttatgttaagaagaagtgtgtctttggtggcttctattttccctgaaaacaggaaggccatctgctgagaatgggaggaaaggataggaaaatgaaggtttgacagagttttggtagagagaaggagtgtggagtgataccagaaaactaggcaaatatttaggtttgcaaaaacaaggaagagtttagaaactccacactgccaagcttaacattgatccccagcaaaactctgcatcacattataaaacaaatatttatgagaacttctaaggaaagaagagataattggcaccaaccaattttccctaaaagcaagtcaagrcaaattattctcatttccttttgcattaagtttttaggtttgtagattataggaatattttatttaggaaattatttgggaaaatctctcaggtggtccttgtgaacaaggtatcacacagaatgtaaaacttcataaagaatactgactacttgtaaggaaatttttcaagggaatctgagagagtagccatttttagcactcaatataattcagatcaagtgcactaacttcctaaagttgtcacttatgcttcagaagatactcaygaccagccaaataattaagctgtaaataatgaggcagccattaagcttggaatcgtgtgtttcatacagtgcagatttccgtgtgtatgacacatgctcatgagcacacacagcttaagattcagattctttctactgatactggtcaagttctcaatggctgtactcagtaatttttttcttttaaggaacatggccttaaaatatctaatagatgatcaaataaatgacaattctaacaagctgttgggtacaaagatactgacaaaatcatgtcccacatgaactaaaaaaaaaaaaaaacttgataactttggcaattgagttttctaagtatataattagatataatatacccagttttatgtatatatacgtatatgtatatatatacatatattgaatcttccatgcaatgaagattatgcttaaagcataggtcttggttaacttctagctagaagactagacgtctcctcctgggtcattgcatggaagattcagcctcctgaatggtgattctaagggaaacacaaaattaaaaaactaggagtagaatcatatattgacaagttgcctttgaaatatctgcctaagtcttaagtggaaaatattaaaaaacaaaaggaaaagaaaaccaaacacctcttttagttctaaatcttccccttattatgaccttaaaattatgatttgctctaaatagatataattaaatattctgaatgttcaactactttggtctttaaaatagtttcatcgccaattcttattacaataagctaatggctatttaccttgatgcctgatgaacaaagaaatataaaaacaataaaataaatgccatgttaaataacactgtcaataaataactacagtgtgtcttccttttaaatatgtggtatctattcatttaaccacttctttccatagcattaaaataaaggcggccataaattaggtgttttcattacgtttaattactcccctgtagagcggatggtaaaggttgtaggttagaggtatgcattgtacagaatggtgttttatgaggatgagaagttcccaagataccacaagtgatgattggcagtgtaagatatgaagattttctttttctcttatttccttatgactcattaaatcttgtttgcttttcaaaggaggaggaagagggaaaagacattgaagaaggcgctattgtgaatcctggtagagacagtgctacaaaccaaatcaggaaaaaggaaccccagatttctaccacaacacactacaatcgcatagggacgaaatacaatgaagccaagactaaccgatccccaacaagaggaagtgaattctctggaaagggtgatgttcccaatacatctttaaattccacttcccaaccagtcactaaattagccacagaaaaagatatttccttgacttctcagactgtgactgaactgccacctcacactgtggaaggtacttcagcctctttaaatgatggctctaaaactgttcttagatctccacatatgaacttgtcggggactgcagaatccttaaatacagtttctataacagaatatgaggaggagagtttattgaccagtttcaagcttgatactggagctgaagattcttcaggctccagtcccgcaacttctgctatcccattcatctctgagaacatatcccaagggtatatattttcctccgaaaacccagagacaataacatatgatgtccttataccagaatctgctagaaatgcttccgaagattcaacttcatcaggttcagaagaatcactaaaggatccttctatggagggaaatgtgtggtttcctagctctacagacataacagcacagcccgatgttggatcaggcagagagagctttctccagactaattacactgagatacgtgttgatgaatctgagaagacaaccaagtccttttctgcaggcccagtgatgtcacagggtccctcagttacagayctggaaatgccacattattctacctttgcctacttcccaactgaggtaacacctcatgcttttaccccatcctccagacaacaggatttggtctccacggtcaacgtggtatactcgcagacaacccaaccggtatacaatggtgagacacctcttcaaccttcctacagtagtgaagtctttcctctagtcacccctttgttgcttgacaatcagatcctcaacactacccctgctgcttcaagtagtgattcggccttgcatgctacgcctgtatttcccagtgtcgatgtgtcatttgaatccatcctgtcttcctatgatggtgcacctttgcttccattttcctctgcttccttcagtagtgaattgtttcgccatctgcatacagtttctcaaatccttccacaagttacttcagctaccgagagtgataaggtgcccttgcatgcttctctgccagtgsctgggggtgatttgctattagagcccagccttgctcagtattctgatgtgctgtccactactcatgctgcttcagagacgctggaatttggtagtgaatctggtgttctttataaaacgcttatgttttctcaagttgaaccacccagcagtgatgccatgatgcatgcacgttcttcagggcctgaaccttcttatgccttgtctgataatgagggctcccaacacatcttcactgtttcttacagttctgcaatacctgtgcatgattctgtgggtgtaacttatcagggttccttatttagcggccctagccatataccaatacctaagtcttcgttaataaccccaactgcatcattactgcagcctactcatgccctctctggtgatggggaatggtctggagcctcttctgatagtgaatttcttttacctgacacagatgggctgacagcccttaacatttcttcacctgtttctgtagctgaatttacatatacaacatctgtgtttggtgatgataataaggcgctttctaaaagtgaaataatatatggaaatgagactgaactgcaaattccttctttcaatgagatggtttacccttctgaaagcacagtcatgcccaacatgtatgataatgtaaataagttgaatgcgtctttacaagaaacctctgtttccatttctagcaccaagggcatgtttccagggtcccttgctcataccaccactaaggtttttgatcatgagattagtcaagttccagaaaataacttttcagttcaacctacacatactgtctctcaagcatctggtgacacttcgcttaaacctgtgcttagtgcaaactcagagccagcatcctctgaccctgcttctagtgaaatgttatctccttcaactcarctcttattttatgagacctcagcttcttttagtactgaagtattgctacaaccttcctttcaggcttctgatgttgacaccttgcttaaaactgttcttccagctgtgcccagtgatccaatattggttgaaacccccaaagttgataaaattagttctacaatgttgcatctcattgtatcaaattctgcttcaagtgaaaacatgctgcactctacatctgtaccagtttttgatgtgtcgcctacttctcatatgcactctgcttcacttcaaggtttgaccatttcctatgcaagtgagaaatatgaaccagttttgttaaaaagtgaaagttcccaccaagtggtaccttctttgtacagtaatgatgagttgttccaaacggccaatttggagattaaccaggcccatcccccaaaaggaaggcatgtatttgctacacctgttttatcaattgatgaaccattaaatacactaataaataagcttatacattccgatgaaattttaacctccaccaaaagttctgttactgrtaaggtatttgctggtattccaacagttgcttctgatacrtttgtatctactgatcattctgttcctataggaaatgggcatgttgccrttacagctgtttctccccacagaratggttctgtaacctcaacaaagttgctgtttccttctaaggcaacttctgagctgagtcatagtgccaaatctgatgccggtttagtgggtggtggtgaagatggtgacactgatgatgatgrdgatgatgatgatgacagagrtagtgatggcttatccattcataagtgtatgtcatgctcatcctatagagaatcacaggaaaaggtaatgaatgattcagacacccacgaaaacagtcttatggatcagaataatccaatctcatactcactatctgagaattctgaagaagataatagagtcacaagtgtatcctcagacagtcaaactggtatggacagaagtcctggtaaatcaccatcagcaaatgggctatcccaaaagcacaatgatggaaaagaggaaaatgacattcagactggtagtgctctgcttcctctcagccctgaatctaaagcatgggcagttctgacaagtgatgaagaaagtggatcagggcaaggtacctcagatagccttaatgagaatgagacttccacagatttcagttttgcagacactaatgaaaaagatgctgatgggatcctggcagcaggtgactcagaaataactcctggattcccacagtccccaacatcatctgttactagcgagaackcagaagtgttccacgtttcagaggcaggttagttacggatcagaaggacagattgaggtgtggtggtttgcttgctctaaaagtaaaatgaaaattatagaaagatagaaatttggtaaaatggtacatcatcatttttaaaatcaaaacattcaacaaatcagtctccagtttctgaagtataattttatttattatttcaaacaattatttaacacattttggtttttaatttaattctctccaaaatagacaaaacaatttttatttattgtcaatatttcatactctacaggatgtcttttatgggtgggggcaattctgtttgcataatacatttttagtacactgcttttaaagcaagatcagagtatgctattttagatgattttaattttcatacttttgttctaaaataagttgtaaactaattctatttaattataaaatgaattattaaatctgagagtaatgtgacataagcacttctctctgacacacccctgtagaaaggaattagttaatttccacattcatatcagcttggggagctttatttattattattatttaattaattaattaattaattttgagacggagtctcgctctgtcgcccaggctggagtgcagtggtgcaatctcggcttactacaagctccgcctcccaggttcacgccattctcctgcctcagcctcccgagtagctgagactacaggcgcccaccaccacgccaggctaattttgtgtatttttagtaaagacggggtttcaccatgttagccaggatggtcttgatctcctgacctcgtgatccacccgcctcggcctcccaaaatgttgggattacaggcgtgagccactgcaccaggccagggaggtatttatgtatttatttatttatttagttttattactaagttttgagagttaataatgaagttaaaaaaaattttaatttttttgtctttctttatcttaatgttgcctaaagagggcagtgtaaaccatcaaaatacattttactttatgcctgctgttacacacttttttaagttaaataatgggcattaatatgtacagtatgtataggtattgtatcacaagatgtaaaacactaaacatttttctgtagaaatgaatttcatttgtgaatgtattttatgcaaattagcttactgaccagatgtttcttagagcagattatgtgcagtgtttataatacagatgtctgctttaaatgccaatggaaagaagagggaagttcaatcctattaagtatagaaaagtaatactttcattgaattggtcataagaattttataatttgcttttattaaatgtgaacgtatcttaaagtttaataatgaaactatttaaatcttaacatcaagttaaatgataggctaatgtaacaaaatgcactcattgtataaaagtgaatatttgtaatccagaacatagacatcagtctcattagaatatttttcctctttgcgatttcatctttttaattagttgtatattttttcttcagtgcagcagcaattaaaagtttgtacattttgatagaaaactttttctgtattctgaattgatacctatttaacattgcattttaaacacttaaatgctgatatgtgagaatgaataatgaatccataggtcactatagtcattagtgctgtcatatatatgaactgttatctgttctcaattatagtagctgctttttagttttcattagatttatgttaaaagaaaatatcaggaatccatctatctgtcttaccaggtagtgacattgatacgttcttgctagactatgctattatagaaggatatatataatgagatgctaaacctaaaattrttgactaaagcttagcaartttctcttcagtgcactaattagttttatttaattatcaagagtgtgttctcccactaattaggataaaacaatatgaatatgacatccaacattatcaagtaacataattagtgaagtaaataagatcaaacaagattaggggaaaattctggcctatttttaaaactgtatctataaaatcatatgtaatctgtcttatccaataattgaatatatccctttatcaaatgcatgcagactagctctgaaacttaagattttatggtgtatttctagaatgcagaacaatttacaggatgtgttctttaaaatactatagataaggcaaatattagtatccacaatttataaatgagtacactgacacccaaagatactagattatttgatccaggtcacatgagtaaatacaaaactgagcctggaaatgtctatctcttaaagattatgctttcatgttaggggccaattaaataaatgtaatgcttaaattgtaataccaaaattatactatcttattctcaaaacatcttttaaaatgttaatcttagttttttatttcttaattacctattaattaaatattttaatttaggtaactcatatatactactgagccatctcaaggagatattttagtctcaaataaataaaaataaaatcagtaaaattaattcctcattatagtacacaaagcaaccaactgattgtctgtgctttcataagatatcctattttgtgtaaaagagctaggtttcatgccatagtttgatcattctgactccttaattaaaggatttaagatcaaatatcccagagcacttttgagaaaagtttatacacaagactatatgtgtgtgcatgtgtgtatacagtgtctgtatataaatatgtgtatatggtatatttacatatataatgcattatatatcttacatatatgacatatatgataggacatatctcatatatatgtatgctatacatatataaatgaaatatgtaattatatatatatatacccatatacatgttgctttgaaaatttgtggctattgaagacctgcataattatataagcttacttcgtacatatattaatctacatcactggttctcaaactttaacatagatcaaaatcaactggaggactcgtcaaaacacaaattgctgacccttacacacagagtttctggttcagaagattttgtatggtttgagcgaagcctaaaatttgcatttctaagttatgatgatgttgatgctgctattctggggatcaaacgtcaagaaaatctgatatagataataatattaaccaccatttgtactaaatgaggtaccaaggactttgctaagtgaatgttttcatttattactgacacacttactttccatctaggtaacaatagttacaatagaaaaaactgtgaagacaaccatgtataaaataagatgtttttctaaattttataaggaaatgctcattgcattcaccatcaggttatttaggtgactagatgattctaaatgagtctccacaaaataatggccagagcttaggattaacattttaaaaaatggagtcttgggcttttctcacaagaatattagctacwactcagggctgagttggcttagaacattttcactttttatacagttttatgatttttaatcacacctttgaattccatttttcctagtaaatgcatttatagttataagaccaaacatcttgggaagtgtgtgtgccatttatattcctgtgatacattacatttatttatttatttatttatttatttatttatttatttatttatttattttgagatagagtctcactctgttgcccaggctgtagtgcagtggcgtgatctcagctcactgcaacctctacttccygggttcaggccattctcctgactcagcttcccaagtagctgggattacaagtgtgcaccaccacgcctggctaatttttktattttttattttttttagtagagatggggtttcaccatgttggccaggctggtcttgaactcctgacctcaagtgatccgcctgcctcagcctctcaaagtgctgggattacaggcatgagccaccacgcccagcctgatacattccctttattaatggattaaattcctgtccctttctgctatcacccttgatcaacagaagaaagctattattttaaatcttaagttctctccaattagatatattttaatgctatatatgtgcacttatattagtctcaattttcttaaatacatatttaagttaagtgaagtttctctgtctcctattacttaagcatcagaagtgccaagtgcataagaaggcatgtagattttgatgggaaactcaaatgtggttctttcagaatgtctgcaggtagatataagggctttttgtagcactgtcagcatgctgtaatgttagaaaccgttctcatgctcagtcatcttggtttcccactgaacacacctcaaagcaaagaggaaggattgttattggccacaaacactcactgttctgaaactctttttttaacaacttggaaggtaatctctagttaaagtgattttcaaagtgctagtacagtaatgtacctgactggcccccaaaataatcatgtgtcatcttttaaaattaactcaaggaccaaattcggatttttaattatttacacttgcatatttcagaagaatttcttagatctacatattcctccaattcacctgaaattgcatttttttttttttgtagaataaaacaaygggtaagaagaacattcaaaataacatttaaaaccaatctatatttaaaattgaaatcgattactggattgaaaggttatcctaatataagaagagttatcccaagatttttttcttcatgaaattattaattgcttctaactatttacctaatgcagggttaaaaataatcctatttaaatttattttagaaaattaatatatatggtgattcagtaagtagcgctgtttttcctgaccattctattttaaatcagtagtgatttttaaattacactactttgatttttcttatttagcaaggcttttcaaggcaatattatgcttacctgttgccaaggcacccctatctgggtgccaatctctgctgggatgttgtagttcttcttgtctaatagcctgccttacattttaaactttgttttaattaaattggcttataattgtagacattctttgcatcaaagagtcaaaattttaaaggtaagtaacagcaatgaaggttgcaattaatcagttgaaaaatgctgtgacttttccttcaccttaaatatcaattctctcaattttctctgactacagaggccagtaatagtagccatgagtctcgtattggtctagctgaggggttggaatccgagaagaaggcagttataccccttgtgatcgtgtcagccctgacttttatctgtctagtggttcttgtgggtattctcatctactggaggtaagttgagtatttgttttggaaaatttaattcataaaactcagattttgcccatatttcatctgaaaggtcttcaaagcatattcaaaatgtattttacctgagagctgccattaatttattcaaggtaaatttgtgaatccaaaggcacaataatgaaggagttaattgttcttcatacatcaattaaagataaaatggagaaacttttacccgttactatttaacacagtattttgacagttgtactttcatgttaatctaattaatagatatcatcatagcatttaacataagtctaagcttctcgttagttgttataattccaaaaattaagaaaacattttttatataataacaagtattgtttttcaatgacagaagagtttgtacaagatgtgtattaactgcacatactgataaaaatgataacctgtgcataaaagtaaaatcaagcaattaaactataaatataattagagactacagctaatgactatcttaagatgcacaggcatttaagatacatataatttgctttggggatgaaatatagcttcgctgtcaataatctattaagtccctaaagacaagaataattgtacccatcataaaatttccatcctgtggaaagcagaacacacagcaaattagtgtatttatgaggaacataggtcagtataactgtgtctgttagaaaacaaaggctttatgatgatataaggaatcatatgtgtaaaccaagaaagggcatagcatagtacttttataaagtatagcatacttttattttaaaaaagaattttgttcagaagatacataatttttttgtttagcaacatcattctgtaactttgtatcagcactctttatgtgttctctcaaaatatattctcgtgtttttttctgaaatatttaccattgttattgattgtttcccacatacctagtactgtgttaaccatcaggaaatatcaaaaatgaacaaatgaatgaaaaaagagtcagtgatttgaagaaatatatgcttattgagggggaagaatttgttataaaaatgtataaaatattacacaaaagtgtatgcgtagcagttgaaatctagtgctaaaagtagtcagagaacaaagaagcttggtaggccagaatgctcagggcaagtgtaaactaaaatgtaggactcaagctctgtgggagtcagaaaggaaaggaaaagggcattccaggcagggacacagcaggtgcaaagatcggsaagtagaaatgagctgtcttttgagtaaaagctattggatgtttcggacacagtgaggtctggagcatgtattaatagttgcatgtagttggacattggttggctagggtagaatgtcttcatgatcaactgtatttcatatctgacttcctttactagaacagagtagactgcacactatggagaacagatcatgcttttgttaccccacatgggtcaggagtctattttgttataataagaaacaaacaaacctggtttctttagtctgtatcccggtgattccaataattgccaaagattctttttcyttttttgctaaagggttcatgcttagcagagtgctttgaacmtaatccataatccataaatgtgtgttcaacaaaaataaatattgcttttctccccgttccccactgaacttgttgaccaaattttttaccacattgatatgtgtattcagattacaggtttctatctaatctgattttccctaccaaactacctttttaattaatgggagtcagtgttaagaattgaaaataagatggagaatatgaccaattctgcttcatagtaaatagtgctagtacaaagttccaataaagatgtcagatggtttataattataagattgaaattcgtttcttaatctgtgttacttttcaagtatattttctgaaaatttggaaatcagtatcttatttaatacaatttgatatttcatggaaaattaaaatttagagaggtttctatcttctattaataatgtgtcatttcatctgcattatatggggaaaagataaaattaccagtcaaaaatatattaatttgaccttcaataagatatttcttttttcttcacaaataacactttaggtaccttgaatgcagagtgtcatagtgtaaaatatatatgagtattttggccaggcacagtggctcacacctgtaatcccagcaatttgcaaaggtgaagtaagtagatcacttgaggccgtgagtttgagaccagcccaggaaacatagtgagacctccatctctacaaaaacaataaaaataaacaatttagctgggcatggtagggcatgtcatactcccagcttcccaggaggctgaggctggaggatcacttgagcccaggagtcaaggttacagtgagctgtgattatgccactgcactccagcctgggcgacaaagtaagacactgtctcaaaaaaaaaatcactttgatggttttatgtatatgttttatatctattaaatgttctgataaaaattgtcaatctttacttattttgaaatgttaagtagtgttagatatctgacctactaacatctgtttgaagttaattcactaaaaaatataaattttcatatcatcatatgctaggggtattatgtgctgaatcacaagatgatagttttagttaattcttcaaggtttatgtgaattattcaaattccagtgaagctacatttgtaaacaatatgatttcactagccaatatataaacattttagacctttgtaaaagctacagcttgagaaaaggtttaaaaatctaatgtcgtaccaataacagtcctaatggtaatgaagtccttaagaatttttccaagtttatatatttaaacttttttaaacagcttaattaggtaatattgaaatatcataaaactcacctttttaaagtgtatgattcaatggtttttaaagtgttctactatttccataatgactaatgatgttaagtgttttttcatgtgcttgttggacagttgtatatctttttttgataaatgtgtattcaaatcctttgctgcctattttttaattgggttatttgtctttctattattgagttgtggttttgtttgtttgttttgttttaaggagcagagagtttaataggtaagaaagatgggagaaggcagaaggaagaagctccccgtacagagacagagggagggggcctccaaagctgaaagagsagaacctgagttgtgtgtttttatatattctagatacaagtcccttatcagatatctgatttgcaattattttttcccattctgtgagttatcttctcactttcatgatggtatcttttttaaagtagaaaagtttttaattttgatgaggccaaattcatctattttttctcttattgcttgcaccttcagtatcatatctaagaaggcattgcctaacccagcaccacatggatttactcctagatttttgtctaagaatttaacaaaattaaaggactcatgcttcccagttgcaaaactttaattgaaagctacaggaatcaagagagtctggtactgccataagaatagacatatagatcaatggaatcgaactgagaacccagaaatcttatgtttacgatcagtggattttagacaaggatccaaagacttttcaatgggcaaagaatagtccttccaacagatggtgctaggacaattgaatattcacatacaaaaagtcaaattaaacctttttctaacactatacacaaaaatgaactcatagggaccatagacatcagtgtaagaactataaaattcttagaagaaaatatttaagtatgtttctaacctattttaatgagaaattaatctcaaagttttataataaatctgctatttcacctaatttacctaactcaagatattccccttattttttgtataaactttcagaggaagcagattttagccaaaagacagaacaaattcaaagtgagaaaatccagatctctttcctagttctgcccggcatttgctatatggccttgggcatgtcaattacccacctaggacttggtttctcctgtttaccatttgggtaggttcactagatcatctttaagattgtagccagcgaggcatggtggctcatgcctgtaatcccaaaactttgggatttatatatatatataattwtatatataattatatatatgtataattttatatataattatatatatataattttatatataattatatatattatatgtataattttatatataattatatatattatatgtataattttatatataattatatatattatatgtataattttatatataattatatatattatatgtataattttatatataattttatatattatatgtataattttatatataattatatatattatatgtataattttatatataattatatatataatgtataattttatatataatatatattatatgtataattttatatataattatatattatatgtataattttatatataattatatatatataaaaaaaaaaaagattgtagccagacccaggaatagaataatacacatttctaggttttcattataaatactgtgatgaaaaggcgtaaaccaaataatcagattaccattgattgataggacctatgtctacaagtttaagacagtcatcacttttttcatcatgcctgatggataattagcaggtgacgtagttatsaacacttagcacatagacgtgaagacattcactgcttatactgaacagatggactacagatactgaatcttgtcatacattaaataatatgccttgaaatcattttccagatgttttatggtataatttacatgggccataccataagtttctaagatgcaaaaatgacttcaacagggaagattttcaaaagtttttttttttttaaggcaaatttttgaaagcttttttaagagttggaacctaaaaagtaccaaaggtatacccaaccaaatggcacactatcaaaagcaatatagaaaaggacttcacataaacacaattgttttggctgggggtagggagatgaaaagcaatatgaattctctcttgatcttaaacttgaatttgtggatcattgaagatgtctactaacccagaatggaggtcttctggtaccagattgccttttaagtgtagtgtcacttgctatataaaactgcactacaaagtatacctaaccaatatgcaaatgaccttcatccataatttagcctatactattttaattttttttttttacttacaagctttttggtattatttataaggtcttttagggaaattaatgccaaatagggttattgggctacttattttctagaaccaacaaagatttgattacagatttgtttatttgtttgtgacaagagtagaattggtgtttacccacactactgtgaacactagcaacatattcaacctcaatgccaacatgttttaatttaccattttatattctatgagatgctgccttcttcccattcagtcrtagttattggtacatcctctatcgatccatctgcccatccagccacccattcrtccatccttctctacctatatatcttatctctccttccaaaatgttttgagatttcaagttatcccaattgaggctaaggtaggtaagggaatccaggatgcagctgaacaacatatgattggtgggatttacttgctattagaaatccatctaatcattcaacaaatattgaacacctattctactcctggcacagtattaagagttgggtttacataaaatcaagagatacggccccatcttttaaaaatgtaataaagatataagcacaaaacaaatataatacaaaacaattacactaaccaccaattaagaaaaatacttaaaataaataatgtagaataatgtccaggaaatgaagattactcttagattgattaggtgtatttttcaaaacagtcttttctttttttttcttttttttttttttttgagacagagtttcactgctgttgcccaggctggagtgcaatggtgcgatctcagctcaccgcaacctccacctccctggttcaagcaattcttctgcctcagcctcttgagtagcttggattacaggcatgtgccaccatgcccggctaattttttgtatttttagtagagacagggtttctccatgttggtcagactggtcttgaactcccgacctctggtgatctgcctgcctaggcctcccaaagtgctgggattacaggcatgagccaccacgcccagccaaaacagtctttatgtaggcttttgtgaatagaaatttgggttaggtgcagtggaaaaggagaagctgtggtgctaaaggctgattaggaaatgaaaggccatttcacagagaagatacctctgagctgtcttgaaagaaggcagtgtttgtctggcatattggccagtgagatattttggttagaagtagaggaatgtttaaagcagaatagataaatactgagtcaggagagaaaaggcaggtttatttatctacaatgtgattatattgttagagtataaacttcaataagaaaagtctaacagggtgtggaccacagacaggtagggtttaagtattgaaaagccttggatattataatctaaatatctgtaaaatatataactagaatatatgggcaaaagtaaaagggggatagatatgaacccgttagagctgttaacagtggatcaagaagacctattctttgagtaccatttgtaaatacttagaagggaatgagttttgagttagtagaagaaaaaataaaatctaggaaataaggaggattcaaaaggagtgatctccttctcactgaaggtattcaaactggaccttcttaaccataggttagagatgctgttgaagggattcttgtatcagctgtgatactgcactagctttttaaaggcattttacaacgttaagattcgttgaaatattttttaaaacatttcaccagcttgtataactgtattttggagaaatcaaagggattttaattctgtgaccttaaaagcatgtatcaagtccagtgtttccatatcaatatgtcagaatatgctccattcatagttgcacagataagccaaactttctgtatagtttctgccacaatctggtttcatttctgctcatgtgggccttctgtaggatagtttctgtggccctcatgtctctcattcctcatcagtctrccatactctccattttccaggatattaacctagttaggagggtccctttgacacttgtttctgtatccactcacctttctcttattcgacctgctctctcttgaagatatttctgtgttctctcaatatatcttctctcaggtgtgattatcaaaggcttatactaccacagtagatgactaattttgctatgtacgtcattgctttaagttttttgtttatttgcttgtgacatcaaggttataagtaaactatataattttacaccactcctacttatagaagttcattcatcagagaaatgcttcggggttacctccaacatgacacacatgctcccgagcactaaagactaacactgcaatgattgagacaaagtagtttgccttgtggggcttatattctgataagaagagaccaattataaacatataaaacaaataaaaacataatagtatttcaaatagtgatgtgccacagagcaaacaaaaaggcaaagagtagtgacttagtgagatagcctgacacttagctgtcatgatcaggggaaaactcagagggagcggcatttgggccaatgcaaaagtgatgggaaggaggcaggaagccagggggaatggcaagagtcaaggccctgaaaagctactgacagggcttcttcagaggtgaaggagaggaccagtgtgggctggatcctggtgggtgagggagagagttgcaggaaaggaagctactgaagtaggttgggggccaggtcagggattaaaaaggtcttaaagcccttgctaacataactgaatgtaattctaattgcagcgagaagccattcaagaattttatctaaaggaactaatttactagaaaaaaataaagatttaggtgtgtcactatrtaagaacaaatgttacattaaaactcattaggataaatgccttgtagcttgaaggtttagatggaaagtgagattgtcgttttcagtcaaacagaattcaagtgtttcaatttaaccactcatgaatattgctccaaataaattaaatgacctacatcaaagagtgtcattagcagttttaaktattcaatttttaaaattaaagatggttggctttactttatagcagtagttggttctttgctcttgtcgatagtttgtggtgtgctcttaccagatgctactcttattatccgaatgaaaatagattcaggtgatattgtagatcatagttgtcactgaatctgaatatattcattctcgaaaccctcatcaacaagactagcatctgttgggaagaaaatcgcccctatttttggttgtatgctcattattttctcatttaagttctgtcactcctgcattattacagcatgaagccactttcttttttcatcaaaatgttaccacggtgtagtttcatttctacgtagttcatagttcatttctatgtactatggactgtgtaggtaatttctacatagttcatttctacatagcttgctgctttttgctagcagctgtatatgctaagaagaacatggtcatttgagtgaatgttgagtgaaaatggctttggacattatttcttttcttctctggctctatccaagatggcaggacattttgggtattatagccacagtggaagaatatgtagggcattgaggtttcctatattaacamagtatcactttgaacccagctacaacttcaaattctgtctgtgcttttagcatgcctgatatctacttgctcttctgcatctgctacaggtaaaactgagataaattttataatttaacatcttgtgacttgttaaaatggatgtagatccagcaatccctcttctgggtatatacctgcttttgttttaattctggagatttctatcaaaattttcaagcagctcagaaattgtcttattttccatagcaactagtagtataaattgtgttcttttatttccaggaaatgcttccagactgcacacttttacttagaggacagtacatcccctagagttatatccacacctccaacacctatctttccaatttcaggtaatggcttaaagtgtgaccatgagtagctggtagatgttgaacaaaaagcacaatgttgaaaggtttgtttttatcgggacactatgcaaattgctataatgtagattagtaaatttttgtgttgccccaaatatttattacattatgttccaggtactcaggtttatattctgtcctcattaattttaaacgttcttaatcatacagatgatattgcaaaaatagtttataattgttcaggtgtattatgttaaaaacataaacatttatagcaataaaatattagttaagaataatggtgacttttacttattcctattatgttaatggaaacccaagcaacaaaagtcagattaagtcaatgcagaaaatgtggatgggaaaaaaatgacaaaaataaggataaagtcttgttcctttctgattacttgagtttatgtgagaaaaggkttttttttttttaacctacattagaagaaaagatctataaaattgtggtggtaatagcaggaaaagccatgaacacaaacaatatatggttgcttgaaataatctctcaaaatgttgaacagttgaatatttgggaagactttagctatttttatcataatttatctgaataacagtattcaaaggtagccagggtcattttgatagagacatccattaatcctagagtttacactataagtaaaatcataaccactcatttttaatataaattcaaggggtgcatgtgcaggtttgctacatggacatgttgcatattcaagccacttatttaattaacattttataacatcttggattgaaaagtggcaacaaaaaatagtggtctagaattgtgtgatctgggaaatagaggacaataaaaggaaagagaagttaagaaagtagggatacaaaaggagaaagtcatctatgggatcatttcacagatggcactttttaaattctctgactgatgctccatattccattgctagaggctcaagttctacaggatgttatcttctgaaatctcatgacttaaaaaacagaaaaaaagtcaaacattttatttatattttacatttatatgttgatgtttgttatatgtttatgtcatatgttatatatattatttatatatatttaactatgatattttctttttgtgccttataaacttaggaattgtgtttgctatttttcctcttttgtcaagtctgtgtctttaagcaccactgttttatttgtttttctagtttacattaaaatactattattttagtaccacagtgtctcattgccatattcagaatttttagaccaacagctctcagttatctgttacattttgattcccttcacttccaaacatgtctcttctgcataccccatcagcatgggtatgcagattaactaaaattttatccaaagtccaacatggtttatttttaacaaataaaataatacaaaatcagacctagtccaggagatccaaactcccctgttttgagtgtcaaaagagtggtgattcaagggcatctccttatttcacttgttcagttctcaaagattccctcttgatcacctgaatatgcatgttttcgtgtaaaaatcagaaagcaaaatgaatgttagtctcacttacttgcagaccaattaataaaagaaattaccaaaatacctgactgtcaataaaaggtactagtctacttatgaaaggaggttggctgtgcaggataacatcaaggggtttgaaggacatttactaggactaatgacttacatgtgacaaatcatttctgttttcttatctaattataaaagcttctamgcaagatccttctataagtgtgaaggtagaattacacctttgtctagtgtttcttaagcttgactgactaattcaattttagtattcagatccactcatctaagagagagaacagatggattccagtttttttttatcagcaaattcttggtaactgaagctttaaaatattagatggcctaaatgctgaacatctgttgctataaataactgtttctagtgaaatgtgtttgatgtttccttgtcagagaaatcacttgtaaaattgcatactgtgaactagtaatatattcagtctaagaaagtctttccaggaaaagaaaaaaaaatcagaaccagttaaaataatttggccccttcacaattaattaacagatccaatgactttgtttacatagcatattttcaagttagaattcttgaaattttacagattaaaagtcccaaaggcttttgacattatccttaatgaaattctccatataaatgttttctattatttacagagagaaggaaaaaatgttttcaaatgtaaacatctatttgactgtaagacattamattgtacagttttacaaaaccgaaattacactatttattatgcktggtccacactaaaattgaaactatattatttctacattttttctcagaatttacatgcaacatccaggcatgttaaagaaagttgtccatcaaaagatgcagtccactgataaggagtggggctatggtggtatttataaattaacattgaaaataagtgattttatctttaggtatagatggaaaagagattgctgaacaaatcagatttctgaaatacaggttttgattgataataaatgtagagaaaattggtaattgttgcttaacaattgaatgctgagatttagttagaaktatacaaataattgaagttgtttcagaagctactttataagtgataggtacgtttatttctgttaaattatgctctctaacacaatttttttattcacrtagatgatgtcggagcaattccaataaagcactttccaaagcatgttgcagatttacatgcaagtagtgggtttactgaagaatttgaggtatgattttaatatgtctattttaaataatatagaaaatagtaaaatttaaaagattcagcaataggctatttcttgacctaaagacagtgcaaccatttgcacttctagtaaaaatatgagttccataattacatatgtgtttaggagatgtgttatagttactatataatttagacaattggttttctattttaaaagccaagttgtactggtggaaacataaaaaacattgttcattttcttccataaagtacaaatctttaatattcttttttaaaatctgaattaataacaatgattctttttaattttctaaattmtataaattatactaaactactaaatttcatgatttccagccaaattacataaaaattcttaactgtgatttgtacaccagtgttaatgcaaaagcatttagataacacttacattataccaggtaaaaatgtatcttcttttcaagaaaatatgcatttctaaaaaaaatttgaacttcaaaatcagtaagttttttccaatgatattctgttaaaatactcttagacagaagggcagagaaatttactgcaaatttatcatggcccactgaactatcagctaagtagatttttcaaaatagagagctgtaagcacaaaggtaacaataaaaaccacaaaaaataaaagctaccctttgtgaacaccttcttacatgtcagtggactacatgctttcacattcaactttcacccatctctgggaattacttgttattatttctattcatattattgatgaaatcaaacttcatagaatttaattaacaactgataaataacagagttccattcaaacctaagtctgtgatttaaaaactcatgtcctttccactgtagctgtaagcaggaaggctgtcttcagcctccccgctggccattccccactagagagcttcatattgcatttttgcttctctctcccctaaccccagtggctctgcggacctccctctttgaagtactttgagctgtaagcctaatcacaaaatccactctctcctgattttctttccccactgcacccagcagttgcttcccaggactcacacccatcattatttatttagggaggcaaaatgttatagattagaaagctttaagaaatcaaaagaaagagaggtatgatatgtttttactaatttaaaaataatagaagccaatttatttaattctaaaagaaatctaaatcatagctacattgaataagaaagcagtgtgaggcagtactaagtagggtggaataatataaataattacatgtctaaaacatcaaattattttttattattttgacaggctagaggttacgcatgctatagtgttaactcaatgttaattttagtgttaactgatagaaattatcaggctaacatctaacaaaataagaaaaaatagacaatttataatataaattactgacaacatatacaaattcatggttttcataactataaaatcattttgaatattattaagcagtccaaaataattaaattaataaaataactycatgttttcacttttaaagttttttcttaattctatctcttttaactcactgcctgattcaagaaaattttacattaactgaataattagcttagtaactaatagcgttataccttttaagtggttcttacatcaaattgcttttaattgttcagaatgacttgctgcaaaagaagccttaaaaggttatgtggagggagattgggccatttgctgatgaatcagatttttattttggttatctactttctcagaaattataaggcttttattttattatataatactaaataattataaattctaaacagatagaaaatatttctgaaagcatattaactcatttttaataaaaaaatgggcagaaataaattttctttacttactgaagtttaaacaaaaagaggtctgctaattaaatatttagagtgttatgctatctaaattttgtttcaaaatgatgtaatgtgtatgatttttaaaatttttaggaaatgattaatgttttgatagccttaaatctgttacaaaccacctaataggaagctgtttactttttaaagtaaccccccaaaaaataaaaacaaaaaagcacatcactaattcagagtttcaaatagtgctactatggtcaaataaaataaaatttggatattagccaatctgactaatatgacaaaatgtatcatggaatatgtggttcctctcatctgcatttttaaaatcatcatattatgacatcactatctccttttaaaagtgttatgttttcttttacataattttaaagttccaaattattagacattytgatttgcatgcaactgtttgaaacattctgttgtgttagtatttgacaaatgtatttattgcatgatcatagttttccattgtaaacctaatatgaacgcttttttttctcatttgtcgtgtgctgwggaatttgatttctttacttttttggcattcattccctcattagacactgaaagagttttaccaggtaaggcattatttcactgcattttcttttagccaagaagtagttgtaacttttaaaaaatttcatttgatagattattttgtttgttttgtcttcgttattatattttaaggcacgttgtttgaaagaatgtgtgttaaaatgatttacatataattttttacaggaagtgcagagctgtactgttgacttaggtattacagcagacagctccaaccacccagacaacaagcacaagaatcgatacataaatatcgttgcctgtaagtatattcttaaatcagctctgacttcaatatcattgccattttggtgccttttaaaagtgtcctgaagtcatctgagagctgaccttagtgtggctgtttggggcctttttatcagggaataataagacttgtgttagataatatgtagcattatatcactctgacttaaataccttctgcaattaataacatctgttttatttaaacaaaacaaacttagaattttaatccaattctttcttttgttctttctttcatagactgttcatctcccttggtggtttttgtcattatttatatgacttggtcctattttcacctaggatttgcttactcttatgtgaatttaccaaccgaattacattttctttaaactttctcttttttcttctacctttacctgtttcctccctttcttggcattcttcctggggtcttataaagaattagttggattctttcttttaattctttctttctctttgttttcttagcctttctctctccctttctcctcaatgagcagctatctggcttttttcattagtgcaattttacgtaatatttctctatgaaattattgtctttcttctgtcttcttatagcacttctggttgcatttgttccctcttatttttgtttatattccccttcatctcctaaaattcatcttcgtgctccctccccactccaaaaacaaacaaacaaacaaataaacattctacttataccctttctatatattcagtggygtggcccttcctggcttcataggaccatggtattaccaacgaggttatttaaattctggtttcattctagttctgaaagccaatggagctgcactcttctccctgttactatcatgatctcttatatagtttgtatagatgttgccattctttccacagagtttacactaatttttattttttagtagagggctttatgtttgtcttcctgaactgcgtctatcctggctacacataaaactcacttgcttcttgagataaaattattagactttcctctacaagctaaatagaacatacgcatcaggtaattaagaaggagacagagattaacatttgatgaacacctacctactatgtggctggcactgtaaataagttatttcatttaatccctgaaacaaccaggcaagataggaaattgtccaattttagagataaagaaaaacaatccagaaattctaaaactattaaaaccaaactacaaaaataggtcaccctgacattgagacccatctgtcagttgccatacttccatttgcacatacattcctgtatcagtgtgacctgttaccatcacagaagtattcatatcccagagtatctctttaacttgttttggtttggtctgtattcacttcttcatccttgaaaagaataatcttctcagtgaaactgccatgtttccttcaagtaatactttatttctcatatgtattttctccaaataaatagtttttctgtagaactgaatttaatctcaaactcctgtaatcatactttgaattaccatagttataccttatatcatttaccagattttgcatccatcctgttttcactggcagtgtgctatctacctcctctgtgcttgagcagctgttctcctgcctccttttgaagcagtttctctttgaggctcctcctgaaagagctgtttgctgtaaccattcacagaaacttcctagggaacctttggctttcttctctatctcttcttccttcatcagcctcctgttcatccttacctagctttgtgagcctccccacccatcacatttttatctcttcgagaagctctccactgttcacagcccttgtaaccaaccttaaaattccatttaaaagaccaacttcagatgtcaacctctatagaaacttttatctcaaacyaaaacaatttctgttttcatatccctccactacattgcacctctcacttgacacctgtgtatataccctagtttcacctattaccttagaaatgttcctgagggtggagattctttttatatttgtctttgttttctttgctgtctctgtatccccaaaaagcctatgaaagtaaatgattgcttgtgttgattttaattgaatgaaataaattattatgcaaatatgaattatctttgtgctgaaaagtagtctgtgctacaatgaaatatattctctttatattacagatgatcatagcagggttaagctagcacagcttgctgaaaaggatggcaaactgactgattatatcaatgccaattatgttgatgtaagcatgttttaattgaaaattttatagaaatcatattagactgaattattataccataatgccatacatgcatacatatactagtgcttaatgtcatgttattcgatagagaataaaaatggtaaagtaacagtaaataatttttaagagagcctatgactaaaaattttcatattaaatgacaytcaagctattttacttggtttatctcctgagtgaggaaaggaattcatgatgggagtgtaccttcagggtggaatrggtagattcagataggtttctaactctttagatgtgaagggcagggctgggcgcggtggctcacgcctgtaatcccagaactttgggaggctgaggcaggcggatcacgaggtcagaagatcgagaccatcctagctaacacggtgaaaccccatctctactaaaaatacaaaaaaaaattagctgggcgttgtggcgggcgcctgtagtcccagctactcgggaggctgaggcaggagaatggcgtgaacccgggaggcagagtttgcagtgagccgagatcgcacttctgcactccagcctgggcaacagagygagactccgtctcagaaaaaaaaaaaatgtgaagggcagggccaaggcttattttaagtttcccatagctcctggcacaaggatgtgcatttagctgatgaacaaaaaatttccatagtagtactgattaaaaggcaaacatgattattaatccagttatcaacctttataattttgggtattcctcaggatacccagctttgtggaacttactgggactctccagagactgtagaccgctcactaactaaattggtttttcactgtgatcacctgaatgtcagcagaactcaattacttccctaagatgcacctctcagtctagctggcttcaggttaatactgtgtggaatactgaattcaaataaatgagtacataagtataaagtgggtttgttacaggcaactgtttcatgcttcctgaggaggaaatatgcatgtcagaatgaacatgagatctggagttagaactgattttgaatcccatctctgccactggctagctgtgggactttggaaagccacttaactcctctgagctttaggttcctcatctccacatcagggttgatgcttccattttgcatagatgaaagattaaggttcacgttctgtattagtctatgaaggacactgctatgaaggaatacccaagactgggtaatttataaagaaaagaggtttaattttctcatagttctgcatggctagggaggtctcgggaaacttacagtcatggtgaaaggcacctcttcacagaatggcaggagagagaatgagtgcccagtaaggaggaaagccctttttataaccatcagatctcatgagaactcactcactctcacgagaacagcgtgggggaaatcaccctcatgattccattatttccacctggttcctcccacaacacacaggaattatggaaactacaatttaagatgagatttgggtgggaaaacagccaatccatattatgcccataaaacatcttgtacaaaatgggacacagtgacgaattgctaataatgattagcacttctcakcacrttgaagtagagtaaggaggttacactccagatgcttttttaagctgttgtagacatctgagcccagtgcctaaaatacatttcaaagcagtgctattaaagacttgattttaagcatagcaagtagaccgcaaatggattaaatacacttggaatacaaatgcacagaattatagttgtgtcaaagcaaagagagctattctttttttttttttttttttttttacaaaaatgatagggatccttctgcttcctaaccaagagtattttctaaccaagagtagctatcttagttggtaccatcaaatttctccaactttgcaagtttattttttatggttttcttttacgaaaaattatgctgaccttaaaaacttaggcattgtacagttaaagatgacatataaatcagttagtaggaaacatttgtcatttaattcttcagggctacaacagaccaaaagcttatattgctgcccaaggcccactgaaatccacagctgaagatttctggagaatgatatgggaacataatgtggaagttattgtcatgataacaaacctcgtggagaaaggaagggtatgtagataatctgttatgtcacccccaaaaaagtaattagaggtactttaaattagttttaatagagtcagcattaggaaggagccaaagttttgagagttatttgggattcttttttagtaaatatgacagctaaagggaaactgttaatactgttagtcaaaaagtttcattatgaatcatgctrtctgccttttaaacgcattcttcatactgtgggagaagtaaatgggactcattgaaaagcaatgtagagtgaaatcgattttaattcacaggacatggattttagtcttggctctgtaacctgaatcttctgactcacttgccttatctgaaaggggaaattttagggtacctcatctcagtctcgttcagctctcagattctatccctagcctcctccacaactaatttcagtcacttataaagaaaataaaacatttagaagagtgaaggagtccattcctgtcaccatctcagacctttactgatttcagggaatgacttttacatggagcatttgaaatacagaagtaacatctacattttcttttgcagagaaaatgtgatcagtactggcctgccgatgggagtgaggagtacgggaactttctggtcactcagaagagtgtgcaagtgcttgcctattatactgtgaggaattttactctaagaaacacaaaaataaaaaaggtgagtcaacaaaatgatgggcataatcaagtgaacaatgcatttggtcattttttaagtgaataagcgatagaaccaagaaagggtaaaaagcatataactaaaggcattaaaaattcttgtaaccaggccaggtgcatggcttatgcctgtaatcccaggacattgggaggccaaggtgggtgaattacttgaggtcaggaggtcgagactagcctggccaacatggtgaaaccccatatctactaaaaatgcaaaaatttgctgagtgtggtggtgcacacttgggaggctgaagcacaggaatcacatgtacccaggaggcagaggttgcagtgagctaagatcatgccactgcactccagcctgggcaacagagtgagactctgtcaaaaaaaaaagaaaagaaaaaaaaaaagaattcttatcacagctgccgtcagtcctaaaggtttctttcaggtctctagatgcctgttgtggctttggagccagactggttttgttgctgatgtttaaagtgaatgtgatacatgaacagaaattcctaccttgtgtggcaactgcataggatggccctgacacaatcccaatattcaactaaaaagagtggagagtgaaacaagaaaaagaaaggaaacacgaagaataacgtattactcaggttcttcaaagaaacagaaccaacagaatagagagatagagaggtttacatttttaagaattgactcacatgatcatggggattagcaaatcttaaacctgtaggacaggctggcagcctagaaattctggtaggatctttacgttgcactgttgagaagaattctttattcttcaggtaacctatcctatcagtctttgttcttacagccttcaagtggttgaatggagctcacccacattatggactatgatttgctttactcaaagtctgctgacttacatgttaatcacatctaaacaaaatacctttacagcaacattttgtgtgattagtgttgaccaaacaatgggccaccatagtatagccaagtggacacaaaattaaccatcacaaatgacactctactttctttcattcattatggaccctcaacatcaaatcaagctatgattcctgacttgctgttgaagaaccgtgtgtgtgtgtgtgtgtgtgtgtgtgtgtgtgtgtgtgtgtgtgtgtttgactgttattaactgtctgaacttttccagggctcccagaaaggaagacccagtggacgtgtggtcacacagtatcactacacgcagtggcctgacatgggagtaccagagtactccctgccagtgctgacctttgtgagaaaggcagcctatgccaagcgccatgcagtggggcctgttgtcgtccactgcaggtgagtctcagagatgtgcctctaaacccatagaattgcttatacttgcaaaaaggaaatcaatggaacaaagcttttgcccaaatgggaatgatttcttgaaatgagggtgatgaaattatatgttcattttcataagtattgatcactaggaaatgaacatgccagactcagaattggattgctgaatatttctaagcaccacatattttttgatgttgattattttatttgattgttcaactgcatttcagcttattaactatttgaggcaggtggaacaatgtttttgttgttaaacaaatatttacctcaacatataataccatgggataaaaatgcttgagctacaacccctgtccctaggagttaaaattctgttttagaattattatgccaggcttgtatcacagaagccaaagcacacagattgtgagaaatttggcaaaatatatttaagttgtttttaaacattttgggaccagaatccctttttcattttcttgagttttaatacattacattgaatgtattgtcaattcattgttgccaagattttttaatttccaagactaggttgataaatagaaataatgatgtttcaatgaaagaggaaaaatgttgaaaatccttatttaatgttttcagttaaaataataatagcagttaatatttattgagtgctgactgtgtgccaagccttagatcacaaaaatcaaatttgtttctatgtgaagtattgttatcaaagcagtgtgtttttagagaatcaagtgtttgcctttgatatatagcttatctaacacattctaattaccatctcaggagttaaatttgagagacccatcttgaggctttttaatctgttagcctgattataaactgaggaaaacaggaagatgcaagaaaaatagtgctgaaggtcagggattgtttcctagcaaacggagaaggaccaggctattgtgcagagcaggtgctaattttccactctagcacttcctacttgtcggaacatttgaaaagaatccctgtccgtgaattctgtccctctgctagaggctttgaagaagtcgatagataatggccctttagaaataactgaagtcatgctttattcctcacaatctcactgaaatgatattttcagcagaaagctttatcaaattctttttcccattaacgcagaaatctttacaaacatgtctacctggaaacatagacctagggactttttcttttcagaatttggtgaagttaaagctttcacttttgtcagattaaatgtctatttgccacactctgatacataatattttcattgtacaatatacaatgaataataaatatggtttttgaaagttttaaaatctccaacagatatagtgaggttgttttgcaattagacacatgacaaaacattagaaagggtacttctaaatttgttgtgtaaagcattacgcttaattactaaactgtttacaatattgaattgccaaatgtattgtgtggctcactcgcttgaagaaggaagttattttaatcaacatgacaaccagtagtgatctatttttcaaatttattttatgcttaacattgaaatatttatttcttggtcttctcttcagtgctggagttggaagaacaggcacatatattgtgctagacagtatgttgcagcagattcaacacgaaggaactgtcaacatatttggcttcttaaaacacatccgttcacaaagaaattatttggtacaaactgaggtatgatttttaaaaagatgattttattcatctaaggtatggaaatgtcactaaaatgtaggtgtattcatctcctaggactgcaaaacaaagtaatacaaactgggtgggttagaacaacagaagtttattgtctcatagttctgatgtctgtaggcccatgcccttccagaagcctctagaagattcttccttgcctctttcatctcctggtagccccatgcattgcgtggcttgtggcagcacaattccagtctcagtcttcacttggctgtttccctctgtgtctgtgtctgtatccaaattttcctcctcttataagcataccagttatcctcctcctccagttgatctcatcttaactgattacatctgtaacaaacttttatgcaaataaaatcacactctgagttatcaggcggttagagctttaatatatctttgtggggggacaccattcaacccatgacaccagtaactgcagctatgtcatgaatgagccagataaattttatctgttttgtgaccccaaatagggaatatcctttraaatgacactggtcacagagaagatacagcaaaagtctaagtagagtggtccacacacatccttgctagcaaaaatctcaagttcttcatatacatagtggatgaatcaattcattttttaaaaaaatatgaattatgcttaaattatatccattttaagcccatatagtttacccgtaagtgacagaacagtgtcagcaaatctgcattttatcttcactgtttctaaataaaaatgaacttaaatggaaacctatgaatggcagcttgaaagcaatcagaaacacatggctgagtgggcttcaaaacgaaaccacaccaaacatccttccatccattatcctaagcaaacttacacaggaacagaaaaccaaataccacatgttctcacttataagtgggagctaaatgatgagaacacatggagacatagaggggaacaayacacactggggcctttcagagggtggaggatggcaggagggagagaatcaggaaaaataactaatggactaatgggtatgagccttaatacctgggtgatgaaatagtctatacaacaaacccccatgacacaagttgacctgtgtaacaaacctgcacatgtacccctgaacttaaaataaacattaaaaaataacattctggtcatataagaccaagaaagagtcccgtatgtgaaatatcagagaactattaactatatataaaattgagttaaattgtatatgacaagcgaaaaggagagttggcgttgccagaaggggtaggcccaccagaagtgtagaagtcaagaaagccctctcatgaagtatagaggtgtcaagtttgaaggataggcagagaggacattcctttgccttgccaactcttcctgcctcctaacctattgtgtattgccaacaatacataataaatgaagaggtaaggaatgagaagaggttctttcttctgtgaccacttcctttcctctgtctgacttccttccaggttttgtaagcaatcttgtgtgggtcttcccccattctgtaaaactctccttgtctgtcaatggaaggtactatgtttgtaggtagatacatatgaggaaaacttgaactaatgttgcttattgtcattgttttgccaggagcaatatgtcttcattcatgatacactggttgaggccatacttagtaaagaaactgaggtgctggacagtcatattcatgcctatgttaatgcactcctcattcctggaccagcaggcaaaacaaagctagagaaacaattccaggtgagtcctcttggaagcctcttggatgtcactacagaactgaatgtccctgcrtcttctcatttgagttgacagggtcacgttgagtgggcagtrtgggtacaatgactttgtatttgagccatcgttgttccttactgtgggctacagtgccacatggtaaatttcaaggagaaacataattctgagcagcaagaggaaaagttctcagaaaccttaaactaacttttataaatgcaaacttggtcgagaaaaraagggcacagagcataacagaatgaacagaaagaacttgtaaaacatactatataagtgctctttttactttgaaaaaaaaaaacagaccacttaaacatgagtgcggtggctcaggctgttcctgatactctttggaaaaaatctgtgtctcacttgaaacccctggaccaaagtagtacacactggaataatagcttcttcaaccccagtttctccccctcaccctgtctcaaggccataagccagagacaagagcatgttttgtccatattgtacttcccacaataccagctctctgactttcagaaatcagtaggcaaagaattcagaaagcaggtgttaccggacctgccagctgagaccaaagcatgtgcagaatcgtagctttccacaggaatgggggctatattatttcactccacattgttcctgtgctatctgcttgcttctcagagttcctggagaaatagggccaaattttgaagaatgaatatctgggaagaatttggaagaccttagaaaaacccaggagagttaacaaatgttgagatttcacttatttctcctgctttgctccccagtctacagcataggatgttagccaccatgaattcctttgggccatttgccttttaaattactgcacggtgtgcctttggaggtgtaagagaaagattgggatcaatactgagtttagaacctgttgtcagaaagtcatacatgttttactcatccaagcttatctcagtcataaaggaatgccttaggggggaaaagagtatgcagttggttttcagataataaagaaatgttaaaatgtaattaagttgtaaagatatcttttccctaaataaattacacacacacacacacacacacacacacacacacacacacaatattacccatttcaaaaaaactctcatttaaatatgatttgcccctgtgtagttgcataaaaacattgatatggtaagctaaataatccaggatcaaaatgaaaatattaactataaggtcagaattcaattgaaaagagagatattttactctctttcctgttaacatcataaatagggaaatgtatttgtgtgtatgtgtgtgtaccatcccataaaaagatatctattcgagtttgtctgtagaaaatttccttgaaataagttgaatatctgtgtattcagcaagtacttatcagacacctgccagatgccaggcttttgtgttattagggcgcaaacaagaatttgtaaaataaataaataaagcacacccagctcctagtcttatggtgcctgcagtctattagaagatacaggtaagaaaacacaaacaggccaggtgcagtgggtcacacctgtaattcctctgttttgggggaccatggtcaagaatttgagaccagcttgggcaacagagcaagaccctgtctctataaaaaaattagctgggtgggtggcatgagcctgtagtcctagctacttcagaggctgaggtgagagaattgcctgagctcagaagttcaagattacagtgagctatgattgtgccactgcactccagtctgggagatagagtgagaccttgtctctaaaaaaataaaaaagaaagaaagaaacagataaacaaaatagtgtgaaaaatgccattatagaggtaaaacaggatgctgtaggagtacaggtaaggatgcaacttaccagaggagaattgcgtaagatatatttaagagttgaacacaggatttggtgattcattggacattgcagagagagaggagagaaaagacacaagcataactactcagattctgtttgggcactgggaaagtagtgatgtcattcaccatgatcgagaattcaggaagaggaggtggtacatgcttgagaggtgtggtgagggagaagacgtgagatatttccaaatctaccttatttttaggttaytgggagatgtcccaataaacatgtatatttggcagttggatactggttctgaagcataagagaggtctggcctgaagaaatggatttgggagtgatcagcgtagagatggttccttgaagcctcggaattggataaaatagccaattaaaaatgaaatgtctaagaaaggttagaaaggattacttaagaaaacattttaattaacctatgaatggccagcccacaaaggaaaggggggaaagtggcatcagaaggtaggagaaaattcgggacagcggaatatactaggatccaaagtaaataatgtttcttgaaagaggaagtgaacagagatggcaagtgctaatgacaaatcaagtatgttgggaatggaggaggccgttggatttagacagaagtcattgatgacctttgtctaagagctatttgaaaagtatagcattgacaccagattacagggagttaaggagtaaatggatttgaggaattaaagacaattatataactcttaaaaattgtttactctggatagaatgattaagataactataagaaaactttgagttagtaagatttgggggktgtttatttggggtttctttgcttatgttttaatatgagacatgagagcttctttaaaaactaatgggaagggagataattggagwgtacagagaccctgggtggtacaaagaggcgggattcaggacacaggtaaaggaattagtgttcaaaatcagtaaaacctatgtgcatgtttacagtagtacacatataggctctaaggctggaggctgaggaagtactctacggtttctattatctgtgaagagaaggtgggtgtgtgtgagtgtgtgtgtgtggtgtgttgctacatatattcctttttttttttttttcctctgagacagggtctcactctgtcacccaggctggagtgcagaggcacaatctcggctcactgcaaccttcctctccctggcttaactgatcctcctacctcagcctcccgagtggctaggactatagtaagtgtacacaaccacgcctggttaattttttaaatgttttttgtagagatggggtttcgccatgttgcccagatggtttcgaactcctgagctcaatcgatctgcctgctgtggcctcacaaagtgctggaattatagccatgagccactgcrcctggcccattgcacacatactctaaaataaaactgttaatagatgcagagggaaaagggagataattttaaggaatctrtatcatatcagtcattttctcagagtataayacagtaaaaattggaaattgacagtgaaaggtttccataaaaattttgatatttgggcattaaaaatacccttttaaataatatacatatttaagaggaaattataaaatctttagaattaaaggtcaaaagaagcactacataacatttttaaagtttttaaaattaaatagaaaattaaaatgattaaataaagatttaacaaaacctaatgcaggttctatcaaaagactattaaaatagacaaacctgkgtccagattgatgaagggaggaaagaatgtgagtaaataatattgagattaaaaaaagagatataatttagaaacatttttaaacacaaaagcatactttgaatatatttgtgacaatacatttgaaaacctatatgaaatgaataatttattgtatgttctaaaataactaaaagcatatcattggattgtttgtaacacaaagaaaggttaaatgcttgaggtgatggatgccccatttaccctcctgtgattattatgcattgtatgcctgcatcagatagctcatgttttccataaatattacaccttttatgtacccaaagaaatgaaaactaaaaagaatttttaaaggaaaaatataatgaaaatacactaaaaatatatagaaaatttaactaggccaatagccattaaggaaatcaaatcagctgcctaaaatcccaccttcaaaatataaccaggcccaaaataatttaatgtcacattttaccaatttttaaggcacagaaaattccaaatgttagcataaaaaatccaggtggaaaactaacccagctattttattggacaaatataactttgataccaaaactgaacaaagacagaataagacacttataggccagtatcaataatcttatttaaaatatcagcaactcaaatccagcagtgtatttctttaatatcatgagcaagtagagtttatagggtttattccaaaaatgaaatgatggtttaacactggaaaatatgaatagatttacataaagaaacattatgaccctgtcaattaatacaggaaaagtagtcaatcaaattctatattgttcatttaaaaaaagaactcttagtaaaccagaaatagaagaaagctttcttagccttctagaaagtatctgtcataaaactacaataaacatcatacataaaaattaaaattggaaatgctcatagtagattccagaaaagataaggaatgtcaattattggccctgctattcaacattattctggaaatagaattaaactagatagatgtataaaggtagaaaaggatttgcagatagataatataactacctgcaaagaatatcaagagaagcaaaagagaaaataattttctttagttagagtttaataaacatacataaaaatcaatagcattgttatttgttagctttgagtgattagaaaatgttttagaacaaaaaagaacccaatcattaacaaaaacaataacaaaacagtagcaaaaacttcatcatctcaaaaaagacacttaacaaaatgtgcagtaaatatagagaaatttataaaagtgaattgaagagcataaaattaggcccaaataaaatataatgttgatacatggaaatattaagatattgcttctccttacattgactatagaagtcaatgcagtatcaatcgaatttatggcaggatttttcatggaaaatgtagaacagattttaatttagcatggaaaattaaacagccaaaatatctcacctatactgaaaaggaaataataatagaagaattctgttgtactgtatatggaagacttatgatgtgatataatagtattggaaaacggaggaatctagcagaggaatgatgcatttgaggaaatctgttatgtggtagagwtaacattacgtatcagtgaagaaacagcagattaatctataaataacattgggaaaattttcatgtcaaaaaaagtaacattgtatctctaccactcctcaaacactaaaatgtattcaagatggattaactacctaaaggtgaaagcaaacctttataactattgtaagatcattttagaaaagaaaatattgggttgggcacagtagctcacaccagtaatcccaatactttgggaggccaaggcagggggattgcttgagcccaggagttcgagaccagcctgggtaatatggtgaaaccccttctctataaaaaataccaaaattagccaggtgtggtggtgcatgcctgtagtgccagccactcgggaggctgaggcaggaggaactcatgagcacaggagattgaagctgcatgcactccagcctgggtgacagagtggacacctgtctcaaaaaagaattgaaggggaggagaggggagggaaaaggagaggaggggaggggaggaaaatgcacagcagggcatatattggaaagtatttcttaataacttcaggatagagaaggacttcttacgtaaaatgataatttgcagaaaacttaaataagaaaaataaattggctgtaaatctctgtgtgattaaagaaactgaagatgtttccaactttttacacactatagatttacattcaagacagcaagaaccccctacaaattaataagtggaaatgaagtaaaaatatgaaaaggcaatcatcaaagaagatatcttaatgactaatgagcaccaaaattcacaatttcacagaaattaagacgatgcaaatcaaaaccatgatatactatttttcatttayccgactgtcaaaaataaaacactgaataactgaatactcctaatgctctatggaaaccgtcacacatgtgcacattaagagacatacaggagatgctcatatctataaagctatacaattgcaaaacactgcaaatacccaaatattcactagctgaggagtagataaacagaatgtagattattcatgtaatggagtagtaacagaaggaataaataaaattgaattatatacatatatatgtatatacacacacacgatgtaatttacctccaaacgtctgtgtgagatttaaatagaggaaatggaggttgcacatctatagtggaagccgtgaggaagattatctcaatgctaaaagaattactagagatttctttgcttcttgtaactcccctggtgtaaaacayagaagctccaggaagttcactaaaacaaggttaaattcaaggaattgttggaaaacatttcatatatatttttagtcagtatcttatcttgattggtgtgtgtgtgtgtgtctgtatgtatgtgtgtgtgtgtgtatttgggggacttaaatgaaataacctatatatttttttactttcttgcccagctcctgagccagtcaaatatacagcagagtgactattctgcagccctaaagcaatgcaacagggaaaagaatcgaacttcttctatcatccctggtaagttgtgttgatccttgaaaaaacaacttttttaaaataataaaagccttgtaggaaatttggcaatatttgtatacctttggagcaaatggagcacattcaaatatttttaattttgtccaatatgtaactgttccaaaggactcataaatccttgaagtcttatctaaatatgcaaaatgtatagaaaaattagcttacagatcagagacacttcaacttgaaaaatgtagctatattttacatctggcatggggaaaagatggtacagtgctgtgagcatgagttgttttgttttgttttgttttgttttgttttacaatgaatgttctgtgttccagtggaaagatcaagggttggcatttcatccctgagtggagaaggcacagactacatcaatgcctcctatatcatggtaagtcagagaagtcactgaggagactgccagcttgtgttacagggatcaaaaccagaatgggctgccagaagcaaagactacaggcatgggcaaatgagtggtaaatttaagttaaatctgttgactgcaagcccacagtccacagcaacagttgtaataatggcatgcttttatgtgtgctgggactgaagaaacctcaagcaagaccaattagcagatgcaggaacacaaactcaccatttagggctgatgagtagatataaaacttatacctgcttatctaaaaggctttatttccttcactaaggcagaacccctgagcaaacccgggattcactggcttcagcaaagcctaacctcactgacatcactacttcaggtttgcagcatgatttttagcctgcaaactgggctcattttaggacctggatttctaaagatacaatgcttttcttctgcatttacatcttttgtgtgagggatgagtgttttagtagctgttgtgtgaccttcattaacatttaaggtcaatcaatcacggagcttggcttctgatgaaaacctaattcttattccaaaacctctgttctatttatccagcaaagaaaatattaaggaatatctatgcaggaaacacagggatgtgtggtagtggcatctaaatacattcacatttcaaatgagccactgggtgataggaatgggatctgaaagcagaaggggctagaagagccaggactttagtaacagtataaatatcacagttaatacaatagctctagcttctaggtatctgtagcaaaatatgcaagatgtctccctggttcctctcttgtagaggcaaccaaggtgtctggacaccaaagtgggaaatgtaaactctcctgtagatttcccactctctgtggagtaagagacagtatccacaaagcagtttggtaagtctacagctagaggtgtgtttttaatgaaactgttcaagtttctctatcagcttagctgatagctaccattctcagtgaccaccagatgcccagatgaaagagcaccaataagggattcacctgcatgggttccattgagcagtctcacctaaagtcttcaatgaaaaaccacagtgtgaaaattcagagtttttagtatttatggaccctgaagggttcatggcactggaggccacatgcatagagcttaggcagagcaagcagggaaagagagaaaaggacccatggaccaatgcccccactgagtccagggcattatccaagtaggttttccatggggagttttacttgatgagtttaaagcaagcaggcacaagtcccaggaggttatgtagtgactgagaggtatttactatggcatatctgcaaagtccatgtaggtgtgagggtcagcgaggccagccaagcaggctgttctgtagtgaaatggtcactatggagcagttttgtaagttagacaactggatcgatcactttaaggaactggtggatgggacgatgtagaactggaaactgtatcaaggtgactgaaccctgcttctggcatgacaaagtccaacttatatttaaaaggaatgccaaggcaacataaaaatcataaacattcactacaagatgataggtaaccttgaatactacatctgacttcttaaggcaaacttgggcacaatgcttaatttctaaagcctcagtttaatcatctgtaaaatgggggtcacagttcctatctcacagtattgctgtgaggaacaaacgatttaagagaaaaaaaaacacatagtgtcacacctaacatacaaagtgcccagtaagcattggctataataatcatattactacatatagacacaatctgcaattcaaaagactattttgacttaaggtccattgatgtataaatgcttatctgaatgtttaaaggcatacgccagtgctgtttttgtcttctctttggttttgtagggctattaccagagcaatgaattcatcattacccagcaccctctccttcataccatcaaggatttctggaggatgatatgggaccataatgcccaactggtggttatgattcctgatggccaaaacatggtaagtcccttagaccacttttgggacttcctttacagaggaatatcaggttacaaacagcaaaaagtccagcatacaaacaagcaaagtaattttgttttcaactaataaactaatgtcattgaaggcatactcttctgctgttgggcttggtttcattatacaatctcctaggtcaaagtgatgaataaaagttttaaatgaaagtagatataaatgaacttaaatgtatgtgttttgtgacattgcttaagaaaattagaatcacagccatgaaagaaatcagtctatatgcttctatttacatttttaaaataaaatgtgttagaatatttagagattccctgagtttaaggaggtctctaattttttctttaaaaaaaagacctagttagaattaagtgatttcctagtataggaaggacttttttagtataagaaaagcagcgatatcccatccccctctttatatatgtttggagaacccaacaagtaaaataaatatttcatttaggctttacatgtttacttagctttgatattcagttcttatctataaagttattgtgtgaccattacacatgaggctggaaatttctgagctcttaaaatcacttgaatcttctgtactcagttgtcaattacagaagcaataagcttatcattgttgataagctaagagcataaaataataaagcaatagtttgggttcctaagtgtgatattttattcagcacatcaatctagttgaaggcacgagaaagatgttaagagtaaatattcagattcaaagaaaaattggagttgaaatttctgtgccaaccaattaactttatttcacaatctgacttattggtcattttattaaaatctagactcttctttcatttgcaattctgcaggcagaagatgaatttgtttactggccaaataaagatgagcctataaattgtgagagctttaaggtcactcttatggctgaagaacacaaatgtctatctaatgaggaaaaacttataattcaggactttatcttagaagctacacaggtaaggatataagttaaatgacaaactttttatcttaaacacatgttaaacatattctgacctaaggatctgtcctagaaatgaaaagcatgattctgattttttccccattgagacaaatacacaaataatcaaattaccttgtcactttcattttcaaaatgatatagaatcattaaacaattagtcatcactacgtcattcctgaattttacacacacaggaaatcaaagctcatttactccagattagtggttgacagaacttaggtgaaaaataaacacagtaaaagaataaatttattaattttaattctcatgttttaatgtaatcccttaccttgtaagtaaaatgggaaaaatactacctacctaaactctcctaagtaaaatgggaaaaatrctacctaccgaaacttactattctctaccaatgtagaaagttgatgagtgatagtgatgtagtaagttgataaatgaagtgctttgaaaacacacaggacaataaactaagaatattttactaaagtcttggttatctattacacaagatactgttgttatctacaagataatacattgttttactaaacttaattatatgcaaatatctattattgaattatttgtcaatgattatttacatagaactatagtaaaatactaaaagatactaacaatgatgtctaaggaatgtgagattcagagtaccttctcaatatgacaaagattaaatcatgttccaaataatttgaatgtttcacttttctctagttctgaaaactagtacatatatggtatacaagaagattctctatcctctagaatatttaaatgaccaatacatataaacttgataatacaaataactaatagtgtaaacagcatagcagtggaatagtatcctatctcattaaaacaaaaaagacttaggtctttatttgtaaaatgaagggcagaaactagaaggctcgtaaggtccctgagagctcttaatgttccatgctaatttctatctctgattactccctgatcactttagtagcatccatttagatctgccatctctcatgccttctcattattcctagttagtaagaaascctattacaagagtaataatcattatatacctattatcttgtcacacccattatcctgatcactgatcatgtttaatatcttgctcagcactgggaaattagcactgtttttctcctagtattattcagaaaataaactagataatacaggttcctgattgatcctaattcagtatgtctcatctatgtaaatcagctattatggacaacttgataatccaggagcccaacccagggataaacagtatttctataacaaagatcaaaaaagaaggaaagactaaactggacagtttcattaacttcagacatttttaggcactttaaccaaatatcacatttgaggttagtagacaagtgaaggtctatgctactgagctcaaaagctaggggccttttatttatgtatttgttatgaggactatttttaagaatttattaaatattgaatatatttaagatgtttatattatatgtgcaaggtttgacaattatgttaaattacttttacccaccattgactttaagaaatagaacatggccttgaccatcaagtctttcatttgctccctatccccttcatcctctcctcacttcagaagtagcctcttcctgaattagtgtttattgttctcttgacttattttatcagttaacccttgtctttgttttccttcacacgcgtgctgcttacttttaaatatctgtgaactttatataaattatgtgtattatgctactcagatttatctatgtatttgggtatagttcaaattcatttactgctgctgcttagcattccagataatacatatccttttttctattttacatgcaaattattacttgtttgttgtgttttgtcttggtttgatgttgctattacgaacagtgctgatatgaatatttttagtcacatgcaaaatttcctcttggggatatcctgggaattcccctgctgtgttattgtgttggatcatcttcaactttctttaactttactaaatgaattcaattgttttccaaagtcatcctacaaaggtatcctctcatcaggaatgtatgagtgcactacatcctcatcagtgcttgtgctgggaatgaaacggcatctcttgttggttttaatttgcatttctcttgttgaaaatgaagttttcaacataactttacatttttacataattatttacataaataatatttttacatacaatatgttttatacatattatttttacataaacatatttttatataaattaattgaccattcagattttatcttttgtactgtgtctgttcatgatttttgcccatttttctgttaggttatttatcatttactgatttatcagaggtctcgtattgtggatactaatcctttgtcagctgcatatattgcaaatactttctcccagtttgggatttgaattttttactttctttgtgattctttttttttttttgtctttttttttgtgaaagaaaagttttgaagtttaatctatatgaatgtattgatctttttattcctggcctttaaaaggaaaccatcatttagtatcttaaaaaaataccttttaccctgaaatcatgaagatgctctcttacactgttttccaaacgtaccacctgaaattgactttttgtattatattttgtgagacaagggttcggtttcattattttccatgtgatacccattgtcccaccattatttatgaattagcaatatcagttcagtcattcatatagtgtgtgtgtgtgtgtgtgtatatatacatatatatatacatatatatatgtgtgcttgttctaggacatttattttattccattggtcactttgttcatccctcagccacaatggcagtgttttacttcttatagcttagagtaattcttgatatctgatgagttaatttcctctattgtttttcttatttaccagtatcttggctattttggccctttgcacttttatgtaaaatttaggttctgctacttgtttttaaaaaaggtatcatttttttaaaaaagtacacttttggaagctggaggcgagaagtttaagggatttatcaagtcacagtcttgttggtcacttaagtaagaatcagaattgggatccgagttgaacctagatctctacctccttgtcggcgttttctccactgtgtcatgcaatcttttacttaagcctgaggattactgataagtgaagaaagtgtatgctattttcaaaacagattttaacaccaatgatttccttttataaatttgaatttagccgtgcaaatacatctttgatacatagtttcatggtttgtaagcattggcatatttcacccacagatagagtttatttttagaataaaaaaagaaattatgttttttgattctactagtaaatctatgcatgttaaatgtggcatcacaactgtttcttccttctatgatgaagaatgtgctgcaactactgctgctcactcatgcctgccattgggttttattaccttactgtaattcctgattttcctcaatgattccactcctggtaaactgtcactaactamcattactttgtgttttcttgttataggatgattatgtacttgaagtgaggcactttcagtgtcctaaatggccaaatccagatagccccattagtaaaacttttgaacttataagtgttataaaagaagaagctgccaatagggatgggcctatgattgttcatgatgagtaagttccatgtgttagatggtttcacacctgcacattttctgggcatatgtatatttctgttgtcttcagacaaacctaatgctttggacccactgtgatgattcagccatggtggattatctgcatcttatcaataaagttaacacagaacatttttttttttttacttcacttgaagtccctgttgaagacagagaatggggtcatgatcacaaatatcttctcttgcatttgatgctgagaacactttgtatactaagtcggtgttttagcagtgaaattttcaggagccaaccagagaggcattttcagtcattgatttcctggcatagaagtgaaattgatatgatttttatttttcaggaacaagaaaccatccaataaatcttcctaggattccatcatagacaaataaaaaatgcatatgctgaacttatgttataaatatataaaatacagtttgttatatatgtatttatacattatattatatgtgtattatacatgtctttatatgatactctcaggtttttttttattattgccaactcctttcatagtatacaaataataaaccataagcaaatactaaacttctgtaaagtattccactattgatatcatgaacacttggcaatatttcagattaaatcatagttctttgtgcaaaaagcgaagagagacaattcattaaaagtttcagtgttttcactgcaaagttgtcaaggctatatgctttgtgagttctaaatgtgagtggtgcatctcaatggagtctttgttccttttcttttttttttttacaaggcatggaggagtgacggcaggaactttctgtgctctgacaacccttatgcaccaactagaaaaagaaaattccgtggatgtttaccaggkagccaagatgatcaatctgatgaggccaggagtctttgctgacattgtaagtaacaaggcagtgaacgaaatttttcactgatagagtacaactaacttcctagaggctgctgaaatcttatgtatcaagaaagatcttattaactgataacattagtatgtagttttcaagctgaattacaagtccacaawccatagaacaacaacatttaaaatttatacttcagaaaatttatggataaaaacttttaaatctcatgtttgcctttgtgcacaatagtaaacaatgcaaataagcttaggtgaatgtagaagtcataggctcaccttcagctctttggtctgtttaagggccttataaagggaccttcttcaaagctccagcctagaccagttggcaggaggtcaaagttatcttcatgcacatgcactgcagaggagcccctaataagtcttattcggggccgctgagttgtatcaagcttgtgctgcatgaaactcctttctggagatgcacagttcgcgaaagcatttaattatgcactgcgtcacatgtaggcctcatggttttcggctatgatgctgctcactggttcaggttctctgtagctacctctccccaaactgcctgagatggcatctgtaagagaaaaactgtttcatgcttctatgtgccactgctctgagaccacagcagagaaggtacttacctttgctcatagcagggcataggaccagttgggctgatagaatgtgaaattcttcttattggtgaacagtgaaggattgcattctacatgggttcctgggctaacagtacagtcattcctgagatctttccgtaaagaggcagacccaatggattttctaacaagtagagaaagaagaaacttgtttctgagtgagttacagatgtccagtgccaaacggtttcgcccacaagttaacagaaccctgtctcatcaccttctgatttcatgaataagaattaagtacttattggcaaatgtatgtaggttaattttctaggtcagtgaatggtctgccgattgcaacgttaatttaatcagaagagacatcagtataggttgtgtgcatctgctgagtataacagtgcccttaacacattgccctttcatgaacagtgctgaagtgtgtctaaaaatatttcttctttttacaaatgtatgtcttcactgagcttcgcatttattacctcccatcttctgttctctaggagcagtatcagtttctctacaaagtgatcctcagccttgtgagcacaaggcaggaagagaatccatccacctctctggacagtaatggtgcagcattgcctgatggaaatatagctgagagcttagagtctttagtttaacacagaaaggggtgggggractcacatctgagcattgttttcctcttcctaaaattaggcaggaaaatcagtctagttctgttatctgttgatttcccatcacctgacagtaactttcatgacataggattctgccgccaaatttatatcattaacaatgtgtgcctttttgcaagacttgtaatttacttattatgtttgaactaaaatgattgaattttacagtatttctaagaatggaattgtggtatttttttctgtattgattttaacagaaaatttcaatttatagaggttaggaattccaaactacagaaaatgtttgtttttagtgtcaaatttttagctgtatttgtagcaattatcaggtttgctagaaatataacttttaatacagtagcctgtaaataaaacactcttccatatgatattcaacattttacaactgcagtattcacctaaagtagaaataatctgttacttattgtaaatactgccctagtgtctccatggaccaaatttatatttataattgtagatttttatattttactactgagtcaagttttctagttctgtgtaattgtttagtttaatgacgtagttcattagctggtcttactctaccagttttctgacattgtattgtgttacctaagtcattaactttgtttcagcatgtaattttaacttttgtggaaaatagaaataccttcattttgaaagaagtttttatgagaataacaccttaccaaacattgttcaaatggtttttatccaaggaattgcaaaaataaatataaatattgccattaatttgtgtttgcttgtggagcattgtgctgaagcgtgtgtggcagaaaattgtggatgtgggtccccctatgatgatggcacacacacacaaaaaaaacagctagtaggatgggacaggatttagagtggtgggtcccaaactgtgcattgaggtgcacagggaagtacaaaactttccatttgtgaggaaaacacagcaacatgtgcagacactgcacaaacttttactattaaattatttgaactttactacttaatgaacagaacaattatgtatttcttttggcttggggagtgctatgatctgaatgtttatgtctcccgacaatttatcccctcaccctcaaggtgataatattaggaagtaggacctttgggaggtgattagttcataagggcagagctctcataaatgagattagtgtccttataaaagaggcctgagcgagacccctcacccctttcgatgtgtgagattatgatgagaagacagctgtctataagaaagcaagccttcaccagacatcgaatctgcgggcaccttgatctcggaacttagcctccagaagtgtgagaaataaatctatgtttgtttataagccaccatatttatggtattttgttacagcagtctgaatggaccaagacacagaattctgaaaatgttactgatgaattaagagcatcatgtaccaagaaatgttgggaacttccgatttagaaactagctggaagttagaagtaggcagatttgctagtcagagactccaatataagcaaaggtcaaggaggggattggaaaaggcatagacagacaaggactacgaggtaaaaaaaaattccagaatggaaaaagagaagaggtcccatgttgagcaaatcatcaagatccaagagccacatggaactgaaattcaggaaaatggaatcattagtatcaagcagactttgatgcttgcagcagtcccctgcctctgccaggagtgttttataatactacctacaaaggagctcactgttccctaagaatgctcagctcagggcccagaacaggaagctagagaagttttgtttaaaccagtggctctcaaaatatgattcccagatttgtagcatggacaaaatcagggaacttgttagaaatggaattctcagattcccatctgtcagaaactctgggggctagggcccaacaatctaatgaatgctaaagtttcagaaccattgctctatagcaacaacacttcagggagcctccagttacctcaagcaatatcaagaaattttcacaatgtctttaaaatagagctaaaattaattagctttcctttttatgggagcttttcttttaaagcaatagtcatgggagatatgaaatagaaataggcacacacaaaaaaatctcataaatagtagtgtgacaaatccccaaatggtgataagcaccactctacaaggtacaaaaagaattaatgtacttcttatttctcctcccagagaggaaggacacaaggttaattttgaattcctttgttgcttttctaaccttatctccttgtcctcttgttttacagttttgttttatcaccacccacaatgtctaatcatgagctgatctgaatcagtaatacatatcacctcaattattttgtctatttttcccttagcctttgtcccaggaacaagcagcctttgaggagatacagaatttttttaccctttaaggttatttatttagtaatgtgacttacagagtcttgtccaacagaaaataattatgcagtaacatgtatatcatatcagttatgcattcttatataaatgttaataaatatattctgaaacagattaaaaagaaaattcctgtcagatacagcaacattttctctttccttgatccttaactctgaggcaataatcagctatgagacaaatgaaaataaatgaagccaggtaagtcggtcaggtaagtatcactcgatttttccatccaacaccaaaatttcattccttgtgtttaacacactcacagcttttttccatatattgttttatttttataattgtgttctcattgtgaatatgtttttatgcttctttttatagtgatataggcattttttattacacataatctataagcctacctttgccaaggctatataatatttcattcagtatagcagtttcaaagaaggggacatttgacactgtctggcaatgtctggagatatttttgatgattacaactggccagagggtgaggggtgctactggcaactactgggtagaagccagagatgccaccaaacattcaacaatgcataggacagtcctcacaacaaagaatcacccagaacacaatgtcaatagtgccaagacagagaaaccctgttcttacactatgggtcttataatcattttcctaatattggttttttgttgttgtttgtttttttgttgttgttgttttttgttttgttttgttgtttttttcttttttttttttttttttttttttggggagacggagtttcactgtgttgccaggctggagtgcagttgtgcaatctcagctcactgcaacctccgcctcccgggttcatgccattctcctgcctcagcctcccgagtagctgggacaacaggtgcgcgggccaccatgcccggctaatttttgtatttttagtagagatggggtttcaccatgttggccaggatggtcttgatctcttgatatcgtgatctgcctgcctcagcctcccaaagtgctgggattacaggcatgagccaccgcgcccggcccctaatattggctctttcgaatccttcctattacaatacaatgataaacatttatttgtgcagaaaagcttttcatcaggtttaggattattcctcaggaccaattgttgtgttatttgggggagcagatagtatgaacatttttaccttactactctttcactttccaaaagagttaggctgttgagacctccactggcagggtattagagtcctattgttccactcatgggttcaggtctctgctcaaatatctcctcagagaagcattctctgatcagcctgtctgaagtggcattccctcctctcacgaaggagattcaaaatatttagcagtaaccatcagaagagactgagtcatccgcaccagcagaatgtcagcctgtctctccgccactcccatcaggccctctttgtctctttatcatgctttatctttatccataacactccttgttttctgacattatatttgtttgttatttttccctttcattcgtatataagctccatgagaagaggagtcttgattcttttgttaacctcatatccccacatgtagaacggtgcctggcacactaacagcagtcacagtattttaggtgaatgaaaaaaagaatgcattgatttttacctaaaaggaaaatactctttttaatagtcctttccttgtaaacctgacactttataggcgatgttacttaacataataaatttactagttttggcaaaatatctgttcttagtttttttctttggtaacacctttgtaaattactccagttgaaaaaggaagttctaatgcatctccagttttaaatcatggagagcagttttgaaacctcaaaagtagtattaatcaggagcataatccatccctttagctacctccataaggactacagagtccatcatagttccaatatgatacttcttgagatactgtgacagcagcttcttcatgtaaaatcaatgcaaacatttaacagatgcatgttctgctcaaattatacagtgaaaatcttactgaattttagtatttcttatctgaaagcctcaaatctcttagtacctattatgacaggctatttctctaatacacaaaacttggaaactataatctctttactagcagataaatttaaaaatgtgatattagaattgaattctgcttacaaatagcgcatcagaaatattaagcatttattgaattgaacttaactctttagggaaaatggaaaatctgcacatttgtcaagataaacaaaacatgctttttaatattataaaccatgattgattattatcattcatttgctaattgcaacatattctggtacattagagatctcttcctcattagtatgatatgggtgtgttagggtggcattaaatgttaagacatataaatgtaagacactgcaccagttttaagaatctaaacatccttgacattaaattgtagttaccaagggttttttgtttttttttttaagaaaaacatttttaaaaaaataagatttggaagtgggagtaagaaaaactgtaggtgttaaattgaaacttcttgttacatacagaaaattatcagtccatcagctgtgacacattctaagcaggccacaagaagcacagactgaccttagagaactgctccaaatacgctaatttgaaatattttacttttgcatgagccattcccagtatctctcagatttctattatcttgcttcaatcctaggagagttgctttagttctgaattatccatacaaagagatgaactgatgcaagtaattgttatcctcattgctaatttatttaataaagccttgtagtgaaaactatcagcattaaagttctttatgaaaaatattaaaatagcaaagtctgttatagcaccttcaaggaagtaacttaagagacttaggaagttaaaactgtatgtttcctgggctttttaaagaatgttaaatgaaaaaagttccacattttgtctacatggcattctagttttatgtccaaggggatacataaaaagaatcaataaaacacctagagaagaaaatgaactgttaaaataattattaaggccgttgaggaaatattgacaaggccaatgagaaagattaactagggtaaatctctgtgtattcacagccactcaccctctagggaacctttctgcagcaaattatattttccaaaaacagccagacagtatctatcttctgtcctgtatgtgactctttgaaactcatcccattgagaagcagggtctatggtccctcctcttggatctatggtgaaagtgatgctatgtgacttccaakcccaagtcacaaaagaatcagtttctgcctgattctcttggaatgtttgctcctggagcagccccaccatgctgtgtcaaagctgcatagccatggaaagacctacatcaaagaaaccaaggccctggcccacggctccagatgagcttccaggcagaaccattttgtcagctatgtaggcaagctgtcatgaaatggattctccaactttgtatcaacacatctcaagtgacactacatggaccagagaccagctgtttgcactgagtcatgcccaaattataggttgatgagcaaaataagtgactactgttttaagacactacattttggggtagtgtgttacacagcaatagtaactagaacacttcctacacttcaaagcctaaaatgctagcaactcttatttcccagactgcttcgcagctagggtcctggatgaagtatgttccaccacatacagggagtcacaggtctggaaacacaatgttattttaccatgcattataatgtaatattaaatgatttatcatatatttattcatgctttctgacttgctggctaccctggaaatgcccttacacagatttagaagacagaaattcacagaagccctcttcctgccctcttggaccctgctggtaagaagattataaagatataatttttctgcaacagggttctagtacctaattttggaaccatggcagcaagggcagtagcttctgattctagcttcccaatcctgggaccctagctatgtgtatacactcttggtcttcgtgccttgtatgaagttttctttaaaatacctagagtggtttctgctccctgctccaaattcagcaaactggaaaagaatggtcta

SEQ ID NO: 95610 - DNA, 15905 bp, Homo sapiens
gccaggcaggaggggctgtgatcgcccaggtgccaggaggaagggctgagaggggacagtgcagatgtccagagaggcctggcggggataggccaccaaagtcacaggtgggatgggctttctccagggagttctacagcacagatggtgccgctggccgggccgtggccagctctgcacatgagcctgccccagtccttgccgggcacggaccaaagagtggttcctgggttggaatcacagaattcaggggctaatggcagtcgggatgggaattgggaggggggaagtgaattaaatatttgagccctggtggaggctatacaggatgttcacgttaaagaaggttctggagaaggggatgattcttggaatgatgagtattagtttccacatgcctgagtttaggttctggatttaaaaccttattgtaagatcatctctttgaaccttctctctaattgtggggttttatggtttgggggaaattttacttatttttgttgttggttttttggtttttggttttttgagacagggtctccctctattgaccaggctggagtgcagaggctggagtgctgtggggcgatcagggctcactgaggcctgcacctccctggctgaagagatcctcccacttcagcctccccactaggtgggaatacaagcgagtgccaccatatccagctagttttaaaaattttttgtagtgatggggtcttactatgttgccaggcttgtctcaagctcctgggctcaagtgatcctcccgtctcagcctcccaaagtgttaggattataggtatgagccaccatgcccggccgatttgtttttttaacagatagaaaatcatttgagggggaaactgatccatttaaataatttattttattttattttattattattttttgagacggagtcttgctctgttgcccaggctggagtgcagtggcatgatcttggctcactgcaagctctgcctcccaggttcacgccattctcctgcctcagcctcccaagtagctgggaccacaggtgcctgccaccatgcccggctaattttttttgtagttttagtaaacacagggtttcactgtgttagccaggatggtctcgatctcctgaccttgtgatccgcctgcctcagcctcccaaagtgctgagattacaggcgtgagccaccgcacccggcctaaataatttattttacttaaaaaacagttttgctcaacctcgttcatgagctgtgttgtgttcttaatgtttatcaatagtacattgctcagttctggaaagcacttagccagatatttaaaaagcaacagaaattgaagggcaaaatagaagatggaacaaaaactctccaatagtgtattcaacttaacaggttttcaactcaccagggtgctattggaatacaattgtccccctggttcctgtcatacaagatcaaagttaaaccactaaacacaattgcagcatccttgacttcatacactttcctttccacacatccatatagacgcccgaagcacccttcagggcagaattgtcttttgtccctcactctcaggggacaaccatgcactagggcccacctgccagccacccctgccactgtcactactgctggtattagggggcaggggtgaaggaggtggccagatcagggctcggggtgcctggctgagtgccccctccactgagcccattcctgtgcctgcagcttcccacaggctgaggccccagtgycctgcttgtgctgctgagggggctcmatggcctgttgagaggcctccccaggaagcccatagggaggaggttggggtgtctcctgccttgggggtgggacagtcccttcttgttcccaccccaggtacctgacccaagttctcctgtgcatgaggaatgcctggatgtccctccttggtaggtgggatgggccagagggaggtcctgcctacacagcccttaattaggaatttagagatttgtgctctaggaaggagctgcttccgctaccatttggccaactgtgtgctgtgcagacccgcagcttggaaacaggtttcaaggatgttcaggacttgcctcgtgttcataaaggtcaggggtcgcctcttgccccctgctcccctgctaactctgcagcaggccctggactaattaagtccccgcaacagccccgagacccaggctctgtgaaagttgtcagaatcaaaatggagccacttctgtccaaccctaagagcaacaacaaaatcatgcggccgggaggttctgaaggagggccctcccgcacacctgcctatgatcagagcccttccgaagcctctgggaagggcacagatgcctgcaacaagacctttttttattttttattttttgccgggactttgcagctcactatgtgagtcacaaggacggctagccggctgcacaagaacacttgcctaataacgctgtgtccactcataaacttatgccggttcctgggataagcccctggaatcagtgttctcttcctttcaaaacagctgtgtaggtggatgtggtggtgagtgcctgtagtcccagctactcaggaggctgaggcaggagaacccgggaggcagaggttgcagtgagctgagactgtgccactgcactccagcctgggcaacagagcaactcaagaaaaaaaaaaaaaaaaagacaaaaaccaaaaaccgaccatgcactgctcctttcgcctttcaaagcaccccttgcctcccctcctccgatgcgcccctagtttactaaggccggggctctgcatgcaatgctgctgcttattcccagttaaactccatagttttggagagcctccctctgtttcttaaggttgacaggactatcattcttttcgttcatagatgagggaattaaggcttggagaggttccgttctgaaggacactcagtaagtggtggacagagaatttcagctcagactcaaaggctatttaatttacttcttttaaatccatgcttcttagcactcagctagtcacgtatcaccttgacaactttttgccgtagccacattactgcctgtggtatgatttactgaatatttttctctacataagctcagatttgccttaagtctattagaaaaggaaacttgtaactgaaaaatggaagaccaccatctcttgccataaacagaagcaactgtgtattccacacacaccaaaagcagtgttcttacagcctccttagatgttttgagtctaaagcatgctttatcttgttaaaggggagatggcaaagttagggtggcagtgaaactaaccaaaggtggggaaactatgcaaagtccacaaggcatttcttatttttttctttttctgagatgttgtctcactctgtcacccaggttggacacatatctggttgtcaaggattagggacaggggaagaggtagaggaaagaggtggcctggttataaaagtaccctgtggggttggagctcttcagcatctcaactatggtgctgttacacaaacctacttaggtgataaattgtatacacactcccacacacatgcacacgaatacaggtaacactggggaaatctgaataataactgtggattatgccactgggggagactaagcaaagtgcacagacatctcttgtactttcttctttttttttttttgtttagacagggtcttgttctgtcacccaggctagagtgcaatgatatggtcttgactcactgcaacctccacctcccgggctcaagtgatactcccacctcagcttcccaagtaggtggagagataatttcagctcacacccaaaggctatttaatttatttcctgtggagggaccacaggagcaggccatttcgctccgctaatttttgtattttttgtagagatgaggtttttccatgttgcccaggctggtctcaaactcctgcgctcaagtgaatctcccgcctcagcctcctaaagtgctaggattgcaggggtgagccactacgtagggcctcttgtattatttccctttttttttttttttgagacagagtctcactctgccacccaggctggagtgcagtggcatgatctcagctcactgcaacctccacctcccaggttcaagtgattcttctgcctcagcctcccaagtagctgggactacaggtgcatgccaccacacccagctaattttttgtatttttagtagagatggggtttcactgtgttagccaggatggccttgatctcctgacctcatgatccacccacctcggcctcccaaagtgctgggattacaggcatgagccaccgcacccagcttgtattatttcttacaactacttgtgaatctatagttctgtcaaaaattccaacttaaacatgaaactcagggtggctataaagcctcctgactcaccttgactttggaatcaatcaatcaattaattgaggagacccattagtgagtctcctctgactttcagccaagaatgttcctaactcagcaagatgaagcaggaggtagaggaaactaagggggcaacaagcagggggcaagaaggacctatgagagcgacatcttccctgagagccccaggacgaccaccgggaagccaggagggcgcaggcaggaggacccrggaaagctcggcctgagggaggccctaggcgtggtggggagtggggcagggcaggcagaggctgggcagcaggtgaggtcccctgggttctgagggccaagcctggggtttgaggtaaacaggctcgagtggagaaggggctgctgtggttgggctggggtgggtggagctggaggagccttttcttcttgaaccagtttttgaattgtgctacaaaacacggtacatcaagtttacctccttcaccattttcaagtgtacagggcggcagtgttgagtacacgcacagtgttgtgcagctgatctccagaacattctcatcctgcaaccttgaagctctgtccctattaaactccaactctaaccctaaccccaaccctaacccattgcctcctccctcagcctcaggcaacctccattccacttctgtctctatgtatttgactcccctcgggacctcagagaagtgtgttcgtgcgtatttgttcttttgcactggtatatttcactgagcataatgtcctaaggttcatccatgttgtagcaggtgtcagggtcgcctttgttttcaaggctgcgtgatactccattgtatgtgtgcaccctgtttggtttctccatttctcttttgctggacacttgggtagcttccagctcttggctgctgtggataatgctgctgggaacatgggtgtgcagttatctgttcgagtccctagttcgcattcctttggctacacactcagagtgggatgtctggactgaagcaatacttttgaactcagcctgaggttaccaaactctctgaactccttatcagaggctacacttctgggtgttccccggggcccatggaaaacagactcaccccaggctccatctacctgtgcaagggaacaggggtcaacctcaagtgcacaggctgctctggaagacccagcccaggtctggctgacccagagcactggccccttcccagcctgcgtcctcaggacataggtgtgggcacccatatacaccaagtgggttctagggcagccaggccacccagtgtgcctcctttcacactcctctggggctcgtgacattacgagccctaacccgggccctggcctaggctgtgtgtttccagtctcacctctcttcacaccttgaatgaggtgaatgaaggagtggcaacgcgtctcccacaagacactgtgagccacacccagtcccttcccttcagcaagcttggcttcaggtcacaggactgggcggggtcaagatggacaccaggggtgtggggagggacgtggagcatttacagccaggggcaaagtcctcccctgatttaaacccaggcagcctgcgctgcagccggttcctggtgtccccacttcrcctccctcctgctgcccccaagacatgcaggggccctgggtgctgctgctgctgggcctgaggctacagctctccctgggcrtcatcccaggtaatgaggctccccaagctgttccacacacagggcaccccctcagccaggctgacctgatctctactctccccctggccagctgaggaggagaacccggccttctggaacckccaggcagctgaggccctggatgctgccaagaagctgcagcccatccagaaggtcgccaagaacctcatcctcttcctgggcgatggtgagtgagcaaggcctgtccagccccgtagtcctcacagccccggcacccgggaccttcagtggttccaggacaaccctggggcycaggactcacacatttctgctccttcagggttgggggtgcccacggtgacagccaccaggatcctaaaggggcagaagaatggcaaactggggcctgagacgcccctggccatggacygcttcccatacctggctctgtccaaggtaagggctgggccacctcagagtcctccaagcagaggaragggatcarggatatggagtgtggcaggagggagggagccaggacagctggggcctaagttaggagctgggagcagttaggatcccagaggaccagaaccaggtccttggttggggtctgggtgtccgccccgaagtagagctcagggtgtctccgttcgcagacatacaatgtggacagacaggtgccagacagygcagccacagccacggcctacctgtgcggggtcaaggccaacttccagaccatcggcttgagtgcagccgcccgctttaaccagtgcaacacgacacrcggcaawgaggtcatctccgtgatgaaccgggccaagcaagcaggtgagctggggcccgctgtggggtcaggaccaggcccaagatctcggtcaccratcctgacctctgtcaccctcaggaaagtcagtrggagtggtraccaccacacgggtgcagcacgcctcgccagccggcacctacgcacacacagtgaaccgcaactggtactcagatgctgacatgcctgcctcagcccgccaggaggggtgccaggacatcgccactcagctcatctccaacatggacattgacgtgcgacccccgggccaagggctggggctgggcagaggggaaggtggcacaggctcagatccaggcaaccaaaagcctgatctgggtcagcaggttctggaggtggagttggggatgtagaatgtgcaatacaggctgggccattcccacagccctggggaggggagccaggggctatgcatgaggagggggcacggggccagccaggcccccaaaccacctgccccatccattgtcctcaggtgatccttggcggaggccgcaagtacatgtttcccatggggaccccagaccctgagtacccagctgatgccagccagaatggaatcaggctggacgggaagaacctggtgcaggaatggctggcaaagcaccaggtgatgggggctggygggtgtgggaggcacggcagggggaggccaagtgtgtgggtctcagggctgtgggctgaagcctggctctgtccctgcagggtgcctggtatgtgtggaaccgcactgagctcatgcaggcgtccctggaccagtctgtgacccatctcatgggtaatgacccccttcctgccctggcattcctcagacaacctcagagggtgccatccgagcctgtgtgcccatttgccagcaccctcccgctcacagcctgccaatcaccaccaagctccttgtcccacaggcctctttgagcccggagacacgaaatatgagatccwccgagaccccacactggacccctccctgatggagatgacagaggctgccctgcgcctgctgagcaggaacccccgcggcttctacctctttgtggagggtgcgtggtggcccctggggagtggaggaaggyggggcgcggcagggcaggttcaagcatcacccccctctggccttcctgcaggcggccgcatcgaccatggtcatcatgagggtgtggcttaccaggcactcactgaggcggtcatgttcgacgacgccattgagagggcgggccagctcaccagcgaggaggacacgctgaccctcgtcaccgctgaccactcccatgtcttctcctttggtggctacaccttgcgagggagctccatcttcggtaggcctggggagagtggcaggtgctgctgcatcaattatgagggtgaagtttgagcytcagtttcctcctctgtcaaaagtgtgyaatgctggcaccagccctatagggatcttgtgaggaccgagcccccgaacaggcaaaaagtggcggtgcctggcacataggaggcactcccacagctgtggtcagctcaactacagggacccgcatctccctacagggttggcccccagcaaggctcaggacagcaaagcctacacgtccatcctgtacggcaatggcccgggctacgtgttcaactcaggcgtgcgaccagacgtgaatgaragcgagagcggtgagtgaggctgaatggcccgtgcagggggaccagggtgccagggatgggggcattcgcgggaggrggacgccgcctgcctgccctgaagtgcactcaccctcctaccagggagccccgattaccagcagcaggcggcggtgcccctgtcgtccgagacccacggaggcgaagacgtggcggtgtttgcgcgcggcccgcaggcgcacctggtgcatggtgtgcaggagcagagcttcgtagcgcatgtcatggccttcgctgcctgtctggagccctacacggcctgcgacctggcgcctcccgcctgcaccaccgacgccgcgcacccagttgccgcgtcgctgccactgctggccgggaccctgctgctgctgggggcgtccgctgctccctgagtgccccactccggagttatcctgctccccacctccgggcgtcctgccctgttccccgtcctgagccgccacttccagcgaacacacacaggtgtcctgccgttggaccttcacctcctagagataaaccagcctcagctggcgcagcggggcccttcttccctccgcatccccttcagggagcaggagcccagggcgccctgggagctgagcctgggacttccaggacctcccctcaggttgttctctgattcttcctcccaaccccagagactgcagatttgtgccatgcggctgcctgcaccccagacaataaagggaccaaaaccacccaacccccaccctgcctctakcctaaggaagaccaagcaggcctggacccagagacgtcccccatcgtgggacacgacacacccagaccgcgtgccccaccgtcttagcttcaatcctggcagcacctggtagacccaaggacttgggtggatcaggacacctgaagaagagaagcttccggcaaccctgcaacccacccaaggaggctactggatcggggattcccaggggggctttgacacagtcctctgctgtctccccactaggatcattccacacccctgcacctgaccaagggaccmatgaggcagaggcttgccccaagtcacagccactcagatgcttcctgccccccagtgcccattccaggtcaccagatccaaggagcgcttgaggagctctgggtacagggcagcaacccagagcccatgggccctcccgggacatctggatgctgggcatagatttctcaacaaggaagactcccctgcctcctcaaggtctccattctcctaggagacaaagcaataataaaaggtgttagacaatgtaatgccagtactacttcctaggagaaaaatcatgagtgagtgtgggcacagtatctggagaggtggataacgcaggccaggaggtactgctgaggggcagatgattgagcaagagacttgaacagagtgggggcttgagcaaggcagcacagcagtgcaaacgccctggggcagtgtcagcagrtgctctgggaggccaagggctggatcagaggggtgggggtgggtgggcagagtggggaaagcctgaggggtcaggagagtggggtgtgcatgggggactgtgaagtctggttagaggggtgtggttggaggtctttgaggagggctgtgacctgccctggttgggaaataagcactctggctgctgccaggagaagggtctggtcttttgggcagagggtgggggtggtggcaggctcaggtgaaagctggggaaggagctgactccaggtgtttctgacctccctctgaaagtattctggagcgcccatcccaatacagccatacttagtgagtacacacctgctccaagagaacattgaaaagaataaaggtgaaatcaaccacattttccagcaaattttgcagtattacaaatttatttgtacatttacaaaggtgcaaaaaagcatcttgcttttgcaagaaatagtaacatcattcaatatgctttcttatttactaaaaccttgaaataaaattgtaaaacatcagtttgaaggcctgactctcagggtagttcttttttaattctgggttttagtagctgtcacaaaaatattggaggaccatgatcccacttgtgaatagccataggactccagcctgggaagcatagcgaaaatctgtgtctaaaaaatgaaataaaaggatgaattttatggtatgtaaattatatctaaattttaaaaaacagattcgaatatataatctgctttcaagtttttttaaatgtgtagggatcagggttttatcagtcaaatacattttttaccacaaaattcacatgtcaatgaaaacattctcaaactttggttctaaaaaatgttttctttggcatgagttttcattccaagatgattactttctcattttttcattgaaaggacatctttaccttgaaggagcagatgcaagaaaagtacaattatttttcaagctttttcctgattgcctaaaacagacagctcttgtcatctcaaaagtgtcagcattttggtctttaggaaggagggagcccgggcgcagtggctcacgtctgtaatcctaacactcgggaggccaatgtgggcagatcatttgaggtcaggaattcgagaccagcttgatcaacatggaaatcccatctctactaaatatacaaaaattagccaggcatggtgccgtacacctgtaatcccagcactttgggaggctgaggcgggcggatcatttgaggtcaggcgtttgagaccaccctggtcaacatggtgaaaccctgtctctactgaaaagacaaaaattagccaggcgtggtggtgggggcctataatcccagctactccggaggctgagacaggagaattgcttgaacctggaggcggaggttgcagggagccgagatcacatcactgcctccagcctgggtgacagagcgagactccctctcaaaaaaaagaaggagggaggtgggagtgggggtgaggatttaaaaattacctatcgggtacaagctcattatatgggtattgggttcactagaagcctaatctccaccagtatgcagtctacccatgtaataaacaagcacatgtacccctgaatctaaacttttaaaaaagaatattcacaggaaaaaaaaagagttaatcacagggaagcagaaacagacatacattaaaaattactgataaattttttaaaaataaggagggagggccaggcacggtggctaacacctataatcccagcactttgggaggccgaggtgggcggatcacgaggtcaggagattgagaccatcctggctaacacggtgaaatcccgtctctactaagaatacacaaaattagccgggcttggtggcgggcgcctgtagccccagctacttaagaggctgaggcaggagaatcacttgaacccaggaggcggaggttgcagtgagctgagatcacatcactgcactccagcctgggcgacagagtgagactccgtctaaaaataaataaataaataaggagggagggaaagtcaagcagagagggaggggaacttggggcaaccctcttcggtattttgctatgaagataagtcattctgtgtggctggaaagttttcatggtccacccaatctccttaccaagtatgggaaagattctactgtaatgccacagtcttggctttataacattagcccactgatggtctgcaacattctatgccctccaggcttctacctcttccctgcgctgattagactgtggatragccaatgagtgaggggtaagggtgaagccacctctgcaccctgattcgtatccagaatccttttttaaaaaaccctttctgagtagctattctatctgtggttgcatttttaccgtttttcccatatgacatcgtttttattaaagaaggcatttactgttggcaatatatcttgtctgctatatcttccctttagtggctcaaaaaaaaaaaaaggaaagaaagaaagaagtggtttgtgtatttcattattggaatagaacctggcaaataccttcagctgagccatgttgggaacatctgtgctttcagcacactgcaaagcaaacctcccacactgggtaatttgctctaacatgagtttcttccaatcttcggcagtgttttctctacatctttcgatggtgtttgctgacaaagaaatgcctttcggtttgtcgacagatcatttattgttcattgtttctgccatttttcctgcagcagaaagaataagtgtctgcccattggtagatgttttttgcttcatgctatcatgcaagaaactttaaaagagctttccaaatatttatcattgcttagggaaataactaagaagtactgggttgaacagcacagaactttaaacaccgctgggaaaaaaactgctcaggtttctcttcggttctgaaagcttagttttagacaccttgccaaccatgaggatttcacactgctgatgacttaatagctccaggcaccaggcacccggggcaaacttcagcagtaaccacagagtgggggaaattcaaagagttttgtttgctgattttttattttaggggctaacttctggtcaggtctgtaccctgagctcagccaagagtaataaggaattctcagctctcccttctgctgtggttcacctgctctggatttctggtgttcattgcagattccttacaggaatcttgtgtgagccacttggccattttgggggatgagttcggttaataccagatcatataagccgagcgcggtggctcacgccagtaatcccagcactttgggaggctgaggtgatcggccatcacctgaggtcgggagttcaagaccagcctgaccaacatggagaaattctgtgtctactaaaaatacaaaattagctgggcttggtggcgcatgcctgtaatcccagctactcaggaggctgaggcaggagaatcattcgaacccgggaggcgaaggttttgagatggtgccattatactccagcctggccaacaagagtgaaactctgtctcaaaaaaaaaaaaaaaaacaagatcatataatccatcaatccacttagacgcactaaactctaatcctccgcaatccgctgaaagcgtgcaatccagagtgggtattgcatcaacccctggtctcgggcaccaaattcccttcttctgggacaccagagaactgcgtggggtggtacctgcatgaagggtgaaggcgccagcatggaacttgatattaaacatgagctcttggggcgcccactgctcagggctgtggcaaggcatatggcgagctgagcaaacagtaggcactcaggagtgcctgacatccctttaaccaaaccccaaggtccaggtgagttttgaagtacttgagtactgggcaggatgcccaggctgagcaactccctgtgagcaggggtatctcactccctgcagagcacagaccccagaaggcaccacaggttcagtccccagcagattcgaagccccctgcccatcgagttcccttgaacccctgcccctgcacagatccagtgattggcacaggaagcctccagatccagcgagaggagcacactccggcagcctctcgggaggactcaagggggatcccagctgtgccattctggcctgggtgctgaagttgcatctgatcgtgccctggccccactggttctaggaacaggcctccccaccaggttagcagctgcataactggcctctgcccctagaggaagcctccctgaatctcagcctcccagaggggctccagaggccttccggaagctgtgtgggatttgcagttgcaccccttcatctaaggcggccccagggtctactgaccccagctgaccattgactgccagtgcacacaccagaccccaacaccaacaagcagctggaagctccccttgatagaaccttgccactggggctgccagtctttgctaatgygcttggcatggtgcctgggaaccagccacatggctcttgagctgcccttcaaggaggaaacagaagtcccctgtcaaaagatgaggccaccatccacccttaacagggaggtggccaggccctggtaccctgttctggcactttctttgttcaccagatttgcaaatttgttatcagccagcacagtttccccacctccacccaccctgtctgggctccttagagtaaaggaaaattctccccaaggagctgccttcagatctctccacacagattcctgacagcagtccctgcaatggtttggttccacaggatcatagaagctttttaaaattattatttatgcaaaatatagacaaggaaagatgcgatttgactgcaccatgtgacagcttcttggggatttgagctgcctgccggtccaatgaaccagccgtgagctgctgccagaggctacgggatcctgggtggcagctgaggttggggaagccaggaacccatcttactcccttgcaacctgatgagctcatgctggacacaggcccagctcgggactgaaccgtgtagccctctgggcaccttgaaccttgcaccagggtggtggggaggctggggaggaggaggcattcactgtgaccagtggggttgctttatatgtggatgtgtttatagcttttattttatgtgtgtgtgtgtgtgtgtttattctttcttttttattttattttattttattttattttattttattttattttattttatttttgagacagggcctagctctgtctcccaagcacgatctcagctcactgcaagctctgctttctgggctcaagtgacctcccaagtagctgggattacaggtgcgcaccaccacacctggataatttttgtactgtttatagagacaaggttttgccatgttgtgcaggcttgtcttgaactcttgggcttaagcaatgcacctgccttagcctcccaaagtgctgggactgcaggcatgagccaccatgccccggccagttttattttatttttaattgataaataaaaattgtatatatttatggggtacaatgtgatgtttcaatacatgtatacattgcggaatgatcaagtcaggctaattagcatatccgcctcctcaaatatttattatttctttgtaatgagaacatttaaaatcccatctttggctgggcatgatggttcacgcctgtaacctcagcactttgggaggccgaggaggacagatcacctgaggtcaggagttcgagaccagcctgaccaacatggcgaaaccccgtctc

SEQ ID NO: 95611 - DNA, 14386 bp, Homo sapiens
tagtcatcagggaaatgcaaatcaaaagccacagtgagatgccacttcacacccactaggaaggctggaatcaaaataactaaaaggacataataccaagtgttgatgaggatgtggagcaattggaaccttcgcacatttcctgtgaaaatgtggagtggtatagctgctgtggaagataatttggcagatcctcaaaaaggtaaatacaaaatgactgtatgacccagcaattccactcctaggcagataccccagaaaactggaggcatatatctgcacaaaaacttgtacactagtgttcataacagcattaggcaaaatagcccaaaacaccagaaacagcccaaatgcccatccgttgatgaattcataaataaaatgtgacttattagccaggcctggtggtgtgcatatgtaatcccagctactcaggaggctgaggcaggagaaccacttgaacctgggaggtggaggttgcagtgagccaagatcgcaccatttcactccagcctgggagacagagcaagactctgtctcaaaaaaaaaaaaaaaaaagtgacttagtctatttgtgttgctgtaacaaaataccacagactgagtaatttataaataatagaagtttatttctctggaggctggaaagtccaagatcaagacaccagcaggttcaatatctggtgaaggctcggtctctgcttccaagatggtgctgttatatataaagttttggtgccacaaaaggaatagcactcaaatataaaattttctttttaattctcagcaagacaagttacttctatagaagggtgtgctcttacagatggagcaatggtgagcactcacttggacaagggaggggaaggggttcttatccctgactcacgtggcccctactgctgtgtcgttcccctattgggtagggttggaccgcacaggctaaactaattcctattggccaatttaaagggaatgatgggataagtgatttggcgggaatcagggcagagcaggtagcaggtaatyggaataatyggaatgagtcagggtggaaaggtaatcgaaaaaggttgctttatgaggaagttaagtttaaaagtagaaggcaaagaattgaacatactgacatattaattctttgaaaagaaatttagaactcatatctaacagtgccttgttgctgcatcccctggaggggatgaacactgtgtcctcacatggtggagggggacaaaccacttccccaaattctttcataaaggttctagtctcttccatcctcacggcctggtcctacctcttaatactattgctttgggaattaagttttgacatgaattttgaagaggatacaagcattcaaaccatagctgtggtgtagccatacaatcaaatattactgagccatgaaaaggaatgaggtactgacccatgctacaacctgcacgaatcttggaaacatggtgcttggtggaagatgccagtccacgggccgcatagcatatgactgcatttacatgaaatggccagaataggcaaatccagagagacaggacatagatgagtggttgccaggcgctgaggggactgggtaatggagtgtaaatcagaagtaaaatgctaagccccctcagccaactgagtggacccttcctcagctaagggcattcccaagttaacctgaaaaactagttcagaccatgatggggagtgggggtcagaggtcagacgtgtctcccaccttcctccttttggaattcagatacagctgaccagcattaacattaaaacaaatctttttttttttttttgaggcggagtctcgctctatcacccaggctggagtgctcactgcaacctccgcctcccaggttcaagcaattctcctgcctcagcctcccaagtagctgggattacaggcatgtgccaccatgcctgagtaatttttgtatttttagtagagacagggattctttcatgttgtccagtctggtcttgaactcctgacctcagatgatccacctgcctcggcctcccaaagtgttgggattacaggcgtgagccaccgcacctgactaaaacagatcttaaggctgatgaaacagactttttgtagcaataagacaccaaattccaaactaactctagtatagcatcaggacagatagcaggtcctgaatgaaattaaagtattttacccccaaatgtatttctttgacttattttgaaatggccctgcaaagctgtctcttgtgaggaaacatctgcattctgtagagaatccccttccctttccaggccttttcctgatccaggagagaattaactaagactctggcatctttttaggtctgcgaagagctctgaagcctgccacctggcggcctctgcgtgatgagaccttggtctccacaacagctcatcttttttttttgagacggagtctccctcggtcgcccaggctggagtgcagtggcgcaatctcggctcactgcaagctccgcctcccgggttcatgccattctcctgcctcagcctcccgagtagctgggactacaggcgcccaccaccacacccacctaatttttgtatttttagtagagacggggtttcaccgttttagccaggatggtctcgatctcctgacctcgtgatccgcccatctcagcctcccatagtgctgggattacaggcatgagccactgcgcccagctaaccgctcatcttaacccgacattcctttctactgattccaggtctttagataaactcttttgaccaactgccaatcagaaaatttttggaatctacctatgatctggaaactgccttccctactcccacctcaagttgtcccgcctttccagacggaaccaatgtacatcctacatgtattgatttatgtcttaagtctccctaaaatgtataaaaccaagctgtactctgaccacgttgggcacataggatctcctggggctgtgtcacgagccatttgttactcatacttggctataaatctcttttatagccaaatatataaatagtatagtatagtatagtataaatctcttcaaatattttacagagtttgactgttttcattgacaggggagtgattgctcacaggtatgggatttcttttggggtggtgaaaatattctggaattggatagtggtgatggctgtataactttatgaaaatactaaaaaaaccactgaatcatacacttctcaaactcctgagcttaggtgatccacccgcctcggcctcccaaagtgctgggattccaggcgtgagccgctgcacccagcctgaatcatacacttctaaaaggtacattttataatatgtgaattatatctctattttattttattttttgtttcgagacagggtctcactctgttgcccaggctggagtgcagttgtgctatctcagctgactgcaaccttcacctctcaggctcaagcaatccttccacctcagcctcccgagtagctggaactacagacatgtgtcaccatgactggctaatgtttgtattttttgtagagatggggttttgccatgttgcccaggctggtctggaacttctggactctagcaatccacctgcctctgcctctcccactgctgggattacaggcgtgagccactgtgcctggtcacatatctcaattgtaagcattgagagtggttctcttcttgagggtgggccagccagtggctttgctccctagttctagcctgaagcctctgttctctcccttgccccatcttctctctaaggcatgagccaccagttctggtcacactcacctcatggagcccatcagcccggtttcctaggccttaggctggacccctactcaaccccaaaggcctggtgtgtgtcttgccttgtgattcctcccgaagacgtctctgtcttgttttccctctagaatgtctttatagatgtcctcagctggccgggcgtggtggctcatgcctgtaatcccagcactttgggaggctgaggcgggaggatcacctgaggtcaggagttcgagacctgcctgactaacatggaaaaaccccgtctctactaaaaatacaaaagtagctgggcatggtggtgcatgcctgtaatcgggagcttgaggcaggagaagcacttgaacctgggaggcggaggttgcagtgagccgagatctcgccattgcactccagcctgggcaacaagagcgaaactccatctaaaaaaaaagaaaaaaaaaaaaagatttcctcagctaaacttcttctctcctttcctcccacattgtgtagagaaggccagccattgtaatccatacagaaattttggccctgaggacattttaaatacaaacattttaaactgaattataccaactctgctgaatttccatcaaggacactttccagagcccactctatggagcttaaataaatccttgatcaattttccagagaacactgtgaaactgcacagttctccattttcatttttacttgttatcatatttgattctttcctgctgacattttctaacagcgtttcagcataggcctcccgatacctatcaaggcctgtgtccttggattataatttggtgattctatcaccaagccatgaatctcccaccgaagttcagggaatagcacattttttccttgtgcagcttttgcccttctcagttttattttctcacatcgtcctaatattaacgttcactgtggttgaatgaaagactgatagattacatttatttctcaaagaagctaagttttaaatagataacgcatgcatgtggtagaaaaatgagagcagtacaaaagggtgcacaaaggcaaaccttgcccctcttgctggcctcttgcccacttgccctctgcaaaggctgtgtctcagacggggtgcccaggacgccggctctgacacggagacccacggcaggcaagagcctctgggggaaagggaggagcagcagagaaagaggcggctgtaatgcagtctcagggaaggcccagccgcccggagggagctccggagccgcactgttcctggtcaggagttcaggaagagggtcttcaggctctgagtggaycaatcatcaagcagcccttcttgggtatgacctggggcagattcttcatctgggaacaactggcccatcctccccaggccagggccctgcagccaacactccccagagctgcgggatgcatcctcctaaagggacctaggcagcttagcccgaaaatcmctgtcacccactgtccccaagttacctctgtcccctccctaccctttttagctgaagacttatttttaattgttattttcttagacctctggagcacyccacgcccccagcctgggttagctgtcaggagcccctgtctcttcctttcccactgcagcgccgccccctcgctgcctcagggggagcccacgcagcagcgggggcagacgggcctcagcctcaggcagcctggggagcagagccttagaagccatgctttttctttttccttttctttgaaacaactttctagggctctggagttataaaaagctcccatgtgtcactttctggcatttgggcagctgccgaatgccacccggcctgcactgctgtcctcccgaggtttgcccctggattgatgggctgggtttggcaaaagcagctggaggttatcgaaaatctgttgtaaggagcattgttaacttagaataaaaatcgaatccaaaacacgcttttgcaataccccctcccgatatccaccgaggcaaaggcagaattaagaagcagggtcttgagatgtaggaaaggagaatgaaccccacgcgggaagaggacaggccgccctgactttggtccactcagccagggggtgagcaccacytgtcttggtgaatgactctgagcccatctcaggtgtggctgcaggtgacacatcttctcttcctgtccaccccccagccccatggcgtcccttcctgtcctgcagaaggagagmgtgttccagtcgggagcccatgcctacagaatccctgccctgctctacctgcctgggcagcagtccctgctggccttcgcggaacagcrggcaagcaagaaggatgagcaygcagagctgattgtcctgcgcagaggagactacgacgcacccacccaccaggttcaggtgaggcaggaggtgtctgcactggctccccagggctctgccacaccctttgctgctgtgatcaggggccagtcctggatctcaagaaatacagggacaactttatccctcaatggctgtactccggaggagagatagagcagagaaagtgcccctaatggttccctggacctctgggttcactgtgaattagtccagctggcctccatctgttttcatgaaagattgaatgagttgcccagcatccgtgatgacctcacggaggaatagttcagtgttgcataatggagggttgtgtcctttgagtaaaattaacttggggacttggggtggggtgatggcttgtgtcctaaagtcccattttatagattaaataattaatcctgatgacagcacccaaggctggctgatcatatttgaagagtttaatattattatcattcctttgtggtcattactacacagctgttcaaagcatgggatttgaagcagatggacctgggttcaagtcctggttccgccactgaccacagatgtggcctaggcaactcctcctccctgtcgcggtctcttgctcactgtaataatggagctactaacacctgttccctggggattgaggcattagatgagaccatggatgttagacttttggtgctgtgtctgtgcttagaattgcccaatgggggtagctgttaataaatggggacagacagcacatgtgacatagacttggggattctggaagctcaatgtgactcctccttggctacatgagtaggatatggagtgtagaaggtgagaggtgaccgtcacattctgtcttgtactggtsaggttattgcaccttccgccagggctttgctattcaaggatggtgagctggactggggtgggaagtggaggaaccaggatgaagttgggaatggctcatgcacgagtcatcttcatatcttgtggtctggcaggtgggtgttctgtaaatgcatattgatggcaatggaaggaacagaatcactcagccgagtgtggctgccttggaggggtgaggtggcaccctgggccccgcakctctggggaaacgttgcaaggaggatatgagtgttggrtgaagagttcttctcgatgacttttgactctaacccgggagacacacccgtgcccacccctcccactcatgcagctcctggcaccatccccagctgtttcaaggctgccttcttctttctctctccctactcagtggcaagctcaggaggtggtggcccaggcccggctggatggccaccggtccatgaacccatgccccttgtatgacgcrcagacggggaccctyttcctcttcttcattgccatccctgggcaagtmacggagcaacagcagctgcagaccagggccaatgtgacgcggctgtgccaagtcaccagcactgaccacgggaggacctggagctcccccagagacctcactgatrcggccatcggcccagcctaccgggagtggtccacctttgcagtgggcccggggcattgtttgcagcttmaygacagggcccggagcctggtggtgcccgcctacgcctaccrgaaasttcaccccatccaaaggccgatcccctctgccttctgcttcctcagccatgaccatgggcgcacgtgggsgcgagggcactttgtggcccaggacaccctggagtgccaggtggccgaagtcgagactggggagcagagggtggtgaccctcaacgcgagaagccacctccgagccagggtccaggcccagagcaccaatgaygggcttgatttccaggagtctcagctggtgaagaagctggtggagccrccgccccagggctgccaggggagcgtcatcagcttccccagcccccgctcggggcctggctccccagcccagtggctgctctacactcaccccacacactcctggcagagggccgacctgggtgcctacctcaacccgcgacctccagcccctgaggcctggtcagagccggtactgctggccaagggcagctgtgcctactcagacctccagagcatgggcaccggccctgatgggtcccccttgtttgggtgtctgtacgaagccaatgattacgaggagattgtctttctcatgttcaccctgaagcaagccttcccagctgagtacctgcctcagtgagcctgtggtgcccacctcaagggcctgcctttcacctgcacacccagctcggaggctctgcggctgcctctccttcccgtggcccctggacgtgggggccactctgggctcccttcggcgcccgtgtgtggagagaggtgcacctcttgctcttttcctcctgcgtggttccagtcttcccaaaaggttctattttcagcccagaaaccaaaagtgtctggcttcccatagcccctccatagggaaggcgtggagggtcctgcagcgcagctgtcaccttgtctgcctgtcccctacccccagctttgtgtaggtcttgacaaatttctagttcaactccttccttcttgggaaccattccttatgttcctggggaagaactgagatggaagaccatggtgtaaattagcagagatgtgtgtgtatctgtgtgtgtctgcatgtgcacgtgtgttcgtgtgtgtctatatgtgtctctgtgtgcatgtgtgttcgtgtgtgtccatgcatacgtgtttgtgcgtgttcatgtgtgtccgtgtgtctgcgtgtgcatgtgtgttcatgtgtgttcgggtgtgccatgtgtgcatgtgtgtttgcatgtgtgtttatgtgtgttcgtgtgagcctgcgtgtgcatgtgtgttcgtgtgtgtccatgtgtgcctgtgtgttcgcatgtgtgttcatgtgtgttcgttcatgtccacgtgtgtctgcacgtgcatgtgcgttcatgtgtgctagtgtgtgcataaatatgcatgcatgttcaagtgtgtccatgtgtgcttgtgtgcgcatgtgtgttcatctgtgttcgagtgcgtatatgcatgtgcatgtgtgttcatgtgcgtccatgtgtttgtgtgtgcccatgtgtctgcgtgcatgtgtgttcatgtatgtcagtgtgagtctgtgtgtgtatgtgtttgtgtctgtgtgtgcatgtgtgttcgtgtgtctatgtgtgactgtgtgtggatgtgtgtgcatgtgtgtccatgtgtgtctgcatgtgcatgtatttttgtgtgtgtgtctgtgtgtgcttgtgtgtccatgtgtgtctgcatgggcgtgtttttatgtgtgtgtctgtgtgtgcatgtgtgttcatgtgtgtccatgtgtgtctgcatgtgcatatgtttgtgtgtgtccatgtgcgtctgtgtgtgcctgtgtgttcgtgtgtctgtgtgtctgtgtgcatgtttgttcatgtgtgtgtatttgtgtatgtgtccttgccaatgctttggggcagacagcatggagaatagctttgcaggaagtaaggcatggtctgggaaaattaagcgagcttaagtcattgtattagcgtcttaaggctgctagaacaaagtaccttaatcttggtggcttaaagcagcagaaatttgttctctcaccgttctttctggaggccagaagcctgaaatcaacatgtctgagaggctctgtgccctctggagaccctggtgaggggggccttccctgcttcttccagcttctgccggctcccagcaacgctcgctggtccttgccttgtgatcgcatcactccagtccctgcctcgatcctcacgtggccacatctcctcctcctcctgtgtcttctcttctatgtttataaggacacttgtcactgactggatttagggcccactcacataattcggggtgattttttttttttgagacagagtcttgctctgttgcccagactagagtgcagtgtcaccatctcaactcactgcaacctttgcctctcgggttcaagcgattttcccgcttcagcctcccaagtagctgggattacaggcatgcaccatgatgcccagctaatttttgtgtttttagtagagacagggtttcaccatgttggccaggctggtgtcgaacttctggcctcaagtgatccactggcctcggcctcccaaagtgcagggattacaagcatgaaccactgcacccggcccaggaggatcttatttcccaagatcctgaacttaattacatttgcaaagacacttcttccaaataaagtcccattcacagattctgggatgtggatatatcctcttgcacttcacaaaggagaatattctaaaggctcctaaattgctcaacatcattagtcatcagaggaatgcaaaataaaactgtgagagacttatctcctagaatgcccacatttaaaagattaacaacagcaaatatcaacaaggatgtggagccactggaactctagtatctttctggcagaaagtaactgacacaaccactttggcaagcgatttggtggaatccaccaaaacaaaacatgtaaatactccatgacccagcagttctactctggagcacatatccaagagaaatgaatgttcatagctgccgaagacacatagaagattgtttacagcagcttcattcacaagagtcctaaactggaaacaacccaaatgtcaatagaaagtaaaataaataagtaaattaggggctgggcttggtggctcacgcctgtaatcccagcaatttgggaggctgaggccggtggatcacctgaggtcaggagttcgagaccagcctggccaacatggtgaaaccccacctctactaaaaaatacaaaaaattagccaggcgtggtggcaggtgcctgtaatcccagccactagggaggctgaggcaggagaattgcttgaacctgggaggtggagtttgcagtgagctgagattgcgccattgcactccagcctgggcaacaagagtgaaattccgtctcaaaaaaaaaaaaaaaaaaaaaaaagggaaaaaaaagaagggcatattcatgaagtggaatattataatacacaacagtgaaagagtggactactgctctccacactagcatggatggttttcagacatcatgacgagtgaaggatatcagactcgaatgagtacacaccttattattctatttatatgaagttcaaggacagacaaaactaaactatggtctatcagtcaggatagtggctgctcctggtggaggggagctgttgactgggacacagcaagagggaggctgctgggtgttctattgcttgatctggggctggttatgtggatgatttcgtgtgtaaaaatttgatgtgctatacacaaaagatttgtgtgccgccgggctcggtggcttacacctgtaatcccagcactttgggaggccgaggtaggtggatcacgaggtcaggagtttgagaccagcctgaccaacatggtgaaaccctgtctctactaaaaatacaaaaattagccaggcctggtagcgtgcgcctgtaatcccagctagtcaggaggctgaggcaggagaatcacttgaacccagcaggcagagattgcagtgagccgagatcgcgccattgcactccagcctgggcaacagagcgagactctgtctaaaaacaaaaacaaagcaaaacaaaacaaaacaaaagatttgtgtgccctactgcatatatgttacacctcaataaaaaataaaaattgaacaaaagagcagatttgctagattaactcccaaagcaatattgtatgttgggttttaaaactgaaattgggtttcaactgaatttcaatattgggtttaaaattgattttttttttttttgagatggagtctgactctggcacgatctcgtctcactgtaacctccgcctcctggaggcagttctagcaattctgctacctgagtctcccaagtagctaggattacagttgtgcaccacctgactaatttttgtatttttagtggagacggggtttcaccatgttggccaggctggtctcgaactcctgacctcaggtgacccactcgccttgacctcccaaagtgctgggattataggcatgagccactgcgcctggcctttttttttttttttttttttttttttggagaccaggtcttgctctgttgcctaggttggagtgcagtggcacaatcacagctcactgaagcctccccctactgggctcaaacgatctcgcctcagcctcccaagtagctgggactacaagcacgtaccaccatgcctcactaatttaaaaaaaaaaattgtagagatggggtcttactatgcagcccaggctagcctcaaactcccgagctcaagtcattctcctccctcagcctcccaaagtgctgcaattacaggtatgagccaccatgccctgctgaaactgaatttttaaataaatgctttatttcagaacaattttagatttacatagaagttgcaaagatagtacagaacgttcctgtatactccacacccagtttcccctgacgttgacatcttacataactgtggtacatttgttaaaacgaagagattaacattggtacatggttatttactaaactctagactttattctgatttcaccagtttttccactaatgtccttttcttccccctgttctaggatccaatccaggatacatttagtaaaacagaatttttactataataaatttgtatccttagagacacacacatacacagattgatacacacagttccagaaggtcctcccttcccgggaccttcccttaaaaaccacctctaaacaaataaataagcaaccacaaaggtgtgtgcttcagcctcagactgccgatgtgtaaatgacagaagaagtagttcagtctctggagcccaggaaggtggccttcaaatctgctacacagagctccacgtccaggctgtggcaccttgtccgggactactctggtcaactttgagcccaacgccactgcctgggacatctgggtgttggggtgtaggggtgtgtgtgtacacacgtgcatgtacactggatgtccatcatccagtccaactttggggttggtggaccagccttgttcaacgttccacctggcaaccccacaaccggggtgcagacacagcagggattagtggagcccgggcctcatccacacactcccctcaacacagaccaggaagaactggagctccaggtgtggggagcccacatggccctggttcttgtagatatctgaggcagggctgctactgttcacctcacctctgagcagctgccctggtgcagccatcccctttagactccatctttcatctcaccttctatggccctatggccttcctggccgggcgggtcacaggtgcctctccaggtttgtttcgtggccgggctgggacagtgggagggacctggacttctggtgcctgagagaccagccctgggaagccactggggaagggattccaaggctggggagggggcatggcagttggcatacctgtcaatggggaagagagccaaggtcctgacaaggcctgtgtggctggctgaataatggcccccgctgcccacaaagatgtccacatcctaatccctagaaactctggatgttactttatatagcaaaaggaattttgcagatatgattcacttactcttgagatggtgagattattctggattatccaggtgggacataaatgtaatcaaagggtctttgtaagaaggaagcagagagagattcaatacagaagaaggccttgtgagcactgaagtgagatccttggctttgggctttgcagatggagggaggggccactagccggggaatgcagctctagagccagagaaggcaaggaagtttcccttggtgcttctgtgggaatgcggccctgcagacaccttgactttagcccagtgaaacagactcaggacttctgccctttaggactgtagagaacaaatgtatgtagttttaagtcaccacgtttgtggccattttttatagtggcagcagaaaatgaatacagcctggctcttcttgctattcttgcatgcgcacctgagaagtgtgtgctgaggaggtgagtgaagaaggcagtgatactgtggtcagctctggccctgccaatacatcccaggattcccgagggt

SEQ ID NO: 95612 - DNA, 125079 bp, Homo sapiens
  misc_feature (1)...(125079): n = A,T,C or G
ttcttccaggtgccattcctacagtccttagcgacataatccaagcctaaacaaggttcttgatgctgttcagaatttcatcagagtcttctcagtgtcttcctccactgcagtatgggactgggcaaaagtcctcccttctcaggtagtagaacttaaaagctgctataactccttgatccattgtgtggatcaaagaggtggtgcctggaggaagaaatatcactttgatattaggaatgaagatcacccgtaaaaaagaggacatgtgggagcattatcaacaataagtaaaatcttgaaaggtggatcattctccaaacagtgcttttcctttcagtggtacagcattgcaggagagcatcctggaaaagaagctgcatctgttatgacttctcactactcctgtagcccactggcagtatgtgctcagtgctgtgcttgaagaccctcgggttctcactgggccagatcacgaaggatttcaactagtagcctgtaccatttccctcaagcaagactgttaccctgtccatcaaagccttgaaacctgacattgacttggcttccttatagataaaagtcattccaggcatccatttccagaataaggagatttcatccatattgaagatttgctccggcaagtaaatttcctccacagtcagcttatctacagtttccaaaaattcttcagctgccttcacatcagcactcacagacttaccactcactttcatattacataataaagaacgattcctgagtcctttaaaccacgcagagctagcagtaaattcaacatcctagtcaaatccagccttttctttcagcatcacaaactttctgttttggctgggatcatcgtggggctgggtggaatacatgtgtgtgtcagtctagtcttcaatccgggtcataagaaatttctctgtatctggtatagacccttcttaaattgttgatagtctcattgcctccaatgaagcagatagtttcaacttctgtcactttgttcttcttccccaagattgtagctatgatcgaatgcgacctacctgcctggggagcaataaccatcaccaattttccacctccgtggtctttaatcacttttaatttcatttccagctcaatcactgatatggtttggttgtgtccccacccaaatctcatcttgacttgtagttcccataatccccatgtgtcgtgggaaggaccaggtggagataattgaatcatgggggcagtttcctccatcctattctcatgatagtgagttagttctcacaagatctgatggttttataaggggcttctcccttcactgggcactcattcttctctctcctgctgccttgtttttttttttttgttttttttttttgttttttttttttgttttttgtttttttgagatggagtctcactctgtcacccaggttggagtgcagtggcgcgatctcggctcactgcaagctccgcctcccgggttcacaccattctcctgcctcagcctcccgaatagctgggactacaggcgcctgccactgcgcccagctaattttttgtattttttagtagagacggggtttcaccgtgttagcccggatggtctcgatctcctgacctcctgatccacccgcctcggcctcccaaagtgctgggattataggtgtgagccaccgcgcccggccctgctgccttgttaagaaggatgtgtttacttcccctttggtggtgactgtatgtttcctgaggcctcccaagccatgctgaactgtgagtccattaaacctctttcctttgtaaactacccagtctcaggcatgtctttcttagcagtgtgatcatggactaatacaatcactcaatgtggcttctctttggcaacattagccatggattctgtacgcttagggaccgtgaggaacaaaacagcatgagattaaatcaagcacaagagaaaatgatgcaatcgaaaaaaatgagatgaatgaggctactgccggtatgacacagaatactgttttacagtaaactcttggttttataagcagaagaagcacactctaaaatgatttaaagtatagtacagtaaatatataagcctgttacatagctgtttattatcattatcaagtattatatactgtacatattgtatgtgccatactggtagtgcagtaagtttgtttataccagcatcgccacaaacacatgagtaatgcacggagttgatgttatgccagctacaccactaggtgacaggaatttatcagtgtcatcagaggggaccactctcatatacgcattccttttttgaccaaaacgtcattactcagtgaacgactgtacatgtgaaaagtgtggctgggttctgccaaatagtttactaactcaaatgcctgccaagattctcagagtcaggaccatgtctcctacactccctctaatgcatcatctcctggaggactgtccttctgcacagtcattcatgggatgagctcaggctgcctgggcagtccatccagtattggattggtgattcatgactctgtagatgaggcctgtcagtcagattcctctcctggaaaaactaaaacacctggtggaaccacagtgggaagtgaagctgaaaagattatttccacaattgccaggatgcagaaaggctgaggccataaacatgcagaaaactttagaacagaccccaggatttgacagagaaagcctgtgggcagagagagaacagagcggagagggggagggkgggcagcggtgggggtcgggagggagacagaaacacagagatgggctctctctccttgcagcttgttttcagcttcagtctgcacatctctacattaaaactcttttttctaaagaaacttgagtgagttcctcacagtcccaagagccctaaggaaaacactgtctaaaacacaaaacaccatgtgctgtgcccagcacctctgaactcatctctgacaagtggtgcagcccttttcttttctgcacaatcacccaaatgggatcagaacccattaggatctttccactctgctgtgccaagaaasgggggtagggaaaggatgaaatcaatttccttaaccatcattactgagagctttgctggtgctccaaaaggtaggaggtggcagcatgcagtaaatcaatgtcagcgctccctggagacccactgtgaagacactcccagtaatgactatgatccttgttctctggcaggatgtgatgggacatacactcagggtgacaaagaggaatgcatgcacacacttctgacacacagcccctggcaagggtcctaaaagggggtgttaagagagctacttgcatggaatgtcaaaactctggaaaaaaagggagagggagaggctgtccctgttacctgggaagaaacttaacagaaagaaagtggggctttcagaaaaggccttgcccaggttaacccttcagagatgaactaaagatgcatctgatgtacaacgttttattcaaataaggtggtgatttatgtgtgtttcaccacaatgtcaattaataaggaatttccatctcactatggagtcatccaggggaacttccaagacatggtcctgaagcctccctccaaccctgagaatcttggtgggatttgcgttagcagaactgtttggcagaacccatacaatctacactattcacatatatagtcatgcattggataacattttggtcaatgatggaccacatgcatgtaagacagtggtctcacaatatattaatgtagctgaaaaactcctgtgcctagtgatcagaacatcaactcaatgcattactcacatgtttgtggtgatgctggtataaacaaaactactgcactgccagtattgcacgtggaatacatacagtaagaactcagctaaaactgagctgcttttggttcttggctgcaaagtgcaacagctggatgacctggggctccttacttgccaaatctgatcctctttccacagaatctactaggatatagtagcatagtcttatatgagtatagcattttctatttttcgaatatgttcccatacattatttgatccatacaataaacaacacttttgttatttcatccaaaaactctttattggcccagacgatattcccagccaaagctaaaagtctggtgcatgttagaagctcttctttgctggaagacgctgctggtggaggggacagtagccgatgtaagcagaactctctgcccccctcctcccatgcacacaagcaatctggagatgcagtgaacaccttgacctgagtttcagaaagaggaaagcccacaggatgtgtccaggcagacaaaagggctcaccccttctctagaattctatcaaaaaccaagggcgtcaggcaagaggtctcagagcaggtcccgaagtacctaaaaggctattcatcttttccttccctttctagtagttatttttctcattctctctcctcccccttttaaaagctggtttttcttctacttttctcatctctgaatatttctccttttctctcccaagtccctgaagtcttccccaacaccctagcccccatcttctagcacaggtcatcttcctgctgtgggcagggacctgacactggagaaacccaccatctacacagctgacttactacatgtcaaagacagttctaaaggttctatgtgtacgaattcactaactcatcacaacagctttatcagacagacacttcttaggtcggttctcacagatgaggacaccgaggcacagagtcacctaggctgggaggttcagtcactagcccaagctcacacatccgttgagtggcagtgcaggatttgaaccaagaagtccggccatgcgggccctggcctgaatccctgtactacagcagccgtctgatgaaacaaaggctgggggactctccccttccactgcaaaaggttgatctctctccagctggagcaaggggcgctggaaggatgcaatgaccccaaagccaaactgtgcctctttcctctaacattcctccgaaaagttgcgaaagaggtagtctcagtaaggggttaagaaccgtaaaaccagatttacatgacttgtgtactgcatttagcatcaaagcgctgcactctgcctttcagcaaaagaagtctccaccgcccccgcttccctgtaaaagagggagggctgaataactgcaagcctaatccgcaaaccccaagctccagccgcagcctccgcatctggaaggaaaaagcggcggcaggcgagccagggcaagggctgggccagggccggggccgggaccagggccggccgcagtgcccggctctgtggctctgaacgcggttctggccgcaagagtcgtccagcccacgctcctcccttccccctccctaaatcccacctcgagtcccgcgcccttagaggaagtgggtggctctgcccggtcgccagcaggggatcggccccttctccccaccgtgcccccgactcgagttcttctgggcactgccatcctctcggtgcgtgcccgtcttcctgctgaaacggaccccagtggctcccgggcctcccgggcgctcttccttagccccgccagcttgagggccgcgtccagagagcggggagctcctctcggggcgccgatcaggtccccgcgccgcagccgccgcctccggcgtctcccaggctcggcctctgccgagcccgctgcggtccacgtggcttggcagagctaaattcggcttgcaggaagcccggagccaagggaaagccgagccaagttggggtgggcggggccgaacggaggcgcagagtcgggaggggcgggcactgggcggaggaaggggagggccgcgcgcaggggaggcggtggctgggctctggcgcgccctggcacccggccccggccggccagggaaggcggcccctcctcggtcgccccgcctttcactcccgttacacccgggggaaggtgttcccgagccctctcccaccctcatcccgcctcctcgcttcctcggctccagcctccgccggcggagcccactatgccagacagtttcgacactttgcaaagacaaagagccctagaccggagggaggaggaggaggaagaagagcggagagagaaggaagaggcgatgtgagctgggaagggggcaagtgtccgggacacccacacccctgtattctcctccgaaccccttcatgcccaaatcccggaaactccagcgtgtctccagccgtggtgagtgcgcgcgcggaggcgaaccctgctcggggtgcgcgggggctgcgtccgcctgagttggggctcgggcagtttcctgtggattctcggagtggaaggttgattgtctggacccgggaactgaaggggtggggaggggactaggagggtgtgacagtggagctgggactgaagaccccgggattctagtggaagacattcgaagggagaccccttccttggcagcggcgaccacccagggctttgggagaggaagaaggtcggggtggaggttcgggcttaggggtcttcggccgacactggaggagctgcctggagctctgtggggaacctacgccaagtcccgggcagcggttcccgaaagcagccccagtgacattgcacccggcgccgggctgggatctcctccgctggggccgcccgtgggaggagacctcgctgggtggccgggctcaggcgctctcgagcggatttggggtcacaggctgggacaccgcggaggccgccagtgttctggacgagcggccgtgggacagtatccggatcgagtcccccaatccgctgcaagcaggcgcagatccgggaggtggctatcggccccggggacgccgtcagagcgcgctgctccggatctgggggtgaagttgacacccgggacaagagagctgaacgcggcgtggcggacagtgggggacgcgggtgggccaaggagagcacggccggagtcgtgttagtggcaactcgaaactctgaatccgccccaaccccgtgaggcgtcgcagctcccaagaaataatctgacaaaagttagcaacttgcctgtgtctctcgtgtgtgtgacctgcgtgggggcagggccaccccttctgggagcgcacggggacggacagcggtgaccctggggcgaggcgctctggtgagggtacagttagtttggaatcgggacggtggcgcaactttccgctcctcctttctctgcgcgagtgtttaagcgtgaccttgcgggaggaagcgcggctgaacttgagatgggggttgagcttgcgccccggcttggcacaragacgtcggagcgcgcattagcctggccttgcagccgggtctcccaggaagcgtgtggggatcgtctggctctgctcgtcagctggagccctgactcgctcctccctcctacgctagggtcctcggcggccgtaccatgcgcggggctcggtggtgtgttgggcgaggggacacgtgcgcacccagaagcgcgcaagggggtgggggttgggcaggtcactgcgtctcgcgggctgggcgagtcccgcagagggagtcagccgtgaccctgagggcagtgactggctcgccgcgtccctgcatcaggcattcgcccggctttctcgtgattgtttccgggcacccctggcctctcccgacttctccccctcgcgggtccccaagccccgcaagtttgcgacgagctggttctccagggagacagcgagcgcccacccccgctctgcggctgggtgtgtgtggtgagaggaagagacgggaggaggaggcgaggccgactcgccaacgaggaaaacggggtgagaggggagccgggttttccaatagtcgccagggcgcctggcacgtcgtaggtgctaacgcartgttcattgacaaggccccaaggtggaaggtgctggcaggggcccggacgcccccttcttcccttccagtctctaaaatggagttcaaatgtatcgaccaagccctttaggcttctagacgtgcctggagcacctactacgtgcgggggctctactcctggcctgttcgtagaagctgcgggcggagcctcctgattttctttaccccgcgctgcccaagcgcccagaggcttcgaaaaggcaaggtgcactgccccctgccggctgctgtggaaactgccgcttgtctctgcggtggggaaggggcgcccagtgcgggggtccctcagtgccttcccgcacctccccttcctgccccaaacattaggacccctgccggctgttttctgaaatcccatggttggctgaaatgactgactagagttcaccactccgtgcccctcagcctctgccaatatctgggtacagcgtggggcctcttctagtctcccgtctctctgtctctgtctctctttggtcgccagacttaacctctcggcgtctcagtttctatatctgcaaaatgaggccaataatacattctccaaaatacgttctgcataattgcgagtggcgataatacatataattaagtgaatgtgtgtatgtataggtagttcatactctacatgtgtgtatgtgtataccttgacttcaggtctagggaaaaaagttccatygtacactttttgctaaataaagaatgaatagagggctccttctcctcttgccttttcaaaatcccacaaaccctgaagtttgctttccctgcatttttctgggccggcatttgctgtttagagtctgattggacaaggccaggacctgggcttgagcagggcctttgttgcctacctccctggctgggaggccacagcaccccacccagggtgagagagaaaaacaggaagcgttgctagaagtgatggcagaggagggtttcttagggagtgtggagtctgttcctcgaagctctgcagcagcaggcggaaactgccttctgagcagccttcttgctgattgtaatcagggctgtactgccccccttccctggtggcgctcacagcattggctgtcgctgatctggaagcccttcttatggggatgaagtcgtctgtgagcttgacaggaaggagtccttctaggtcctgggtctttgggggtgaggtagatctctgtctcccctccccaccaagcagcccccgagccaggacaccacccaaaggcaggcagttgacattacccaaggaagggccctctcccatgtgtgactctgaggcttctggtcaggtaaccttgcttgagtcagttcctgtgtagaaggttgctgactcaaagggtttatatttgggtagagctttggccagggatctaaacattaaccctcactctaggcccctcccacaccaccaaaagcgaccaggaaagcaaaaaataaaatccaccagccatcttgtaaaagctttccagtgagttctgcatgcctgtgtgcatacactccacaggctgatggaagagctggcccggtcacaaagaattctagaataagacttagatgcagcttcgttccgttgtgtagactttgtggaaacttcagcatccctgctggcacacctgaggagctgagagctctcttctgctctaatttggtcacaggagcccagaccggggccctgtgagagcctgcatttgagtcccagtggcagcgctcagttactttgcaacttggctcccaaactattccaggctctgggtctcagtttcactctcaaaataagaggcttggctgggcacagtggctcaggcctgtaatcccagcactttgggaggccgaggtgggtggatcatttgaggtcaggagtttgagaccagctggccaatgtggtgaaaccctgcctctactraaaatacaaaaattagccgggcatagtggtgggctcctgtagtacccagctactcaggaggctgaggcaggagaatcacttggacccgggaggtggagattgcagtgagctgagatcgtgccatggcactccagtctcggcgacagagtgagactgtctcaaaaaaaaaaaaaaagagagcraggctttagagttctgctgcccgtcactgagggtccattaaaagcttctctttgtgaagacagccaccacctgatttatgtttgcttcagccagcatcatcctcaaaaccctcccggtatcacagacaaccctggcttggggcagctggactgtctactaccccatgccaagggcatctcccctctcaaagagtggccaggaccattcggagcccacacccgcttggcaaagtcattttctagcagttctcaacgctagattttgaaagcagtcccagaagtttcagactctgaggtctgaaacctgacagagccagggtgccatctgtggggactcccaaatggtacatattgcagaaggaaccccagtgatctcaccagggcctgtttwgcttcccatccacaagctgaacatgaccttagaaatcactttggtcagccctttcactttaatgtaaaaatattgaggctcagaggggaagtcactggactgtaaaatctggggttttattgtttatttggtcttgttattggtggtggttgggttgttttgatttcagttgagccaacatttactgggaacttattaccttccaggagcaccatgcaaagtgcggagatgcagagaggaaagactactcggtccttgttccttgctgtcccagaggtcacagtgctgtggggagggggacaaggacataccctgtcaggctgcgtatataaatacacaggtgctaagcaaaatgggaacggagaagggaaaggttccctccaccttgagagacccacagaagggtgttctagagatggatgagtcagactgcaagagagcaaagatatcttcctgaatacattcaatatcaaagcatcatgtgccctgtgtgtgcaaaataataataatcataataataaagtaaaataaaagattggctgtaagcctgttccacatggttctgaagaggtaagggaattgggaattttagaggttcagtgctttggccccatttccctccttaggtcctgatctctggtttgtttgtgtgagaggaatggttgccttgcagccarcctgcaagttcctacaccatgagagcctccaagcattggaatgcccgtgtataaaacrgagagtggctgctttgcatttgcctttttaaaaaaataaaataaaacttagtgctttatttttaatgctcatccgtatactttatctcagattttcatagctgatttgggagggtggcatggcaggtggcaggtaggagaaagcgcccaggttttcagggggacgctactatccaggccggctgagtgagctggagcaagtccctgcatttccgtgagccaggtttgaggtgcatgtgggtgatcaccccctgcaatgcgggggatgcagggcccccaggaggattaagggagaggattcttgggagagttgtgcatgcgggagtcccagagcctccttgattccagttgcattaagtctgtttataagagaaagtgatcgcattcctcaagacagagcctacgggagacagaggagttgactgaaggcaggaagttttggaaaactcctggaaaagcacttgaagtaggaggaggctgattttaaggtaaaatggtttgtgaatgatccgcctggaagcagtaaggcctaatgactgtgttgggggagcatgctcctctcattcctatgggttgtgtcaaacttttggcttctttgtccctagggcaggacacagcattactagttagccagaaccctggcctaagaagccacccaaagcactgttaccaggagcagagacacacaggggaggtggggggcagcataagatggtcggggtgcccagcatcataagccacctggagggagcccttcctatgtggcctggctggccagcagggatgggatttgtgtcaaagttcaaggcacctgcagtggacgctattgtggttcccacctgggacaactgttagagagggctctggagttgaggtgttttytacagagtcaggggaatccctgcagggaaaccactggccaaggacacagaactcctggrccctggccstggccctggcccatctgctccgggyyggggaccttgggcacgttgtttaacctctttgacccttcgtttcctcacctgggagatggtagtataaattcccactccctctgttacaggagagttaggaggaccccacaaaatgaagcacaggaacctgccttattgataagaattttagtagcatctactttttatagtttaatgtacacccagtagtgccaagtattttgaacatcttatcattctggggttcagcaggaagcattgaatggagggtctgaataaagatgtgcttccagagatggtgcccacattcagagaagtcagcaggggatgctgtagcacctgggcccatttaccacccccagaagaagtggcacggtaggggaagggctaggggaaccaggagagcatcgcaatagttgccagaagcctctggaagagagagaccacaaggccccctcctcaacttggcaggagaggagccaggcggatcaaccctgcaaccttgctctcctctgtcctgccctctgcaactctgtggcaccaagagstgagcccacccagcagccaaaggcagggagctccctgatggagccccccagggcaggacaaggtggaggtggattaggagcaggcctggrggrgacacacacacacacacacacacacacacacacacacacacacrcacmggcacacagagctgttatctcatttgaatctgcaacagctgggggtggggaggagtagtcacaagattaccagttggcaggtaagatgcccaggaactggagggtaacccccttgcctaaggccacacagctggtgggagcccacattttaacccattgtgtcttatcagccctagtaaagtaagaagatccattgtaagacattatgaagaccttcaattgttatcagtagcatcttaatgagaagcagaatagtttaagtgttaaggtttgcctgggtttcaattggaggtttattacttagtgatcaaattactgaccttttctatgtctcagcttcctcttctatcatgaaggcacactttgtacagttgatgtgaaaactaaacaagtttattcagtaaargtctctcaacaaatgttagttttgattcctgagaaggtcaagatttagacagggcggtgtgggtgtgagtggtacttcaacatggccttttaacctattcagcattcaaataatatggtttgaatatttgtaggttaaaagtttctttcttccagttattctgacgatgtttgtttcatttcttctgactctgtgtgtgtgtgtgtgtgtgtgtgtgtgtgtgtgtgkattttctctttaaaacacatgaaagtgccaaaggagagaatgacaagaaatttaaagacctaaattggctttattgtgattctagaattgagcaacacwtcgttccacaaaacaaacagaataggttttccagtgagctgagcagaggaggttggctttataaacaggactgaagaaaccagaagcaacaaagtgtgtactcattacatttagagagaacactagaaaaataactgattagttaacatccggttactttaggctgcctttttttgtgctaaggattaaagccgagagaacttcatgatcataccagttgacaatttaatcctgcttatttgagaaattgactctctcttgatttctcaggaagtcagatgacaacttagttttgtcgatggctgttgtaaaacctcggttcttgtctccttagtttaaaagaaattaaacaagagacacacagcaaaggagatgcagcatggagcgatttgttgcaaaagaggcaggatattctgaaagtgacgtgcagaatagacagtacactctgagacaggattcagggcgggctgctcgtgaggatgggacagcattgacttactggggagactcccttgatgacagccttacacggttattcataaggaggcaggaagaggcgctagcagtaagcatgttctgggtggtcttcggggtgcacatgtgcagcagctgtacctgcttgcttgtatgttacatgtctcattaacatctgaaatctccacccgggagtgtgttttttactattataatgagcaaaggttcagtctgaggacaggtaaaatcaaaatgtgcaccctcttacgggggaaattccttactggagctagtttggcttgagtgaactggactacagtgtgaatgctggcgcttatcgtgttgaccctgtggtcgccatgccacggttgccacatctcgaggacatggctccctttttgactacctatcccgcctcagtttggatttggggacctggaactttagcgtgggtaactccattttgattctcagccggccctgttggggcctagtgcggaaacttagtccaaaacaatggccttctataatttttattaaacaaatcctatgtaatcatgtatgattctaaagcccttaatggagtataaaatatgacttaaaaattacttgcaataattcagaaaagttgagaagaaaagaacattagctccaaattatttggcagaattaaaaagagggttacaagtgacttttggaaagtacacattggggtgtacaaataaagtactttctctgaatttcattagctacattaaaaaaagaaaagatcaaatgcaatagatagcactgtaatagattttgctacattaaaaaaaatccatttgaatacacagtgaactaaaacaccagagtggctaaaaagtcccttcatgcatatttacttagcagagagctcttgagaaagacccaaccaataaaccccaaccaaagcaaatccagctacttctctagctgagagggtggaatgactccaaaatattgtttcaagctcaaaaagcctaaaacaactccacataaaaaaacaaaaatctatctaattggacatttacctttttggaaataaaaggcccagtgggaaaaaaaaaaaaaaagaaagaaagaaaggaaggaaggaaggaaggaaggaaggaaggaaggaaggaaggaaagaaagaaagaaacccttttcttagatccttagaagactcgactggagcccaaaataaatccyctgaattggccaagtattaaaggactctattctccttccctgcctttagtgtgctggagccctaacaagggcaaagaactgccagtggtcaagagctcaaacacccggaacaacccagcgacattcacagacaccagcaactacagccctgacccgagttggccctcagttcaactcttctgacggtcctcctgattttgcagataaagatgtggattcaggccaggccctgtggctcatacctgtaatcccagcactttgggaggctgaggtggccagatcacgagatcaagagatcgagaccatcctggccaacatggcgaaaccccatctctactaaaaatacaaaaattakctggacatgatggtgtgtgcctgtagtcccagctactcgggaggctgaggtaggagaatcacttgaacccaggaggcggaggttgcagtgagctgagatcctgccactgcactccagcctggtgacagaatgagactctgtctcaaaaaaaaaaaaaaaaaaagatgtggattcacaggggagaagtgacttactggccaaggtcacatgggcctctgcctccagatcttctgtgtgtctgaaattatcatttctacttggtaggtctctctttttttttatttttatttttggagacagggtcttgctctgttgcctgggctggagtgcagtatatgatcttggctcactgcaacttctgcctgctgagctcccacctcagcctcctgagtagctgggactacaggtatacgccattgtggatcactcttggtgaagggataagcccagaccttcaccaaccttgcagttctatcacagtcgtccttagtttatkcctttagagtccccatcaatcacccttcccactctgaactgtagagaggtacacagcacagtgagttgacttgatcaacatctggtcgagtgtctgggaaatggcagatctaggccttgagccctggtagagctacctcgcttcattcccagcaccccagtaccttactgcctccacctcacccccgtgctccctccttggctgagcgtgagaacagtggcaaaaaaaacaacataaatctaagtctctacatcctcattagatcctagagtcagctgatggtgcccaaattatcatcacaacaatataacgtaacataacataacacaaccaccacgaccaccatttacagttcatgtgaaataggagtgaaccggaaccacaagctgacttggccaagaaccagctttagcattaggatgtcagagagctcagctgccacctgtgagactgaggggaggcagtggagggttctgatggtgagacccaggtatgtgtgtctcagtggaacctccagaaagctcaaggaattcatggcactcggagacatgtagttgggtggtttgcccattgtttagttattgtgcatgtaaatccttttcttgcagaggtggaaatcagcttctaaggagatggagtcaaagtcaagcaacagaggccagaggggaggaaaatcttgcagacggtttgggaacaggggatcttgcttgaaattttttggggcaaactgattaactggcagcaagcaaaaaaaaaaaaaaaaaaaaagatggctctgggcaaaccttgagtaaggcttcacagaaaataatttcagttgattgcattttctagaaaactttaagagtttaactgtgcactctacgtgacaggctgtctgccctccacctgggctgggctgcattgcctacttcccctcattagaatttctcattcgtttactatgggagcctagtctttacagtgactctctgtaaagtgtatgtttccacttttttcttaatcccattttatagatgtggaaaccaaggttcagagaggttaagtcacttaaccgaggtcacttagctcgaaagtggcagaaccaggatttataagtgcaccatttctgtctgaagcctgagacctcaggcaccatgcaacgtaattcccaagtcatcctatatccctggmtaagtggggactctggaagggaagggcagcttctctaaggttcagataggaaactagtcacaccaggtgcctggcccccagcccagcccacgagacgtgctgtgaccacctgggccctctggtgaccatgaacccatgctctgtaacatccttttgggcaggagttcctgactgttctccacctggtgctttccaggtctcacaccagcagcttcattctcccaaagcctggggctctgagtcttctccccgattcaccatcactgggtgagtccgtgggtttatttagcctgttacattctggctttattttcttctaagctgctaaattcatcataatttattacacagcaatagataatacacatgaaatgcaaatactttttctgttataagttgtcatgctgatggaagtgatggtatttcagtgtgtttttttttttagtaaaactgacacatagtaattgtacatatttatggggtacgtagtgagttttcatacatgcaatgtagagtgatcaaatcagggtaatttgcatatctgtcacctcaaacattcatcatttgtgttgggaacattcaaaatcctctcttctagctatttgaaaatatgaaaatatattataaatccttgtttactatagccaccctgcagtgccacagaacactagaacctattcctcctatctgtaattttgtttcctttaactgctccacatccgtccctgcatggctgcttgcaagaactcatctttgtggcttgttgttataaattgaattcgaagagccccaaggtgcctggggattgagggaggcggtgagccactttgagcctgccggggggtttggagaaaggactgagcaggaaggctgagtgcaaagtttgcaatcaggcgtgtaaacttagccagctccctagctagatgggagcctcttggaggcaacctgcttcacgtaaaaggaatcgtcagcgtcgctgttgcaaccttggaaaattcccttttaataacatcttcacaatggagagaaaggtttgttgttcttcttcttacttgaaaacactgttaatcctaccacctggtggagagtttgatgaataaagaccgttgctcaggaaacatgttagctgccacgaataggaatgtctttgtgaggtgtattactggttgtttctaaaacataatcttatgttttaaaattcagtcttttggcaaaaaaaggaaattaaaatgaaagggagagattaggcagacagtaccatcgttctttctttcaccacctgatagaagcttcaaatggaaaacacacctttcagaatgggttgaagamctggttccaacctaaggtctgctgctattttctgtttctccctgcgacctggaacaaactgagctcagcaaacatgatccttggaccacagtaagtcctcatttaatgacatcgataggtccttggaaattgtgagtttaagggaaacgacataaaaaactgatttcaccatagggtaactgatataaacaagagttaagtatctctgatgtatttctgttcataaaaatatcaccaaacttctaaatgaaggccccaaacagcatcgcaggtggccacagcctgtcccagtggcttaggacgtgcacacatgcacacacacacacacacacacacacacacaaaaccacactctatcgccctgggaccacataaacacagcagttcacctgatatgcacagctttttggggtgtgggaaactggagtgcctggagaagacccacgaggacatgaggaaaacttgcaaactccacacacacagtggtcccggccgggaatccgtattcttctcatcaatgttataatgaaatgctgttgaatgaaacagcattattggaagacctgcggcataggattttatacattaaactgacatttatgcaatgtcagaaatccaaacaaggagaaaaaaatatactggctgtggagacagttttgaatatcagaatacttctgcattgtcaggaacctgccccggatggagtaaaggaggttttctctttttctctgagccatggtgtcataaactttagtcaccattacttgcgggaggacgggggcatggtatgttggttgaataattagttacagaggttgcacacttaaatagtgtcaaagaattataaaatcttagcatttgcaaagagcctttgcagtaaccttgttcaaccttcttctatctactgagtctttcattgattccttgatttactcataaaagtattagctctgccactgcctaactgcgtgtccttcagcaagttgctgaacctctctgtacttccctttcctcatccataaaatctggataacaatggtacctacctcccaggaggtaataaataagcattcaatgagttaacacttggaccgtgctcagaagagtccttgttaaagatatgctgtggcaacacatcatcatcaattacattcttgttccgcctccttgagctgcatttttcactacctgtggtagggagctctgtgccccacacagtggtgttttgacctctgggcagctttgcggtttagaaggctctttctcattcaaagcttccaaccagagagcgcttcctggagcagatggcagaatggtgctcttaggagctatctgaatttaaggatgggaaagttgtctgggctgtgaagctagggtatcatcactggacatcagaggcacaagagacatacctaagattttagccatgagggggacctcaagacactggcctcttttttttttttttttttttgagacggagtctcactctgttgcccaggctggagtgcagtggcatgatctcagctcactgcaacctccgcctcccagattcaagcaattctcctgcctcagcctcctgagctcactgcaacctccaccttctggattcaagcaattcttccgcctcagcctcctaagtagctgggattacaggcacgcgccaccacgcctggctaatttttgtatttttagtagagacagggtttcaccatgttggtcaggctagtctcaaactcttgacctcatgatctgcctgccttggcctcccaaagtgctgggattacaggtgtgagtcagaccacggcctctttattttacagccgagaggacagcacagacagggcmtggctggtgcgacagctcaacccatcatcaggcagaacctggataggaggccagcccgtggggtgatactgccaaggcctgcattaccactcagttatcctctcatcttgggctgctcagggtgccctaragaacatgscttctgtgccctcctgcactagagcaggcaggaagagcagcctggaccatgggtaccacatatcctatgaggaccccattgtgccacgcgttggttgactggatgayttccactgtgtttacactgcacagtctcctcacttcctttagacctcccggtgagcaagcttgtattgtcttttgtgaattctggcatctgcctcccctctttttcttcctgaggttctgcccaggaaataccacatactggtcattctaggcccattcactgtctaatcaggctttgagcttgctagtgctatcagtgttttacagctgagaaggctggctcgctgaggttggccattgcctgaaggtctcccaggttgggagggtcaggttggggggttgtcacatacccctttccaccatgtcacaatgtttccttctaacacatgcatgcacatcataaaaggctcgagacccagtatatctggtctccctgcctgcattaatagcaccgctgccaacctccctcccacttccctccacttagttttatcatctaagaggccaaaagaacaaaatgtcccccctccaccacaccatatttcaaagggctataaataggactgttagtggtggcattctgggtcacatttgccagggacagactttatatgatgtcagccgtgtccttgggtgcaaggtttccatggctaatagttttctttctcccttctcttccttcccattttcgttccttctttttctccctccctttcttctttcgtttcttcatcctaaaaatcttgttcgaaagtacatagttatgcagccttcattagctgaggttgcttagaagacaaacaggtccatgtttcacaattcctcccagatctgagaaaggaacgtgactctgagcrgacagaacaatatatgctgggcccagaggacagctgtacagcctgccagcatctcactcctctgaaagcaaattcagtccatccaagagcaaggccaaggggttgtctcctgtccaggaggccaaggccagggggagaagacaggctctggagtcaccaggcctgctgttgatcagtggtgagatctggggcaagtgacttccacgtccgagcttagtgttaccccttgtgctctgggggtgacaccaactcatcttcctgggtgagagtggagattcaaaaagaaaaaacaagctgggcatggtggctcatgcctgcaatcctagcactttgggaggccgagatgggtggattgcctgagctcaggagttcgagatcagcctgggcaacatgatgaaaccccgtctctactaaaatacaaaaaaaatcagccaggcgtggtggcaggtgcctgtaatcccagctacgcgggaggctgaggcacgaggattgcttgaacttgggaggcggaggttgcagtgagccgagaccgtgccactccactccagcctgggcaccaaagtgaaattctgtctcaaaacaaaacaaagcaaaacaaaacaaacaaacaacaacaacaaaaaaaaaaatgggtaggttgggaacagccccagagaagagatggccttcaagctgggactggaaagatggtgagccgttccaacagcagcagtgaggggtggagagggcaccccatggaggaatccactgcccaagccaggcacccgccgactcctgtgattggagggaagaggtggaaaaaaaggaaacagggaggtcccaatcaggtgggtcctaaatggcttgatcctttcggtaatgaggtgcaagcaaggtttcttttccttcctgcagaatgggatttcatcagactccccctcctttctttttttttaggaaaaccatgtggcccaggttcacagtggatgggagggcaggacgaatgtcccatcaatggtgcgggtgggagtcactgtgagccacatttggagtgtttgctccaatgtgagaattggtgactttatctctggggtttgagaacagattgcactacggtgctgagaaacgacacatggaaagtgacttggagattacgagcctggtggctgagaggactggggagccagggatgacaacggcggggggagcaacagaaatccacaccagggaagcgtgctgttcctcccattacagacccattggatctgagatgaggaagatgaactaaagcccggccaggctgagacgggtgaagaaaaagcaaaggcagaggagtgaagctcagttcaattctggaaaggctgagcagtcccccgcgggggtggcctgcttcctccccaggccgcacagacaccagccgggaaatcccttcccattcccttgtctccccagccctcagagtgaagtagaaaaacccaagtaggctgggcgcggtggctcacacctgtaattccagcactttgggaggccgtggctggcagatcacgaggtcaggagctcgagaccatcctggccaacatggtgaaaccccaccwctactaaaaatacaaaaatattagctgagtgtggtgatgtgtgcctgtaattccaggtgctcaggaggctgaggcacgagaatcgcttgaatccaggaggcggaggttgcagtgagccgagatcgcgccactgcactccaccctggcgacagagcaagactccgactcaaaaaaaaaaaaaaagaaaagaaataaagaaataaaaaaaccccaagtagatggctggaccagcacttaggaggaaagcaggtgttcagttaaagtttctccaatctgaatcagacaggcagtagcagatgtgaagaggaggaggtggtggcccaggagaaggtaccctctctcactcatgctgacctggtcatgggcagtcagcgcaatcctagccttcttgacatccttagtcctttcagaaagggcccatctcctttgattcatagttctcactctccagccttcagcccttcatctgcctacacccctacatcccactgtcgagtgtaggattttggaacaccattgtcagagggtcagtggaatggatccacccccaccgctgcagtgtaaacgtggctcattcatgtcattcgctgcaagggagcatagggttggggcagccggagagcagcagatggtcatgtgcattcaggtgtcttccagagtagcctggtgactttgggcaggtgattgcagactctgaaaaatgggtctagaatttgactcatgctcatggttgtgaaattaacttttggaaaagtgcctggtacctagtaggagctcaacaatgaggagcggtcctattccctaaagacagaaatcctccacctttgatgagaatcagaaaccgctatacagccctgattgggtggatcttgtcgaagggtcccagttccaggggctcagtgcatggagtctgcagaagcaataaggccccggacacctccctgtactcttctcccttgtgtctcttcctcctggcccccttagcaccctgctcactggatccttctggaccctcactgtgagrcctcttagattgccgcaacctatgttgcaaactttgttctaggaacctggtatccaggctgttggccatctctaatttagtcctaagatagattcccaaaggtggcacaggttgcctgtggaccttttcactgcatgatcctaatcacagctgatgttttctggtgctctatgctttactaagtgccctcaaatgatgataacagaaagatactcgctaccacttctcaacaagcataccaggcagtgttctgagctcctgtgtacattttctaattcattctcataaccctatraggtcagggacttttattatccccatcaccaaaagaggagacacaggtactgagtgatgagataacttgtccaagaccctggtcagttgatggcatagccattggccaagtcattattgtgtttgtcccttttgaacagcaggtaaagtgaggcttttcctcatctgtcttcttcatgaccatcatcatcagcatttccacattacagatgaggaaactgaggcttccagaggcacacgggcaaggctggtgaaacaggagctgggatctaggggtttggatgctggggtacaggaactcatcctggsgttgaaggtggagagagctggaagttgattgtmtcagttctgcttacgttctggccacaatgaatctgctcatggcccatgtggtactaagagctgttaacagcaaagcagagtggagcagggagggctttttatgcaaacagtggggtgcacagggggttggatagtgtgtgcctcaaggtcatgtcagccctggcgccgtctctacatttgaactcagtatccctttgagcacaaagggatattgtgttgaagacagacctgactttgagtctcatctctgccaatttctagctgtgtggccctgggcaaattatactctttcagaatcttaatttccacatctgtgaaatgggagtaaaactaccagccccagakgactgctgtgaagctggaatgaaatcatgcacatgagatgctttgcgtgctgttggcctcattgtctgtacttaacctatggttgctattgttgatgataatagctcttccagcgaagcagccagacctcagtggttagccttcaaattcagaaaggcacttcattatgagagatcccatgtgttgagcccatttcagagagagaggttataagtgagaacagctttcctagtctaacaggtgcatgtgcttcctgcccaaagttcttctcacttttactttcagatcagccaagttggcctctggagtccctgggtctccacagagggagatgccaccgcacccaaaggggacccactctctgagcttccctgctcagtttgctcaaacgctggcatgaaccatgtcattcctggttcacacacccagaatttctgcccataaacctggttctcgacatgcagcccagccaacggctctgctgagggccttccagcactcacaccagatgtttctaggtcctctcaccattcctcactcagcttctgtgtctgctcttgcactttcctacttccggggcaacttgtcccatttgcgaactgatctggctagactgtctcagtcttgatctccttctccgtcagtgtcatgtcccggatgggaatctagattaagaaaccacctacttgcacattcatgagcctgccctggacacagagtggtgtggttccttgctgatggacctgtgttctctctccccctgcagtgggcttttctagggcagagctcaaaagtgtactgttgtccccagcagggcagaacacagtgcttggcccagcccagtgcaaggctcagtaaatactgatggcaagtaaactgtgttagtcccagactttacaatagagtagagttaggaattagttaatcattcaggctccagcctttatcagtcatatgaccttgagcaaattacttaatctcctcaagcctccatttactcaccttcaaaatgatgaaaatcatagtatacacatccaaggaccattgtgaagattaactgagcttttgagtatraagggcttagtttagcaagtacctgtaagtacttaaaaaatgttatctgttatgctagtttaagtgttatctgttattgctactaccagtatcaaagtgatttcatgttgttttgtattcacttacttcttatcagagccctgcaaagtagttgaagcagagacagttccattttaccaatgagtaaagtaaaactcagagaaaggcttgctcgctctttctttctttctttctttctttctttctttctttctttctttctttctttctttctttctttctttccttctctttctttctctttctttctttctgtctttctgtctctttctttctctttctttctttctctctctctctctttcttttcctcactctgttgccaggctggagtgcagtggtgtgatctcagctcactgcaacctctgcctcctgggttcaagtgattctcctgcctcagcctcctcagtagctgggactacaggtgcacaccatcacacctagctaatttttgtatttttagtagagacggggcttcaccatgttggccaggataatcttgatctcttgacctcgtgatccacctgcctcggtctcccaaagtgttgggattacagatgtgagtcaccaaaaggctgtttttctaatatcacacagcttgacttgaccagtgtcccctaggggcacacctagaagcaggccacactttttggatggaacatgtcatgcccacaggcctcagaaaagatccctataatttaaaaatgcagcaatagtattcagccagacccagtggtaacagttatccagatgattgtttgcatggagaggaaaagctatgatttattaagcaaacttgccctgctcctccaggagtggtatccagctttacttctagtttgctgctatacttcaagaagacacaaaattggagaatacactctcttatgagagttattgtattatattgtacagtagaaaggagcctcaggtggcatgagggggctgtggatggtggaagcgtgaatatgggccaagaaataatgatttatgggttcagaacaggaggaatgagaacataaccatgatttgtttgagtggaatttgtcctaatctgtgctctagctggagaaggtagacatttttcttgcttccgagtctcttggtttaagcccagcagttccctgcttggctcctagattggtgctagtggctaccagttggatggatggaaatgaargggatgaatgggctggaacaggatgatagtaattcgcctggtattaggaagaacactgaaccccgggtctaaggccctctgcccactgtccagctgcacagctctccagctgtgtcatggaggagccacttctctgggccttggtttcctcatttgtggtcttggagagtcacatgagcttttctgaacctctccaaaaatggggacactttctgatttgtctttcttgtatggctcgtgtgtatgaacatgcttcacagatgtttcagcggtaagagtttagttgttgctcttaattggaagcaatcttggaagggtggggaaatagggactcaatatagaaagaggcatgacagcagagcacgagtgagaagagaactgggacatggcttttagaaaagatttccagggctcctgttaaaaccaaaaggcaaggaaagtctaaggagctcatcaggctgttcctgggatctggggcagaaagacagtggaataattgccttttctctgcatttaacaccccagtgctgtattagagaagctgagaaactgaggctgcaaaaggtgagccccacatggggtgcagttctagttttgtttgtttgtttgtttgttttgttttttgagacagagtttcactcttgttccccaagctggagcgcaatggtacgatcttggctcaccacaacctctgcctcccaggttcaagcgattctcctgcctcagcctcctgagtagctgggattacaggcatgcaccaccatgcctggctaattttgtatttttagtagagacagggtttctccacgttggtcaggttggtctcgaacctccgacctcaggtgatttgcccacctcggcctcccaaagtgttaggattacaggcgtgagccaccacgcctggcgagttctagtttttaagataagcctccaggttgcaaacttgtcagttggaatttggaatccaatgccattgccaacttatttttttcaaagccaacttaagaccaatgaaagaattggttcaagatgttatgcgttgcttcatgaagagtcttaggctttaattgaagatcacagtcggccacaggtgccaggctgtggagtcagaggcttcattcagagcagggctccatgtttaatctgattcatagattaccgccttatatctttttttttttttggagacagagtttcactcttattgcccaggctggagtgcaatggtgcaatcctggctcaccacaacctccacctcctgggttctagtgattctcctgcctcagcctcccgagtagctgggattacaggcgtgtgccaccacgcctggctaattttttgcatttttagtagagacagggtttctccatgttggtcaggctggtctcaatctcccaacctcaggtgatccacccacctcggcctcccaaagtgctgggattacaggcgtgagccaccacgccccgctactgccttatatcttatggcatagaacagttgcagtatatatcctgatataggcatatatacatgcaggtttttatattacaaggattctcaactatttagtaagatgtaacatacataaggcccaaactcagtaatgagcttctgcggagttataaatcagccacatcctgatggattctctgagattgatctggctgttcacccatttattcatggattcactggtcattatttagtgcctcctacacccatatgatagccagtggggtaagagtggggaaatctagtgacaagtaaaatatagctcccttcctcacctctgaagtctcagtctagtgagagcaaccaacagtgggattgaggtgatgcccggtgcttagtaaattcttgctaaatgagagaatgaatgaagaaacacatgaatgtgtgctcccagggtgctcccaggtaaggccctaatccagcttcgagtttggaaggtggtgtgtccaagaaaacatcttagaagtgtggtacctgtattgttttggtcaccctctcattcaagaaataggaataggccttctcccacatgccaagtggtgtgctgggtggtgagggcacagtggtatgtagggcagacatgcccttgcccttatggagttaacgtgttggyrgtaatgctttgtaggaatgcagggaacactgaaaatatcgaggggcagtgcccagccttgtccccagagtcagcgaagatgtctctgtgaagtggtgtttacactgaaatgtgaagggtgagtagaaagtacagagggaatggggaaggtgtgagccagtgatgcaagggagggaggcctgagttacaatttacaaggatccccctggctgctgccaagagagggagttggcattagaggcgatggctattttaagactggctaggaggctgtggcagtgagcatcgtgccttaattctcatttctgaaaagaaagagtttcgttcctatagctttcctggaccctgactcctaactgtgctgactctggtcatgttcatgtatcttctaagtaaacatcctgcccccatcagcaggtgccaaatagaatctgtttatagtcaacaccacacatggtttccagaaccaggcaaatgcctttagacaactctgggcttagacagtcactaaatgctgttgtctctccctctaaaagagctcttgaatctcccactcctgcttttgcccagggccctgccttctggccctcattatctcttcataatcaccaactcaacaggggctgaactttcttcctaacacacaagtttatcctcatgtatcaccattgccagcggtataaagaaacctcagtggttgtatcagtcagctttctctgtataacaaacagccccaaaccccagtgcctacaaacagacatttatgatttctgtgggttgatgatctggtctgcacagtttgtgttaggctgattgcctgtgctggcccatccacacatctgggggctgagctggggtgcctcagcctctctccacacattgtctattatcctccagggggctacctcaggcttgctaatgtggcagcagaatgatttccagcagcagctgggcatggtggctcatgcccaggagctcaagaccagccatggcaacatagcaagaccctacaaaaaataaaaataattagcctggtgtgatagcacgaacctgtagttccagctactcaggaggcttagagggaggatcgcttgaccctggaggtcaaggctgcagtgagtggtagtcatgccacggcccctccagcctggaaaactgagtgagacccatctcaaaaaaaaaaagaatgattctcagcagcaagagagaggaacttttaggtataagcacttttaaagcctttatttatgtcacctttgctatggtgccattggctaaagcaagtctcgtggccaaacttcgattctccctcatgctgggaggggaggcaaagccacactgcagagtgtgcgtgcaggtggcctgaacaaaytggggccatttcgacagcagtggttaagagttgagggtttctgtgctattcttcctgtcagatgaagtctttttttttttttttcctgagatggagtctcgctgtcgcccaggctggagggcagtggtgtgatctcagctcactgcaacctcgtctctcaggttcaagcaattctcctgcctcagactcctgagtctctgggactataggcatgcgccatgtgccaccacacctggctaacttttgtgtttttagtagagatgagatttcaccatgttggccaggctggttttgaactcctgacctcaagtgatccgcccaccttggcctcccaaagtgctgggattacaggcatgagccaccgcaccctgccagatgaagtcttcagaaaccctttcctatctggcctcagcctgatttatcctaaccccgatgtcacactttcacattcatatcttacatatttatttttcctttccccatgttttgtgtttttactaaacagcacctcattagtgctttgtttagggagcagctaaaaatatcatctcctgttcaaattcttcttctagatggagttggtcatttgtcctttttttttttttttttttgacggagtctctctctgtccctggctggagtgcagtggcacgatctgggctcactgtaaccttcacctcccaggttcaagcaattctcctgcctcagcctcccaagtagctgagactacaggtgtgcgccaccatgcccagctaatttctgtatttttagtacagatggggtttcaccacgttggtcaggctggtgatgaactcctgacctcaagcgatctgcctgccttggtctcccaaagtgctgggattacaggcgcccaagccgcctgtattacattgtcctgaattgtttgtgtatttttctgttttctcccagtctgaactccctgcggagaggagttgtgagttactcaccttcctgttctggtgtgtggctctgtgccgggaacagaataggtgtttgtttaacagatagtgctgtataaataattgggtgagtgagtggaataagtgggtgaatatcttttcattatcttgagtcatcctaaaaaggcagaggatggactaattgtcaaaactgacttaaacttttctcctcttctctttcagttggtaccattttcagatttcatcttcctaaactggaaatgtcaatgagaggaaattaacacccccaagagctgcagtgagcaaatgcattgagcttgggtcaggacaattccatttggggaccagagatggacggtcactcagcctatggaggtaaagtgactaatctgtccgcagcacaagtgagatgtgctgtcttttctgttttgttttgttttccattgattatgttccatggaggatgtggaagatattctcctatttcttggtctctgaaacatgtcctgcttgcccagaaacgtgccattaagaggagttcccatggaaggggaatacagtgtccctcaggagaaatatgcagactgttagtgtctagcagcttttctttttcttaaatggagagctttctgagctctcatgaacactggtaagtaaaaacctggattcagaacatcttttgatgacaagggcctgtcatcctgacgaaggcctggcatgacactctggtgtgtcctagagcaagcatcagcaaactgtggcctacaggacaagcctggcccagtctgcctttgtaaataaagctttgctggcgccccaccatgctcatttgttcaggtgtcatgtatggctgttttcacactgcagcagcccagttgagtcattaccatagagaccgtgtggctgcaaagcctgacatatttgttccctggtccttaacagaaaaggtgttgcaacctctggtctacagctgagctgtccacacagaaccacttcttatggggataatgaaattttaattaaaatgaaataataygaaaaattcaggcctcagtcacatcacagttcatgtgcttagtagccacatgttgcttatgggtacccatggatagtgcagagagaggacatttttatcagcgcagagttagcttgggaaaaattgagatcaccctggatatgtcacttcactctgctggtctctaacccagcttgggcatgattgccatcactgcagaagaagaaggaaggctgatgtctgtgagtgtgtatagctgttttttatatgattattggcaaggactctctctctgtygtgcacactgtctcactctctcyctctagtrtaagaatggagtaacttttaaaatttctttgggagccatcttgtggtctctgtatgtgactccatgtaaaacaaatccacttgggccatggggtttattagttttatttatgcaagtagatatggatgtgagcttgagcccttctggtgtcacaggtaggtcaggggccgtgtgaggcctcctctaaaggggaagaagcaatcgcttctgtgttcccaaggggtagatatatgggcaagagcgataagaaacaaggagaggaagaaaatgagctgaagatgtggcatgtgtgagtcytagaagaatgaggaagaatggagacaaaagaccatgtgattcctggttatggtcataggtttactttgaaagaacatrttgaacaaagtaatgatgcttgggaacataccacatctcagaattgtgctgaacacagccagttctatacgatagacaggttgggaagagccttggacctggagctagctcaccatcttatgggacaagactgggggcatggcaggaggttctgcttggtgcataagccagtgcaagtgggaataacaagggctgatcattgagatgcacagtttgtatggaagggacccaagaaggaacagagaagagactctagatggcctacaggtctgggcaaaggccccaggtttggcatttagaagttgggctttcttatckttgggttacccaagcacaagcaagaacaaagcagagactccactgatgagaaaagatccaattgatatgtattctgcacatctagatttgaaaatggcctcctgcctctttcttttggttggtcttcaagcacctcaccattacagaggagtgctgtatgcattttaagcaggcatttctataacaaaccttcaaacaatggagtttaacgcagatatgaagtaattataagtaacacaaatagtagtattaaatttttagttctttcttacaatcaagcatatccagaatgatgatgatgatgatgatgatgatgatgttaacagtgataatattttttgtccattcccagcttattatgtgccaggtgcatgttctactgataattattattactactaataattattatagctttaaattattggcacatacaatgcactaagtaatatattgatttttttctcaatctcatgaamccagagcattcgtttccatttttaatttttttcaattattttatttttatataaatgcaaatttatagaaaagttataagaacagccaacaaattcctggacctccttcgtccaggttttcaaatgttcgcattttattatgttcatttyttcttttttctctatattttttcctgaaatcagaaacttgcatcttagaacacaactttctaagtcagaaacttaacattaatttgactattatctaaccttctgatttctcattcagatttcatcacttgcccctgctaaattccttcaaggcaaaagaaaagccagttggcatgtgtctttcttggaaaactttcttaatcttgtatttcagcacgttaacctttttgacaagttcaggccagttatttgatagaatgcactcaattttggcttttctgatgtttcctcctgattaggttggcaggactagcccagagctgatgtgtccttttcagtgcattgtatcaagaggcactggtgtggctgtctcccattactggtgatgttagcttggagctctcagttaaggtggtgtcttccaggtgtctccactgcaaagttattgtttcacctttgcaattaataagcatctcatggggagaacttccgggattgtgtagatttctgattagtcctcagtctatcagtcattagttttagcatcttttgatgattcttgcctgaatagatttattattatcatagttgccaaatggtgattttttaaattttgctggttctttttcatttattagttggtttcctactataaagaagaaattttcttcctctgttcatcttttttttttttttttttttwtgagatggaggagtyactttcacccaggctggaatgcagtggtgcaatcttgatctttgcccactgcaacctctgtctcccaggttcaagcagttttcctgcctcagcctcctgagtatctgggattatgggcatgtacgaccatgcccagctaatttttgtacttttagtagagatggggtttcatcatgttggccaggctggtctccagctcttgacctcaagtgatctgcctgccttggcctcccaaagttctgggaatacaggcgtaagccaccatgcccagcccttcctttctttatatcagtgtggactcacagattttaactttattcaataggttgcagtcttttgtgatcattagttattttgacatttacgttgccccaaatctgtccactagggcctggctcctgtgtctctaacatttctccatcgtcatttgagcacttgctgccttgttgtcatagcaaggtattctagcctcatcttctactctcctcacctcagtggtggaatcaacataggagccctggttcctttccatggaaaatggtgtttagaaaccaagatctggccactaggtgtgctcactgtttctggggtagcattgcctctaggccctctgagcagacataactgggatgtgtgtgtctgtgtgtgcgtgggtgtgtgtgtgtgtgtgtggtgtatcacacagatacccacatttatatacatacataatcacatccacatgtatatccacacatcattcagatcattttcaaattgacctatctatctattaaaatcaccataggttcatactaattatgctaggacattctggaaattcatgtctatctgaatgatgctgaacagtcattctactctcactatcaacgccgccaccaactgcatttattaaaccrtgttcaggcccagtttcagaccctttcccttgctgttacttctgacatcaactcggtggcccaagtacagatgagcaaaccaagactctgaaaagctaattaacttgtgcagattatacagctggtaaagcagcaagcttatagcaagcacctgtttgtccctcggcttttgatcaaaaggcctagggagaaacctctctcaggacagaaactagagcagaagactggrgaagcatttgtccctgctgacagcagtgtctggccstcacagtgtaggccagccaaaacatgtggaccgtgtatatggtctgcatctctcagatggagtcctgttaggaggtgtgtgtagacgcacgtggtggtgtatgagttgcatgtgggagtgagagtttctgtgggggatgcaggactgctgtcctgtccttgtgaagaccttgatcaggttgagggtgtgattacagaaccaggcgtctctgcagagggagcatttgttctcttgcagagtgstttcctgggagagctgcttcagtgtggaggccttaacttaaacacatttgtgtctccagctcccagcaaacatgcagaatgtgcaccagataaatgttggtttcaggcaggcattgacaaacatttctgagcttcttctgtgccaggcactgctctaatcagacaaagatcctagctaggggtgagaaagagggagagacacacagtctctctctctctctctctctctctctctctctatatatatatatatatatatatatgtttatatatatatgtctatatatatgtctatatatatatgtctatatatatgtctatatatgtctatatatatgtctgcatatatatgtctatatatatatgtctatatatatgtctgcatatatatgtctatatatatgtctatatatatgtctatatatgtctatatatatatgtctatatatatgtctatatatatgtctatatatatgtctctatatatatgtctctatatatatgtctctatatatatgtctctctatatatatgtctatatatatatgtctctctatatatatgtctatatatatatatgtctctatatatatatgtctatatatatatatgtctatatatatatatatgtctatatatatatatgtctgtatatatatatatggtgtgggcaggggcagggggtcccagggcagggcatagcatgggtgtggtggtcaaggagtgtctcttccaggaaatgtttctagaacaaagtcacatgacggacaggaaagagcaaatagggaggtgagaaggagagcaggggctgttgatcaaaggatacacagggactgattcagtcttcttcagggggctgtggctgctgtcatttcccctcagagaaccaggcctgttttccttctgggcagtgtcacatgggtggacactccccgttggagctaaagcatttcctccaacaacaaaaatgtgttatcagctggcccagagaccgaatgcaggccagggcactctgactagataagaggacaacctggcagtcgttcaatattccgatgggcagcagcgaggagctgttggaatttccgttgctgataacctttaagagcagcagtggcagaaacaggggttgtttggggtgggaggggagaggagacttgggagcactctggagtatctgaaaggctgatggggagagaaggattagcggattaatgtgtagagggtgattttgaggatggatccaagtggcgtgagtgaaatgaagagcgggggagcttctcattcaggctgtttttcctttcttcttgttcattcagtcatttagtaaatacttactgagtgccttccagctcactggcacttggctgagcactggaggtaaaacagaataagatgagagctatgtcctcaagatgttaataacttatttgtttccttgttttatttacttatttattttgagacagagtctcactctggtgcccaggctggagtgcagttgtgccatcacaactcactgcagccttgaccttccaggctcaagcgatcctcctgcctcagcctcctgagttgctggaatacgagcgtgcgccaccatgcctggctaatttttatattttttatagagatggtgttttgctgtgccactcaggctggtctggaactactgggctcaagcaattccccagcctcagcctcctaaagcgttgggatttcaggtatgagccaccataactggccgatgataataatttaatgggagaaaaagatcaattaataaatcggtggtatgtttaggtgcagttctggttctttgggtcctgaagcttatacaatttgggagttttctttaaggaaaaataatgcaaagttatgactttgaaataaaatgcaagccctagataagtggggtgcagcccaggggctggagcgtcagcttcctggacgtgctctggttctttgcccgctttgtgagctgcagtgtcagcgagagtgccttctcttacctgctgcctgccgggtgagctggccacaaggggagttggcggtgggaatcctggtgctccatggtacagtgaatttacttgccttctggatcctctgagtccttgtgcttgggctcagggaacagggcgaaagaacttcgttcttcttggttctgctgggattttcgaaggcactttccttgaagttctgcgggctgacctgtgatcccacatcagggactgcattctcaggaatcagctgagctcaggagtcctggggctgggggagtgtttgtgagcactctcgcagggctggctgtggccctyacgcctttgtaacaaccccacacacatagatttcaccccacagcctccctggcagccagctgctgtcatttcccttttttacggatgatgaaacccaggcacagactggttaagtaacttaacagtcacacagctaataagttggggggctgcgctgtgaaggcttacagcgtctccagagcccagtccccttgctgcctccccatcatcctcactgcctactgcttttaagcaatatgctggaaatacctgcaatgtcaagattaggagatgagctacatccagtacagccgcagaatggaataatatgcatttgagccacacaaggagtttttaaccagcatggtggaatgctctaatttttggtgtgaaggtgggatgtctaattacatatgcacagagaaaggaatgccaagtgctaacagtgcttggattccctcagccttttgcatcctctcctgggcagctgtaacagactcactcacacatgcattcaataggttttatttatttatttatttattttttgagatggagtctcgctctgtcgcccaggctggagagcaatggtgcaatctcagctcactgcaacctccgccttctgggttcaagtgattctcctgcctcagcctcccaagtagttgggattacaggctcccaccaccacacctggctaatttttatatttgtagtaragatggggtttcgccatgttggccaggccgatctcgaactcctgacctcaggtgatccycccaccttggcctcccaaagtgatgggattacagacatgagccaccatgcccggccattcagtaggttttaattcaatgcctttgacatgctgggtacttcggatacagcagcaaaaaacaaaaacatggtttctgctgtcatggaacttartctggcctgctgtttgctccttctgcctatactttcttcctccagctttcactagagagatctttcggaagccctccatggttccgcagtgccctcaaatgcagcccctccctgcccctattgtctcatgtgtaaaatggagcagaagacgcacagaccttccagacctcagagtgtagctcttctcagttgttggctagaggctttgcagtcacaactctcatcattaccatcttctagaaaggtcaggcaccggacagctgaaaccatggcagccggcaacaggaagtgccctccctgggtgctcaaagatccaagacagccgggccctgtgtttgtaggaacaagattccagatgcctctgctgcttgccagcctcgtgaccttcattcatgcagggccttgttttcttgattcagtggggccaatcccggcccccaggggagatggatgctgcagggatgtgcaagctgtagagggttccagagaatgggcctggcgttctgcaagcctggcacccctcctggatgcttttctccagcccttggagcttaggcagtgtagtgttaggatgattattggatttcctccacagttcctggctcattcttttgtagcccttgttacagccttttgtgataatattgggtgtggcaggcctcaggacacaggatctctccaactttctcctgccttccttcccctgccctaacacaggactctaatctttccctgactttctgactgtgggtcttgagatcctccccagagagggtcctaccctgtaccctgggagaaggaatgctgatgtcaggaagcttccataagactgggttggaagagcttccagatagctgagcactggaggttcctggagggtagcatgccccttcccccatacctcccccgacgcatctctctatctgtatcctttgcaccagtaaatatgttttcctgagttctgtgagcccttccagcaaattaattgagcccagaaagggggtcatgggaacccaatttgaagccagttggtcagaagttgcagagacccggacttgaggcttgtgtttggggtaggagttgggggcagtctggggcactgatctctcaacctgtgggaactgaccctgtctccaggtagatggtgtcagaattaaattggaggacacccagctggtgcatggtgtgtgggcacagaagtcttctgtgttgaccgttcgggtgtgagagcagaggataggcagggtttcagagattttakgaaataggtgggaataacactttctgagacttggtttccccatctgtaaaaaaggaagtagtaatagtacccacttgggagagttctgtgaggactcaaatgacacgaggactcaaaaagctgggtacggtgtctggcccatcgtaaaggctgagtaattgacaggtgcatttatccctgtggttcctcactgagcccgtgataaatgggcctgtggcaggacatgagtgagctgcaggaacaggagccaggcctcccaccttgccggcttggaagaccgtctggctgcagcagagacattcttcccagaaagaaggggctttccatggtgaaccactgtggccaggcccagaggcctttacaatgccaatgtcccaagaagagaggggccatcagaaggatggaaattttctatgtgcttccagaaatcaacctacagattgatcccttctcaaaagactaatttttattctagtcatgcccagctataagcatttgggcatttacagataatctttgttcctgaagggcatccgartatgtccttcctccttttaatgcccatgacccttactatcctggaacagagtccacattgcagaaaggacaaggctcaccacgttcagggccccatcaagacccccagcctcatgtgtgctctccctgtcccaccccaccccaccttctgctaatcacagagtcatcttcacagtgtgaaccctgaatacagatgacccgggttcaaatcacacttctgcttcttttgccaccttggatacagtatcttctcttgatctcagtttcctcatctgcaaaatggacataacggataacaacagcaccaaactccaggattgaatgagttaatacagatgtggagatatttcaggcttggttccaggccactgcaataaagtgaggattgcagtagagcaagtcatacarattattttggtttcccagtgcacacaaaagttgtatttatactatactgtactgtagtctatgaagtgtgcagtagcattatgtctaaaacaacaatgtacatatcttaattaaaaaatacttttttgtattttttaattaaagccatgctggcttatgctcctagcactttgggaggctggggcgggcagattgcttgaggccaggagttccaaaccagcttgggcaacatagcgagattcacccyctaccaaaaaaagtgaaaacattagccgggaatggtgcatgtgcatctatagtcctagtcacttgggaaactgaggccagaagttcaaggctgcagggagctatgaacagaacttgacagagcgagaccttgtttctaaaaaaaaaaattaaaaaatactttcttgctaaaaaatgccaatggaatgagcacatactgttggaaaaatggcaccaatagacttgcccaacacaaggttgccacgattagtaaagacaataacaacaaaaaaataatgcagcacctgtgaagtctgattaagtgaatatgcctatgtatgtgaaagtgcttagaaccctgctagacacagcagtctctaacagccagtattctatagatctatagagaatatgaagctaaagatgtggctatggatatagatatagatataatgtagctctagcctgggctcatcaccccaaatgtagtacctgccatgtctgcaggacttggtctgtgaggtttgcatgtgctcttctctacctggaatgcccttctcttgctttcctggggagccctcagctttagcgttgtctcttccgggactcctcctcccgctttccactccatcctcagctgcagggcttctccctcgtcagccctcaaacccctgcctgtgtctgccttcctttcactgaccacactgtcttgtgaggaagggctcatgtacctttccttttcccctgctgcactgggagccccttgagcggtggtagcctatgctttattcttcattggactcacagagcaccctgtgggccaggcatgcctttccctcaccagcaccgagactggtgctctgaaggctgktgcagtgtgtccatttgtgtcagccgcacagagccagcccagctgctggtttgatagacatgatatctggctagctggccttgctactggcctggacacatgcctgggcccccttggggayyaattctctcttctttagctcctccgacttgcctccagcctttggagaactggaaatgggcggaccccatgtctgtgggctcctggtcctttcactttgctatccacgccttatctgcgttccatgcaggccagaatacagaatacctgctgtttgcagccctgtctgcctccaattaacttaggcaaacacaccctgccaaaatatcccacggccctttctgatacggatggcatggggtgaaggaggaaggagacacgagtgaacccaaagccagtgtgtctgaaatccatttggcaagcatttgtgccatgtcctataatatatatatgtccatatatatattataacatataatattatataatatatgtccaatgcctgtgtggggaagtcacttcaccattttgctcaatggcaatgaagaaatggcattcatgtaaacactttctcagtctctaaaaatatcctttgtgctggaggattgggtgtcagaagaagaggacgaagggaaggcctttgggtctggggagatgatttgcttattctgttggttgaatagaatggaattggctttctgcactttgcaatctcgacagatggtcagtcatctaactggawcctccttgggggttgggcccgtttttttccccattgaatccccagtactttggtggaggagaggtcactcagggagtgttctggaattgccccaaacaattatgctatatggttgtattgtgttaatatttcatcaagaggaagtgccatactwaagtactcatctctccctgttgctgcttatttgcatattarcgtatgtcatcatcatcattatcacaaacaccaccgtgttgcctttagcattttctgtcatttgaactatgtcctttcgataagttcccaggagagagatactgaaaacgctttgaaggttcttgccacctgttacccattgtgactttgctgtgaaattaggagtggaagggagatggagatgggggaacaagagctggaaggggatccctattgaggctgggacagggagcagtacaaaggtcaggatacagccacagtgggattgtttgacgggcaagtggatctgcctccaatggggcacagagtgcaagtcagggaggaatggggagctgggagggatggacacacggatgaaaagacaggaagttcagacagaggaactcgctcctgataggagagaaagcccattctcatggctctcatttcttggggactaatgtgcggtgagttggtggggagcggggtgagctctcayacctgtgtgtaggctgctcgagagcccatgcctgcactagagcccatgactcacctcaagtccatttgaaaaattagggtgttggtaattcacggggaaaaatagcacagacaaggatcatgagatcctgggtgtctgcaacacctgcacgtcattctctctggtccccagggtaccacagacttaaggaattttacacaactctgaggtttggaattctatgggtctccacggaattcagagtgccattggactgcgggggcgctgggggactagaaggcccacattccatggaaatccagggattccaggaattccagcatccagcggaaattcagagaaccatggcccctgagtaattcctctgaaggaaacgtagtcaagaaagactaattaatttatacctactccttcagctccagcccggcacttaattagtaccttagtggtttcaacgaatgaatatgggaaagagtgagagaaggagtgaagcagaagttagccctccaaagctatgcttctygtccccaaactatcaccccctccacgcyggggaggagcatgtggctgtcccagcacctgyggactcttctggcattttgtaggtgagggctaaggatgctatagatcctgcacaagggcaggaagaacagttctggcaaattgctaaacgtgtcctcctcagaacaccactggacattcggtactgaggaacagcagagtatggcatcacacgagccgccccaaagtttttgctctcgaggatgagcctttcactctattactattgattggtcccaagtagcttttgatgtcatggcttttatctgttaatatgtatcatattctatattaaaattgaggaattatttcaatatttatttagtacttcatttgaaaaatcacaataaagaatctatcatatggtaacataaatgacttttttttttgagacagagtctcgctctgttacccaggctggagtgcagtggtgcaatctcggctcactgcaacctccgcctcccagatacaagcgattctcctgccatagctgggattacaggtgcatgccactgcacccggctaatttttgtatttttagtagagatggggtttcaccatgttggccaggctggtctcgaactcctgacctcaggtgatccacccgccgcagcctcccagaattctgggattacaggtgtaagccactgtgcccatcccataaatgacattttcatgaaaaaataactacttacccaaacaaacaacaacaacaacaaaattagaagagtggtattattttacagatccctttactatctggcttaaaggaaaacagctgggttttcatctctgcctctgtattcagtctttcgtgaaatcagatgtcatttgtctctggggagctctactgtacatgcaggacagaatgagtgtgaaagagtaaatgaagccttcgtctcattatgaaaatggctttgatatcatggattccccagaagtatcttaatgactcagagatccctgaaacgtagttttacgaaccgcagtacagtggttaagaacatggctttttttttttttttttttttyttctgkttttaagtttcgggatacaagtgcagaacgtgtgggtgtgttccataggtatacatgtgccatggtggtttgctgcacctgtcaacccatcatctaggttttaagcaggcattagctatttgtcctaatgctctccctsccctcaccccctgactggccctggtgtgtgttgttcccctccctgtgtccatgtgttttcactggagaagaacatggctttttaagcaggctgcctggggtcagggaggtggcagggaggaactgcatcctggatccacttgcagcccactgggttaccatagacaagagatttcacttccctgcacctcacttcctctgtaaagtgggataatagtagctactcgtaggattattgtaagagttacattagttaatattttaaagctcttagaacagccaggtacatattaaacgctatacaggttatgtatctatagctacacacacatatcacatacatactatatacatacatgtgtttatatgtacacatacataatgtatatatactatatgtgtgagtatatatgtgtgtgtactatatagtcatgtatatttatgctatatatatattacatatactaaaaccaattgaaaaatcacaaatgttactatagcaaaagtcacccatytcacattatttctaaaaatatgaatgtgtaagagctatttcttaaggcagcttttctatcccctactaagagcgggggacagccactgctgtgtttggggtgctgcagagcataatcataaatgtgggagtccagatacaggtcagctgttagggctccaggagtstgcggacccctgccctcacctctttgtgtcaccrgagctccggattaagggctttctgacaactcctgaccacactcctcatcttctttccctccctttgctgatgaagcaactgtcttcatttagctgcctgatggagaacatctgcctccaggcaccacagaaatcaaagaaggaacccacgatgctggccccaggaagtccccagaaaccccaggctgctcctcctgtcacacaggatgcttttcccgaaatgctttttgtctggaagctctccatatgagctttacaaaggcatgtgcattcccttagcctttgaaaactctcataggttcaagaacaacaacaacaaaagccttggtgtcagtgatctgagcacagcattggagtatgctaagaaggcatcagggactgggcacggtggcacatgtctgtaatcccagcactttgggaggccgaggcgagtggatcacctgaggtcaggagttcacaaccagcctgacaaacatggttaaaccccatctctactaaatacaaaaaatattaactcagcgtggtggcacatgcctttaatccaaactacttgggaggctgagacaggagaattgcttgtacttgggagacagaggttgcagtgagccgagatggtgtcattgcactttagcctgggccacaagagcaaaactctgtctcaaaaaaaaaaaaataaaaataaagaaaaaaaaaagaaggcctcaggacactggctccttgtcctctgagtgcctgctgtgcgtccaggtcctcagcgtgatgctcacctggaaggcattctgaataggacaagacccaccatgtcaccccccctgctctagtttattcattaattcaattatcaaatgtcagtggaatgccttcaagggcggggcagggttcagagccctggggacacttccataaactcacaagcaaacgttccttgcgaaacctacagttcagtcaaggagacttctaataaataacaaarttaacaaataagagatttcatgatgtgtaggagracaggtgctagaaaggagcgggcrgggggctggggagygctggcagcagaggggcccggggtcagcaacactgagaagagaaagatgagcagagacttgaggaaggcaagaaccttgtccacgtgggtgtctgggggacagccctcaaatgggggttacaaagctatgcctggtgagtcagggaactgagagtctgggaacctgggcagtgcatgaggggctagtgggcaaatgagatgagaagggggtggccagaccagaggggttcttgttgacctttggtgacatgacatgcctccaaggtaaaactgccccttgctggactgcagtgacttcctgttgctgacttcctaggcttctctggccatctaccctagagcccaccatggggcccggagcccctcctctgggtcccytgatattccatgttagctctcgcctggcgtcctcaccttcaggtgggagttcatctgtctgcctgtctgcctcccctgttagctgggcctctcaattttccatcccaccataagggacagccagcaggtcctgagttttacgaccttgtacatttgctcggtagcagcaccttcgacctataagctcccaaggcccatctctcttcttcatcagaactgccgcatcctctctggcccrctttctgtctggcatttgcctgacatattcctccagtagatgccaaattccacagggcgaggacctagtcgttctccatctgcgtcaccttaagcactgtggcaagagggctagaaagccggtcccattggtgggaggacccatcaccacaggggttggcccgcgagccccgtatgcctggccctgcccagctgtctgcaaatctgtgtaygctctgctcggtcaccactggttcgctttgtcccacctgtgctgtgtttctctactagcttgttagttgcagagccccatgtgtcttagcacaggctgattcctctaccagaaatgccattttttctgtttattcatccagcaagtgtatttactgacccttgctaactcatgggaaggaccatctccattgggaagctgatgccccgtcttgtgacacgttttcatctggtcacattggactgcgaatgcaaagccctggggtggagaggggaaatgtggtcctacccttggagccctaataccctagctccaggggcagcaaatgttttctgtaaagggccaggcagtaactattttaggttttgtgggccaaatcatatctctcatgactattcacatttgctgttgtagcacaaagcagccatagacaaaacataaatgaatgaatgtatttgtgttccacaaaacttcatttacaaaaataggtgggaaggccaggtttggcccgtgggctgtcattcgatgacccctggtcttgactcagtgtaggctgtagagggaaacagcttgtatagctcaatgtacttgttaattgctaattactagtgttcccatcactggacagagactcttccagggcacagactgtcctgcagtcaggattgtgccctcaatgcctagcacagtgcctgacacaggacaggcatgcaggatatgtgaataaatcaatgagcaagtgaatggaaattctgtaggtactgagcttagcaatctaggctaggtcctgctccttccctgcaggcacaaaatgctggcaaggggcttggtgtggtctctgggggccctaggagtgaaactaaataggtttctccaagtgcrtcatttctgggtaattttttttttcttttatttgagacagagtctcgctctgtcaccaggctggagtgcagtggtgtgaccttggctcactgcaacctccgcctcccgggttcaagcaattcttctgcttcagcctcccaagtagctgctactacaggtgtgcgccaccacacccagctaattttttttttttttttcagtagagatgaggtttcaccatgttggccaggatactctcaatctcttgacttcgatctgcccactttggcctcccaaagtggtgggattataggcgtgagccaccacgcccagcccatttctgggtaattttaatgagctctcgatgggaatgggctcagtcccctggggtggccagagcccatctggattgacttcaaggagttatgatgcgagctggggtaggtggagaccttgcagtctgggaccgcccagcaagcaagctgtttttccttcccccagatcttctccagctctgcgtgagccatgggctgagtcctggcatatagttctcccgtgcctaggatgagccaaatgctattttggttgcacrcacatgatgtcatttaattgtcatgacaacctaggttgtgaatattatcattatcctcattttacacagggtaaactgagtcacagatctgtggcttgcctgacgtcacactgtagcttagggcaaagttgggatttgaacctggcaatctgattccaggctccttgctcataaccgtcattattctaagctgacatgcagtgtaaaggattcagacttgcagggaccaagagtggacacttytcaccccaccacctcaacccctttactcccgatgccgacactgttgcacagagaactaaagtaattggccccagaccacatggcattagtagaggcagaatytgaagctgggtgattcgatttccaactcaatgctttctccacaagctcaagcccctcttttggcttggcacctgtaggcaaacagaggcaagtctctcccctctttctctctgcctcccctcccctcagagtagaacaacctctcattttatcctttgttaaagagcagccccttcacaaagaagtgacagtacgaacttgcaccttagttagcatggatgggtgccctgggcctkcaatcagtcagrtcagggatcaggtgagcttgggcaagtctcctcacctctctgaccctctgttttcttgtctagtgactaggggtacaaggcctgacttcrctgagttgttctgagaactgagtgcagcgatatgtctcagtgtctgcctgtcacagcccttggccttcagcaaatgtggtttcctgtcctgcttcctcatctctccccacagctccctcgcccactctgccccaggaacaacagtgcaccccacccactgtactcagctggaaaactgcatccaatgacctctcttctaagcaaccactctgacgtcaccttgtgcaacattctaggtccatccaggaagcaacgtcaggctatttctaccccaggcactgtggcagctcacttttttcttcttgccctgtaattacagggttttgcagtggtttctctgttgcctaaaagtctcaaaattttctttgtttctccgtaacacataattgtatctcaggaacccacaagccattaggtccctgaccctcaatagatgtccttttctatggagacagacatctagatcaaaagaaagatgctggctggttggagcaaactatttgattagacaaaacccttcatgaggcctctacatggattttgtggccctgggtggttggagagacttaggagccttcatgaacttttctacttcccctgtttttgatgtagaattatctgcaggagcccaggtcccagactctggctggggaatgagtatggtagaataatagcagagggtgggggctctagtgtctaggagacacagggatgggtagagttgccatgtttgcaaaggtgggcatcctcagctcttgagcttgcctgaacgcaggctgcctggagcctgacccaactttcctaattcatggctacctttgtgagctgaaagaattgtcagtgatggcagcagtggcctatctggagcagctgctgtggggatgccagctgcagcaggggaggcatagctggggctgcatgctccacagagctggcagggaccaggaacaggtgggaaccctgccttctatcaagttgkcagggcaggagccctgagctcccaggcacagctgcagctacctagccacagctctggacccaggcatccctctgctcttggggacccaggaagcccccctgtcatgcaggcttgtaattgcctgctcccgctccctggcatctcaccactcccagtgtccactctgatttttggagcaaagttgaaactgagcctgggtgctgtcgcaacccagctgggtgtgtatgtactctgggtggtgttgacatgccagacccctgtcatcttggccccctccagastttggtcaccgacaggcacaggagggaagccaagaggagactgagggcagctcagtgcaggcctgcaggcgtccctcagcatgcacagcctgggtgctgtggatgccatgttgatggtagcaggaggcagacaggctcctgggcagaaaggggcaggtcccaggtgaaacaccaccttcaacccarggacagcctgaagcctgggggccaggctgccagttccagggggagtccatggcctaraggaagaacttatggtgctttatccaagcccatccatggccatccatggaccaatcagcacacacttcctcccttctgagcccataaaaaccctggactcagccagacatgtaggtgtcaggactaccagctgcaggaaggagctacccactctgggtctccttgactctttgggatgacctaactgcagaaaggagctacccactatgtgtcttctctgctgaaagcttgacattcactgggacgacctgcctgtggaaacgagctacccactgcaggtctcctgaaagctgttctgtcactcagtgaggctcctctctgccttgctcaccctccagttgtctgcatacctcattcttcctggacatggtacaagaactcaggacccgctgaatggtgggactgaaagagctgtaacacaaacagggctgaaacacaccctcctccctccattcaccacgttgcaggtgacaagaaggagagaagagctgtggcccgttgggaagcccagatctaggggctccccaagccagggctgtgacaccttctttgggactgcacagttcctggtgtctccaagcttccgggtgccaccgtgttctcctagaacatttctagatgtgttacttaggaatgtggcagctgtcttgcttcttcatccagacatgggtccagaaatgggtgcctgcagcagaagccatgtgtggtacatctggtccagccacagactcacatggagctggcacctgtgccagtgcccggagctgtccatcctgtcgcagcaaccagcgtacctggctgtgcacagtggctggaccctgtgctagctcacccacacaccccttgctgcttcacgcctggcttgcccttagcaggtgtgtgatctaggctggtagcataagctgagcacaacctrttgggccaagtgggtgacatgagcccagcaggcatgagcaatactcaggtagaaggcgctgctggccacagaggtgtctggctggcaaagtgacacccaaggatcctgygacatcaggatctgctcacctgcaaaatgctggtctcacctggggctgtagtgttgcctggttgttgagagctctgtctctaggggacaatgcctgggtttgtgtcctggctctaccactttctagctgggagacctygcacaagttcttaactcctttgtgtttcacattttcatctgaaaaattggggtaataatagctcattcagtcttcattaaaagcttaagaggtaggttttttaattattgttccaggctttgcttgagctgasagggccagcgagagtcaaggtataggagcaattgagcagagagagtgtatcagtcagtttttgctgtgtaacaaaaccatgaaatggcataagagcattcattcagatttcataggtctgtgggtcacatgtggtggttctggcttagtctttgagttgagttggccctgactggagggtcacaggctgcctgaagcatgtttttctcataatggaggtcagaagctccccgaaggacacaaagctcttatgattatggttctgaactggcatcttgacacttcttcccacattccattggctaaagcrtgtcacaacatccagtgggtgaaaaaatacactcccacttcgagagacgaggacgagggatagagacccttgtggctcccatacccagccttctgccagtccrtttgtacttgttctccagcaagaagctcaacagacatttstcaattggtcataaatctggtacctaggaatggtgctgacctcttgcaggcctccagggaggtcctgagagtcccatgagagtcgactttgctttgtcacagagcaggacaagtggccattccatctgcaataagacccttctaaatgctctgcaggaactcctgatgcatccttccagtgcccctttgaagtagctgccactttaagcatcaccatcttcactttacagaggaggaaatgaaggcacagggaggttgagttacttgcctgagggtgcccagcaaagtgggcagagccagattgaggctcaggtggtttggctgtggaatctctgtactgcttctaagggtggagaaagcaacagctgcacacctttgtgacttgtgctaggacagaggtgtgcatgggggtgtggcagtgtctgtgaattgagacctggaccctccagtctcccatgttctctgtggtgtttgggagattagcaaccccccacagaagagttaggacccacttcccctgctcyyagaagccacgcaactcccctctcagcagggcagaagggagaggccccttgctgctcgccagggccctgggccaggtgggagtgacagagcgcagccccatctgtttgaaattagaagtgaattgagcacagttgtccagaaactccatgaagtttagaaacaccgtgctgaatgtctcccccagcaaggctgtctcttcttgagagatttcatccctgtctcttccccacagtgctcattttcttagcaccttctctgccctmggctctagggacagagacagtgagatgagccccttccctcgcctggtgagggtgttgggagcacaccaggaggccagagaaggattgtactccagggaggatagtggtggcaaaataacgacagtaattagtgtgtccatttagtgtgtgcttgtggagtgtcacgtgcttaacactgtgccccttaggccagtgttatgtttgtcttcagtttttggatgaaacccaggmtctcaggggttaactagcaagaccctgcggccaccaggtgactctgctggatatgaacgtaggcttttctgtgccagcgcctcagcaccctggaccagctggggtacagggtaaagtactctgagagtcagatcagaaggcttaaggtcccacttactgctctgccccacacaggctgtgtggcctcaggcaagtcagttgacctctctgagcctcagaccctcagctatgacttggaattgcaacacatytccagaggggtagagatcaaaccacactgtgcctgtgatggggctttgaattaaagcagggaaccttctgtgcctggagagcctcagcatctaggggcagtgtcctgagccaccattccagggaagccatttgcaattttttttagatttttaaaaaatgttgctgggtctgcgtttttccacatcctctgaactttccttcctgctagctttctatattgcttcctactttttctctgctttgggtataagcttctaggaatagaattttaaatcttagatggcttccccattctatatagctcttgggagtgctcacgtcaaagacttctgggaggctttctgcccagagttgggctgctggagaagattataaaggcaccaccatttttaaggtttttgttttgttttgtttggaagtttggaagtttcattcagaaaagtaacccatgaccactgaaacaaatcctgaaaacagagaaaagtataaaagctcaaracagaaacagaaaatcctacagaaaccactctcccagaaagtacctatcttagtagttcatactgttttctttcacggcattttggttcctctaggttaacatatactaaaattggaattataattctgaaatgcttttctcttttcgtttccaatttaacagtgtagtagatattcctccgtgttatttaaaattcttcatgatcattattaatgattgaaaacttctgtcctgtaacagatattttaacatatcatggtttaattaataatttccttaatgtggagcatgcaggaggagctctctacattttgctattaaaaataacatgataggcctgggggcggtgtttcacgcctgtaattccagcactttgggaggccgaggtgggtggatcacgaggtcaggagttygagacgagcctggccaagataatgaaaccccgtctctaataaaaatacaaaaattagctgggcacggtggcaggcgcctgtaatcccagctactcaggaggctgaggcaggagaattgcttgaacccaagagatggaggttacagtgagcggagatcacgccactgcactctagcctgggcaatagagcaagattccgtctcaaraaacccccaaaaattagctgggtgtggtggcacacacctgtaatcccagctacttgggaggctgaggcaggaaaattgcttgaacccaggaagcggaggttgcagtgagccaagattgcaccactgcactctagcctgggcaacagagcaagactgtctcaaaaaaaaaaaaaaaaacaacccacaaaaacaaaaattagctgggtgtggtggtgcacacctgtaatcccagctacttgggaggctgaggcaggaaaattgcttgaacccaggaagcggaggttgcagtgagccaagattgcaccactgcactctagcctgggcaacagagcaagactgtctcaaaaaaaaaaaaaaacaacccacaaaaacaaaaattagctgggtgtggtggtgcacacctgtaatcccagctactcaggaggctgaggcacaagaattgcctgaacctgggaggcagaggttgcagtgagctggaatcgcaccatagcactttagcctggacgacaaagtgagactctgtcaaaaaaaaaaaaaaaaacccacaaaaaataacatgataaacatctttgggcacaaaactgcacattgagccatttcctggaatagactccgaaaaggggaattacgtatgcagtagaaggaaagagcactttttgaggcttttgatacctcaagcaaatgtccttttgttctagactggaggctatggtggggtgggctgccagagaccctgcttccctgcaggggattcatgtttctgctgaacaggggtccaaacccatgagctcctggctcaggaaaggtcctaggtgggcccatacccaacagcttttcacagtgacttgtgagaagctctaggagtcctgatgatctaaattgtttcagttgaaagtggaacaactaggagcattttgaaggcagaagtgtcaagacgcagaaacttctgtggtgccagaagagggggctgcctccagcaagatggaattcaccacggaatatataccaagcagcgtgtgggcaggtgttgtgcacaccacaccccgctgcgagttgtccccggctccagcctctctatgttcctccctatcagctgacctctacacactcatttctttgcatagtctctgcctcccctagaatttcagctcccttcatctgttttgttccctgctgtagacttagcccccacaaacgttacctggcccattgcagctgctcagtaaatatgcgtgggctgaaagaatgatgagtggggaagattgtaaagacctgcacagaggtcccaaaatatgatgcttgtaagtaagaatccttgcccgcattcctttactgggttctttttgtttattttgttttgtttttgagacagagtctcactctttcactcaggctggagcacagtggtgcaatctcagctcattgcagcttctgcctcccaggttcaagcaattcttatgcctcagcctcccaagtagctaggattacagacaagtgctatcatgccccgctaatgtttgtattttttttttagtagacatggggtttcactatgttggccaggttggtctcaaactcctgacttcaagtgatccacccacctcagcctcccaaagtgctgggattacaggcgtgcrctcccgagcccggcctcctttactgagttcttaatgtgtgcctggcatgtatctctcggacacttcccaggtaattctgttatggataaggtgactactgtcatcccatttatttcctgactcatgccagcttgacattataataaagyatttcccccatgctattttaaattctttgtgagccataatttatcttcctttaacatacataagaacattctggaatttgctcagtagcttgcacagctctagtatttacccagkaatggaattgctggggcctagggtgtgcctgtgtgtaamctgcctctgtacctccaggtacgtccttgcacctgtacctccattagctagtgtggctaatgagtccacactttcactcacagggcatgaggcatgagtgtctgcacatgcctgctaacacttggcatcactgtgccttcttggcatcacagtgtcttctaatttttgccaggctagtaggtgtcaaagatgtcttattctgtttttatttgcatttctgattgctaatgaggccctagaccttcatgcctgccctgcctgccctcaccaggcccctctgtcctccctttccctaccctaccctgacctccatgtctcttctgcttacccttcagaatttaacatagacagacgtttgcacctccgaggggctctaatctcaggcctcctctcttccctccacgggctgcccktgtcaatagcagcctgaggtcgtgtttacagattctcctccagagccttgcactgctgggatcagagtctgctccagcacctacaggctctgtggccttaaccaagggccttaatctctctgagcctcagatccttacttgcaagctggggattaaaaatagcacctcctagaagacttttcttgagaattaggtgggataatttattcaaagtgtttggcgcatagtactgctgagcaaatgtagcttttgggttttagagtccttgcagtccttgcttgtcactatgtttacctgaccagcctccaagcctagggagtcctcctgggtggggctgtgtttgctgcatttttgtattcccagcttccagcagtgctgggcaaacctgaagtccttgactaattggtatgtgtcagtctcgctggataagatttaagcatcaaatgaagggttgctctagatgcccttttaaaagtcttttccaaccctgaaattctctgatcaggaaattatcaaggaaaaagttctccttgcaggatcttttctaagatttctaaatggggactttattacacggggcaggtaattacaggaggctgcagctgcagcagagagcttcacatggctggtggctgatnggtgcattttggaggctgtcatctttgttctgactgggggattggaatcctggcagaggcagggsctctcccttagcagtacagtggaaggcagccctgcaggacccaccctcaagctggtcasccctccactgactgccccaggggatggcaggcagcatctgttggcatgtgaatatcagacaagtcatggacagtaggagcagaggtgaccgttggaacactcagcccaggagtcagtttcatatatccccaggggccacgtgggtaacacaaatgggttgaaacatctgggcaagacagtagagagcagtggggtctgcagtgaattgtaaaactgactaggtgccaaccaaaggagatggctgccactcagctctgtgagatcgtcctatggataatgtgagctcagggttcctggatcttccccacctttttcaaaggtagccagaactctagatttttatgtaaaactttctgattattgttgcacctaattcaaagttttgttgtgctctacagtgcagacaaaacatgcctgtggggcaattgttttcatacctctgatttagcccagtatttgacaggttgggaaactgaggctcagcagttaaggactttccagaagtccccagggagttagtgaccatgatggacacaaagtgcccaagtctgggccgggcgcgttggctcatgcctgtaatcccagcacttgggaaggccaaagcaggcagatcacttgaggtcaggagttcaagaccagcctgaccaatatggtgaaaccctgtctttactaaaaatacaaaattagccaaagtgggttggcacgcgcctgtagtcccagctacttgggaggctgaggcaggagaatcgcttgaacccgggaggcagaggttgcagtgaactgagattgcaccactgcactccagcctgggtgagagagtgagactctgtctcaaaaaaaataataaaataaaaaaataaaaaagtgcaagactgggtgagttatccaccagtttggtgggctcttccccagcacctttattcaaggcagggactaaagcttagaggagtaaagggacagggacttgctcaaggtcacatagcttggaacagcagaatccagagaaggactggggcttgctggccctcatccatgggactgtccagccactgtgttactgaaaacgtccccataatggtttcaataaagtcctaaccaggaacttggcacagggcaaattctagcctgctgccaatcagcaggaaaacagctcttatgccagtgggcaggaagctgccaaggtgtcacttctgctcagagaaagtggtttgtgtatttgctgaactaatatgttcaccctgaaggtacagagatcaactctatctctttctggagggtccctccagctggatgcctggagtctgatttgacgacattccttttgcccttgacctggtgttcttagagagcctgcctatcaaatctcataatcagtgagggatgttgattcttctttgtgatcgggcacatgacttaggaaacaaacctgggcttagagttatgagggttgtaagcagttycagcttgcagtgttttagctgtgacattgggctggccacttttataattgctgccctgccagcctcacagagctattgtgagactctggttgaatggatggatctaaattgccaagaaaacagctaaagaaatgtaractggttttggccttatattcctcctccttgaaggatgacatttgagctgggacaggaatgataggagggagccagaawattcagcaagtgcrraggcccaggggcaggaatgagcttgattccccaagaatggatggggagtgtattagtctgttctctgcattgctgtaaaggaatgcatgagggtgagtaatttataaagaagtgaagtttatttggctcacaattctgcaggctgtacaaaaagcatagcactggcatctgctttttgtgaggacctcaggaagcttcaagttgtggcagaagaagaaggggagctggcatgccccatggagggagagggaacaagagagaggggagagtgctcataataaatattgataaaattataccttctaggcatagcagggaggatcagtagacttacccccattaaaggcataataaggaccagtgcaatggctcatgcctataatcccagcactttgggaggccgaggtgggtggatcacctgaggtcaggagttcaagaccagcctggtgggtttagtagaaactctgtctctattaaaagtacaaaaattagccaggcatggtgataggcacctgtagtcccagctacctgggaggctgaggcaagagaatcacttaaacctggaggtggaggttgcagtgagccgagatcgcaccactgcactgcactccagcctgggtgacagagcaagacaccgtcccctcctaccaaaaaaatagacataataaaagctaacataatatttatataaatagagggcatttggtaattatgatttatcacaatctactgagttgaaatcatttgttttggtttaactgagtaccaattcattctaacctcttttgggcttactcataggctaggcctaggattaaaataataattagtatgagagctgtgctaattattaattttaggttgcttgtctggaaaactcayggtaagggtaatagtaagaagatttctccatcaaagaggagaaatgtcatgacttctagaaaaaactttatggaaaaggggaggtggccagagcctactgggtcaaaacctcattcgtaggggctcttttaaacaatgagaacccttgagaactagtagagtgagcactcactcmttacccggaggacaacatcaagccgttcatgagagatttgctccccatgacccagatgcctcccacagggccccacttccaacactggggatcacattttaaggtgagatttggaggggacaaatatccagactatatcaggagctgacatgactgaaacagagtaagggagaaagcagtaggacaaagcagaagggggctgaagtcttgccaggagcagggtgtgggcccaggaggcctgctgcctggcgtggcatgggagcgagctctcttgcaagatggcagtgaggacctcgtcctcggaggcaggcctttccactaaggccaggaccatgatgggagagcagagaggtccagaaaatgaagaagctggcagagggtgggggagttggatcaccccaaagacatcatcaggaagggaggggcaggtcatctgggctgtgaaatatgagtagggtttgtctgggcagcaagagggagatggacttcccagagggcttggcatctgctgggggagcggggggccatcggaggacggcacatggcaatgtgtggtgttgcttccctcctgccttggaagctgtgagtacccccacaggattgaattgaaggcctagaaccctggatgggaaaaaccaggaacccaggagatctcgagggtcttagcgggcagacccatgtgatgtctgaaccctgaccctccccacctagtgccccaggattgcagaacacctccttccttgtagccttgctcatttgctcagaagtcaaggcccaggatggaatctcattgcctgagaatgcrggagtacgaggagcttctagggagcccttgcttctgtcgtgggagggcagcctgtgcatttaccatcccactaggagagcatgcggtggaggagaggtgctccccaggaaaggactggcggctgtaagatgggagcacagratcctttgggagcagggcaaccccagcccaccctcaccctcttgattcctgcctgttccattctcttccatggcatggaaggagccctcaccccaggctccttgctggagatatgacggggagcaaatagctgtgacactggtccattctgagctcctgcagtgatcctaaagccaaaatgaatagtacccaatgcctgtggccagggagcttgctgtactgggtgggaaatggtcctatgaagaatgaactagggatgggtcattggtgttaatcttagatccccatgagtaagaaaggacatacctttgttgtctgtgtcactttgattattagtgaagtaaaactactctttgtagcctattggttgtgtgcatttcttcaatattgatttgccttttatctactattttaaaaaatttgtgttgtgtgcatttgtgatgatcgtttttgcaagagctctttgtgtttattatggatattagccaggtgcccgacatgggctgaaaatacgcttcctggtttgccatttagtttgcactgtcattcagggcatttagtctcttagcacagggatcaaaattttttcttttctttttttttttttccagacagagtcttgctctgttacccaggctggagtgcaatggcgtaatctcagctcactgcaacctccacctcctgggttcaagcaattctcctccctcagccccccaagtagctgggattataggcgcaagtcaccacgcctggctatttttatttttgtatttttagtagagatggggtttcaccatgttggctagactggtcttgaactcctgaccttgtgatccgcccgcctcagcctcccaaagtattgggattacaggtgtgagccattacgcccagccaaaacctttttctagaaagaatcagakaataaatattttaggctttgagagccgtgccatctcagtaccatctgtttgtgccattggagcacgaaagtagccgtggacactgtgtacacagacgttcacatttcttatgtgttcagtcttttcttctatataaatatgggaggccttccgtactccaaaattaaatgaaagaaaaacaaaaaactagagaagaggaaaagtcctgaaaagtgatgtaagtgtaatgccccagcagtgatgagtgctcacagaagatgtactggaatctccttggatctcggtaggtctttagttctcaggagaagaggcgagagtgggcgctgctgcagacaggggcaaagtcacgagtgaaggccgaggcatctgggcctgggggagctcttcagcagggctggggtgggggtagcactccagaggggtgtcccctcatcctgtgcctctcctctgatctttattctttccactgacattgatgaccgtgttctctgaggacactgggcccattgtgtcttgagagacatgttcagccaaccacctggtcttcgtcagtcccagtgagaccccaggtgagaccctccagcttccttctatggaagccatcaggccccttcctcccctctaatccggaccctcccagagactggattgtcaggtttgatcttaaggaatcacatgtgaattttacwcttagctcctctacccttttcttttaatgttgtttcaaagatgttcttaaacccagtgctgtattcaagatataactttcctatcctataactttgaatgataaactaaaaaacccagctggttttgcaaagggytttctgagtgtgagagggtcagatgggtgttctccctgtctcctcccgaccctcagtttggttggtctcatgacgtactggagaaacaggctcgggcctggaccaaccctgtgcrgactcagactcacagctggccataggacctgggacaggcccttcacctttcratggcctccgagatgatggtatgtgtgatgcttaatattgactgtcaactcgtttgattgaatgataaaaggtattgttcttgggtgtctttgagagtgttactaaaggagattaacctttgagtcagtggactgggagaggcagacccaccctcaatctgaatgggcaccatctaatcagctgccagcatggctaggataaaagcaggcagaggaacgtggaaggactagactggtagactggctgagtcttccggcctccatctttctcctgtgctggatgcttcctgccctcgaacatcrgactccaagttcttcagcttttggactcttggacttacaccagtgatttgccaggggctcttgggcctttgaccacagactgaaggctgtgctgttggcttccatccttttgaagttctgggtctcatactgatccaccactggtttccttgattttcaacttgcagacggcctatcatgggactttaccttgtgatggtgtgagtcaattcttcttaatatttttgttttgttttgttttgagacagagtctcgctctgttgccaggctgtagtgcagtggctcattctcagctcactgcaacctctgcctcccgggttcaagcgatcctcctgcctcagcctaccaaatagctgggactacaggtgcatgccaccatgcccagctaattttttgtatttttagtagagatggggtttcaccacgttggccagaatgatctcaatctcttgacctcatgatctgcccgcctcggcctcccaaagtgctgggattacaggcatgagccaccgtgcctggccttctccttaataaactcccctttatatatacatctatcctattagtcctgtccctctagagaaccctgactaatagtatgtgactcgaaaggtctctagtgaaggtgcagtgagacaacttaggtagtatctrttggtgtggcacgttggcatcactccggagcctggtgacctaagtttgggtgactgactttgctgcctactagctgtgtgccctggaacaagtgacttcacctctttgtgcttgtgtaaatatggagagatgataagtcacctactaatagattgtttggaagattgaatggcttaatccacatcaagtgtctgaaacagtgcacatctacatagctgggaaatgttagccattgtaggccaagggccagtcacatactaggtgttcaataaatacaaccacccttctgttattagatgtgctggaacaattccattacactaacttttgctacttttgcaagaaccacagatttaatgcctatctacctccccataagtactgttaattaaagtccccaagcccagataaccttgctttcctgtccttagcaagctctggctggacaagaatttttaaaatgtgtttgttgatcttttaaaacccctaagatgagtatttactgccaaaatgtgcaagtgtatcacaaggatttaattcaggcactagataataatgctggagatttaaagaaggaaaatgacgaggttttcatttctttgccctctatctgctatggctacaagcacttctgtttatcatttaaaatcctatttgaaaaggtcactggttatttgygtgaatcatacagtgtgaggacttaggaaaaaagagccaaagattggccgccgcagtcacctgcttcattccctgtccttcccctgtgatggagtttgctcygagtctctgctgttctcagcttatggtggccaccatggggtacaggaggaccactgggtccaggcaacatgacgctgtcagtaatgatgagaaaaccagacrctgctcagagtgcatggagtttgtaaatccacttgaaattgggctggtgcaactgaggaacggtgctttaaattttattccattttaattattagctaattattttaattaattagctaattaattagtggcrctaattagttaattaatgcaattgaaaaactgcattttaaactgaaattttcaatccactctcatttttacttgcattcccattttacagaggagaagtctgagsgtccaaatgctttagcacwggtttagaattgccyggcatgtacatagtggacccgctctcttcagataggtgcagactatctctgaaagctcactctgcctcagttcctctctaacgatgtgcagcaggtattcaccaagcttccagtagcctgtgtttcacatgatgtgaggtgaaggggtgatggtatatttattggcctcgtatctgatagttgcctgcacattgtgcccagagaagcmctttgggaagtggagctggtgttcaaaaggccactaattggcttattccccaggattcatcttcagttgttgaaatctattttttgaaaggcttaacctgggaagtcccctgaaaacaggtgtgtgatgcagtagggacagcgggaaaccaggggaagtttccagagagaagtgtgaagagccattctccattgctatttttttttttttttttttgagacagagtttcactcttgttgcccaggctggagtgcaatggtgtgatcttggctcactgcaacctctgccttctgggttcaagcrattctcctgcctcagccacccgagtagctgggaatacaggcgtgtgccaccaagcccagctgattttttgtatttttagtagagatggggtgtcaccattttggccaggctggtctcgaactccagacctcagttgatccacccgccttggcctcccaaaggactgggattacaggcgttagccacggtgcctggtcctccttcactaatttttgctgggttacattcactgccctccagagggacatgatcagctctgcttccctcactgacctcgtcctgtawaattatcccttttactcagcacacctgtcccacaccggctgamtaccaccagctactttccaccctgtgatctccyactggcatgtccctccgcctgagctccgctctcctcacatggtgtttgcaagyggctcactcaggagctcagtctcatggtccccctggtgccccacgccctgtcatttgcagtgatgttctgtgatcctcacaggaggcttgtgaagtcctattctcattttacagatgaaccttagagaggctccatagctaactcagagtctcccgtcaagtgaaacacaagggtggaacccacgtctgtctggccctagaccctgtgcctcaactgcacaaccagtgttctccgatagaactttcccagtgatggaaatattcaatatctgtactgtcctgttcagtagccgctcactgcatgaggctactaagcacttgaaatttggctggtgacactgaggaactgtgctttaaatttcattcagttttagttaattagctaattattttaatttattagctaatttagttaggaacactaattagttaattaatgagtgcatctgaggaactgcattttaaacttaaaatttaattttaattggaaatagccacatgaggctagtaactgtaaagaactgtgacaagcctgagatgtctccctatttgcaagctgacaaattagcctgctgacagatgctggcagaagacaggagcttcctggatcagagacaagggacttcattactcaaagcacagcgggcagccagcttgagtttcatacttgcgtcatttctgcttgcctctaagtcttatggggttttgtgcaaaagcatttaccattatctgcactgttttgtatgatgcacaagctttcagagagggactatatatttcactcctcattgtatctccagtatcccaaagagagcctggcacattcttgggacccaacgagtctttactaaatgaccaatggctctggttcctcacaaaagccaagagtctggactcggtggttatagaggatcctcccagctcttgagaaaggtctctgaatttgagcgagtgccctgcttctgagattgtctcttccttacagtcgctgcagagatcagcctcaaacagggatctcagtttcctccctgtagaacctgagtctgggactccgtgcacgtagattgcagaggaagtgttccagggaaasggtgggggacacagggctacgcaggggagctgctgagcagggatgtgctcccagctagagtcaaccttcagcctgatcccacggccaaccccagagcacaaactgtaccatgaggctgtcccacaaacctgaaaatttggcctggactcagggacatttgggagcctcagaagattataggcagcagaaaggaaagacaggaatccgataattccacataagaaacgtgttctggactctggagtccaggtagtttggtgtttgaatcagactccaggtggcagtagggaagagaaatgagtgtgcctccacgctgttggggaaagatgcctttttttcaactctagtacttaccatcagtgggggaaactgaaggaaaaggtaaaggaggccaaccctgtgtaaccccatgtccctctgtcattgtctgtgggctgcctagggtgtggggggtgagagggtgggcacctcccaggggaggcagctcctctgtggccagaggcagttctctggatcaagggacagctgtgagctgtcagcagccaatagtcacagcagctgaggggtggtggcccagccagaagaggcctctgggcagagtgccagcagcatctactctgcagggacccagcaccttccaggtagcctgaccccagctaaggaaatgaaaacctgaaacctgcctttccaggtgaagtggctccgagggtcaccgggcgtaatttgctacctaaggaaagtccagtggttcttgattaccatcccctgccctccatgctgctcaggtttcctgctcgtcctttgggctggcctggagaagaaagaaacaatacgtcttcttttcttcatgtccctacaatgtgccaggaactctccaagagacttggcctatattatctcatctaactttcccagcaaccccgagaaatgggcctggtaatgcccgtgcctgcaaggtggaagccgtggctggcagaggtgaaataccttcctgggaataccttcacagctaggaatggcagtgccaggactcgaagccaaccctcctgggccaaagcctatgctcttccctaccatcgccatgggcgtgggttgkggggaaratgcatcacaagactgtgccttcctgttctttctctttctccaggcagacccagaaggcactgcaggacttcagagagcaaagagggaagtcaaggaaccttatcctgtggtttcctctactgatgagtagtggagttgagaatgtccatctttccccaacagcatggtagcacactcatttctcttccctactgtcacctggcatctgattcaaacaccaaattacttggactccagagtctagaacacgtttcttatgtggaattcttggatttctgtctttccttcctgctgcctataatcttctgaggctcccaaatgtctctgggtcaaggactaacttgtaggcctgggttttgaggtccctctgcagtttgccaagtttctttatttttatttttatttatttatttattatttatttatttatttatatatttattttttagtagagacagggtttcaccgtgttagccaggatggtctccatctcctgaccttgtgatccacccacctcggcctcccaaagtgttgggattgtaggcgtgagccaccacacccagcccagctttttttttcttttttttgggacaaagtctcactcttgtcccccaagctggagtgcaatggcacgatctcggcttactgcaacctccgcctcccagattcaagcaattctcctgcctcagcctcctgagtagctgggattacaggtgcgtaccaccacgcccggctaatttttgtattttaagtagaaacggggtttcaccatgttggccaggctggtctcgaactcctgacctctggtgatctgcccacctctgcctcccaaagtgttgggattacaggcgtgagccaccgtgcccagccgcagtttgccaagtttcttccaaccaatcctatctttcaaggttgcccatcaccatctcccactgtaatacaaaggagatctgccatttatttgcttaatacctaaaaatatttgctcttatttagggagcccttgccacatgcccaagctgggcagatcgctttgtacgtgttgtcttgtgtgagcctcacaaggaccccatcaggtcagtcctgttgttctcatcttacagatgaaaaattggaactcagtgaggtataataacctattcaaagtctcaaagccagtgaggaatagaacaagggttaatgcaagtcagtctggcccagaacctgtgctctctacttytyggtcagcactctccaatagaactttcctgatgatggaaatgctctatgtcggtactgcccaggtcagtagctgctagccacatgagactgttaagcacttgaaattgagctggtgcaactgaggaactgttctttaaattttattctattttaattcagttaatttaattagtggcattaattagttaattaatgagtgcaactgaggacttgtattttaaatttaaaatataagtttaattagaaatagcaggtgagtgcggtggctcacgcctgtaattccagcactttgggaggccgaggtgggtggattgtggggtcaggagttcgagactagcctggccgatatagtgaaaccctgtctccactaaaaatacaaaaattagccaggcatggtggcacacacctgtaatcccagctactcaggagactgaggcaggagactcgcttgaacccaggaggtggagattgcagtgagccaagattgcaccaccgcactccaccctgggcgacaagagtgaaacttcgtctcaaaaaaaaaaagaaaagaaaagaaagaaaagaaatagccacgtgaggctagtagatataaagaactgtgacagacctgagatgtcaacctatttgcaagccaacaaattagctcgttggcagatgctgacaaaagatagcagcttcctggatcagagccaaaagactttactccagcacggcaggcagccttaagtttcatgtttacatcatttctacttgtaccccaagacccacgggcttgcttcatagatgaggaaccacaatcttttattataatgggctgcaagtgaacctactcaayttctctcttggagggaggcattatctttatgatactggagagtaagcacacctgagccctgctctggaaggagacactatctctatgttccaggctctgtgcctccttaaaaaggtagttcagaaaagaaggctgtcagtgcttctgcttgcaagacacacagaagtgcaagagacccatgaagaattgtctgtcaaccatggatcctgcattggatactgcaactccaaattgtctgcagtgcctgttctgggatgtttcacatgtactacatcattgaccacccccaggtgtctgcagagttagcccgtcttttctgtttagcagatgaagaaactgaggctcactctcacccaacttcctgaacttcgagatcgtggattctcctccccattaccaactctttctacttccccctagatcccccgaaaaaacaaaaatctggaatgtttgtcctcctcactccttttcaaaactttaccctccaagactagaattccttttctcttctgccttgtcatcttcttcccattttccagaagagttgccagtctgacctcctctccgaagccttccctgcccagcccaacctatgctgaattcccctgtctcttctcgaccatagaaggtcctatctcatactcttgagtggaagctcttgagggcagagcctgtaccttcctgtggccactctcccccagcatggcctatctcaggacttgggggaaaaacaaactaacaaataaggactcaaaaaaccaaaccagaaacaagcagctattattttatgcctgggattgacttcccacttcactacccactttcagttccaggccccaggcagtgggtgaatgggcttgattctttcccagaaacgggagatgttttgaaatgactcaaagaaaagctgattggattggattgagttttggtaaatccacccacaagagcagagaaacttgacatttgccttccaagccagcaaaagggatgaatctcatttccttctaactgagcaggaggcccagcgatggaatgatgactgagcaggtctcaggagactgggttctagtccaagttctgaggctggctggctccgtgaccttggggaaggcactgcccttttccaggccttagtttctcatctatgatgcaggactggaggagggggagaggagtcagactctccagatgccctccctccccaccttccatgctgggcttcagtgatcctccaggctgggaaagcccagccttcacaggaacccagtgaagttctgctcctcccagcctcctttctgccacctccctgagcaggaccagcctcccctcctctccatgtacagtgtagacatcccacactgcctggctgagggagcacctactgtaaggctgtgctgaaagagcagcacttgattctaatccagactcctctatcttcagccctaatgcatcacctcatcgtaaacataattcacagtgctgccatctctgcctttcaaggtgggcagtgcatgtttttttctccactctcgttcagttatttttaggaaatgccatgtagttccatatacttgacatgtacctgctttcactacatctggagatattcaggaaagtccttgwtaacgataaggcctagggtggagctgcgacgtacttgccatttgtaaaagccaggcagaagagtccatgcgggttagacacagataaggaaaaacaattgatcaaagaacaattggcccagctagggtggagtttcttaaggcagccaggaagtggggggctggacrgagrgaggaaggaaaggaaggagggagggccttcaaggaggggtggcggagatggggcggagggggagcagacagtggatcctaattgttacaggcactgaatccttacaacagccccagaatgtaaggatgcttattatccctgttttgcagatgagaaaactaaagttcagagatgaaatggcttatccatggccactgagctgcaaaatggcagagcctgagtggaagtcggctctcctgactatctactcagttcttacaaatcaaacgtttgttgggggggcgttagaatacttgcaaaaggaactctgtgtttgtcagctttgctgcataacaaaatcttccaagctcagtgacttgcaacaggtgtttatttcttgttcgttacaagtgaaaatgctgtgggtaacctgcaggtcagctgtggctcagcaatgctctgtgaattttctcagtttaaggtccagggtgaaggtagtcgctaaccaggacatgctgtcctctaaccagaactgaaagaactacttagtcagatttcagctttctgctcagagatggcacataccagaactgcacacactctgtcaaccaaagcaagtgacatggccaagcccaatgtcagtggagcagggaggtatactgtctgtcctcccacagtgagaggtggaggctgctagaaggggaataaatagttgcataatgcagttggccacactgggctctgcagacagatgcctgggtctgactcctatctctgtcacttaatagttgtagtcatatggccttcagcaaagtgcttgaccacactgtgcctcagcttcctcaactgcaaaatggggatgataattatagtcctgcattaatttgctagaactaccataacaaaatatcacaaactcagtagcttaaacgacagaaatttattttctcacagatctggaagctggaagcccaagatcaaggtgtcatcagggttggtttctgatgagggctctctttctggcttgcaaatggcagccttctaatttgtcctcacatggctttcttatgtgcatatggtgagagtgctttctggcacctctttyttttttttttttataaggacatcaattctagcagattagggccccaccattatgacctcatttaaccttattaccttcctaaaggccttatctccaaatacagtcatcttgagggttaaggcatcaacatatgaatttggtgggggtgtgggggacggttcattccatagcaagggccaattctgcagggctcttgtgatgatttaaatgggttaggacagcgtctggcctacaggcaagcactgaataagagctaagctgctcttagtaccccagggatagcaggccccacattatcatattggctattccctgcactgataatgcctcatttgctttctttgtcctttggcaacctctcccaattcctggcataaatgaggtgaccaggaaatggatgcttgagtcccccggtgaatcctgaggcagttgacagaaggcacgcagggtttgaggtgccctgggctgcactccctgctgtgttgctgacctgcttggagactttggccaagccaccatcttctgccagccaggatgcacctcattaagacaaggcttgttctgcccacgacatctcagcagatttcatttccccatggccttctgtggctattcctacgtattgggtagtgctcagagccaaagtcctagagatttttggttgttgttgttgtttgtttgtttgtttgttttgagacggagtttcactcttgtcacccaggttggagcacagtggcacaatctcggctcactgcaacctccacctcctgggttcaagcgattctgctgcctcagcctcctgagtagctgggattacagacgcctgccaccacacctggctcatttttgtatttttagttgagacagggtttcaccatgttggccaagytggtctttgaactcctracctcaagtgatccgcccacctcgaccttctaaagtgctgggattacaggctgaaccactgcacccggccagagagattgttcttttacataaatgttcttatagattccaaattgacagtacttctccaaaccctctcccacagctactgctccccacctcaagagagcacctaatgaccctgccggatagggctgggctggacgggcataggagaacttactctagctgcctgtgtctggggcagtttctggttatgactaggagcctgagtgttttcctgctcttgagtagccacccacagacacagaacgacctaggcttggggtgaactcttgggattccatggcaacactgaaaaaccctgtgttgatttttctatcctcgctcatgttacctttcccacatctggccttgcttagaargaacgatgtctgaggctgtttgtttattagagagctctgttagccgaggagagacagattaaaggccgtggggacagccaagcctgtccaagtccccttgcctggtgtggctcagcccagcagtgttaggaaggaaagcaccaggtgaaagttcttggtgccctcccagctcactgctaattcattatttgtatgatgactaattcagtgcatttttgaccttctcagtctcaacttcctcatcagggaaacaggaacaaagatacctcctgtgagatgtacagcatctgacccagagtagaaggtgatgatgatgatgaagatgatgatagttcagccctcagggagcatggctgagaggccaggcatgctttacgcacttcatattcattgatcctcttaatcttcttggcaaccctaggaggtggggactactattctttttctttacagatgaggaaactgaggcacagtgaggttaagtgactcctagcaggatgtacagccagtgaatgacagggctgagaattggacccaggctgtcttgcttcatagccccccaccctcatcactgccctcagacccaggtgacattagttatgttaagctgtgtctcctccctataaccttccctgcagtgttggggaaaaggacgcaaagagcaggtgttgcttgttctgaaaagtacttacttgtaattatactaaaaatgtccctttcgagttgtttctttagagagtcagaggcagggcagccccaccctaggcacctcctccctccttctggcccccgtgggcctcttggtgtgatattaacgtctgagggcctcagactcatccattattgatggggcatggggagagggtgagaatgaggcccaggcggtcttaacagctcagaaagttctttttatccctgtccctggtggaaaagtgcattacagrtgacaggagcaaaagcagctgtgaccaaagctgctgccagctgtgggtagagcatgattatcatttgttattgccctcaactgagcaccctcttctcattcaagatttaggaaaaacattacaacaatgacaacaccacttctctgatcttgagtcttagattcacgtctctctgttccttcgcaaaatgcctagctgtctgtttcctgccagttagaagaatatgccagactcagaactacctcccgcccctgcccagtgagatctgtgacctgcccccagccctgttgcgagtgcacacgcttccttggggatgggggtgggtgagaacagcctttgacctgcagacctggattccagtccccattctgcccttgctccccttagtacgccgagctgctcgacctccgagcttcggtttccttgtgtgtgatggcgaggctggagctaccccaagggactgtcatgaggctaaataatgtatgtgaaaggccttaacccagtgccaggcacacagcaggtcccagaaaaaggatgtgccatcctctcactttctgtctaccccacccatcctcatccttcagggtttgagcaagagccctttgtcctggccctctttgcctcattcttcccccatttcggtgttttgcatgttgattaaaactctctggggcaggctctccaaatttagcatttttacaacaggaagtggtcttagagatcatgcggttcagagctttctgtttgcagtttgggacaggaagcttctgcacgtaggtcccctggctcccatccagtgctctttaggtgactctcttctctccccacactgagtggcttgaaagggctcagaggcttcacatgagcacttaacatttactgtgtatatctgagccaagtagggaaagaaactgtctcaccaatcctcacgccctctccccatgctaagtctcccgagtattttcttctgtttttcagatgaagaaactgaggttcagagaggttaagagactccactgaggtcacacagccggtaagtggcagagctgggattcgaacccagctctctttcactccagaacctgtgctctaaattgccttgctttctttgccttaaaaaggggagacctgcgactttgttttctgttttgatggtactcacacagattcctgggttgaaaggagagggcccctgggtccaaaaattcagaagggtggtggcatttgagaaaaacatccccattcccagtgggtgccgtggccgggacaaacccggagcttaggcgcacctgggttcaggatcgagctcactgtagccagcaggagcctgggtctgttctcccaggagggttgctccgaggccccaggagctctaggaaccagacccctgggaccccacagcagggcccaggtgcctcgtcgtgtgctgtgtgcctcacattctgcctcagccacagaggagcccggcaggcaggactcaatctcactcagcaccactctggatggttgcgtagttacaccgtgtggtttgtagtatttttggttttgttgtttttgcaaaagccaaaggaagtctgtgggctgagttctaccttcccttctttgaggatagttggtctgctcagtcagggacaagcagagctcagctagagaaaaaaaaaaccctccaaacacgaggttgacagatctgagggcacctgccctagctggacaccagccctggctgttcatgggcagggctcattggaagtttcattataatcatcccattttccagataaggacactgaggcccagaaacaaccacacccccacctcttgggaggcacaaatcaaaatgaatctttgctccctgagtgctgagcgctttgctgtttcacagctcgctgtccctgcagtccacatgtactcattgagggcctaccactgctcccagcaggcacacagcagtcagggagtcggatgaactgcctgccttctggcgggggaagacagagggacagacattcagtccactgtcgagcgccagttcctgatgaaggctgtgaaggggaatgccacagaacaagtggcagagacagcgattttagggtgaccagggaaggcttctccaaggaaggcatttggacagaaacgtgaatgcagtgagtgagcaagccatatggattctggggtaggaacagttttggtagagggaacagcaggtgcaaaggccctggggcagggagtgtgcttggtgtaacatcccgctctttgagtttgattctctgggtgtttgctcccataccccgctaccatcacagtggctgctcacctctagtatcccttccttagttacctccaagtgtctgcaggaatgtggcagtggggtgggggttgtgtagcaagaaaaatccgctgggcatggtggttcatgcctgtaatcctagcacattgggaggccgaggcaggcggatcacctgaggtccggagttcaagaccagcctggccaacatggtgaaaccctatctctactaaaaatacaaaaattagccaggcatggtggcgggctcctgtaatcccagctrctcgggaggctgaggcaggagaattgcttgaacccaggaggcacggaggttgcagttagccgagattgcgcccgtgcactccagcctgggcaaaagagcgagactccgtctcacaaaaaaaaaaaaaaaaaaaaaaaaaaaatccaacaaaattgcatgggagagaagaaaggtgtatctctaataggaaactacttgtcttagtccttaatcctctttgcacaatttctgtgtttggtgaagtttgcaatggttttgtcttcttgctttgcatgtgttctcaaaatgccttctttaactaaggctgtgagttcacaggacactgcagtccactgtgtcaggcccgtctttccaggcagggcaggaatccggattcaaaaaccacagaaatagcagaagaaacagttttggcaactacactgctgaccttgtgctgagctcagggagggaggtgcagcaggcagacagggcccaggtaggggtgcagtggctgacagacctctgtcttggcacagccattaggctcaggcccctgtgtgcgggctcaggtccctccttcatcacagggtggtattggcaccagcctgggggagcagttcatggggctgggtgtgctggaagagacrtgctgagaagttagggaccccaggttctctctgactttgttttctgtttttattttgctcacatagatttgtgagttgttaaaaaagaagggctcctggggccaagaactcggaagaggggtggtatttgggaaaaacagccccatcccccttgggtgccgtggcctggacaatcccagagcatcagcatacctgagttcaggattgagcccattatggccgagagaggccctggtccccgtctcaggaaagttgctccsaggctccaggcgctctaggaaccagaaccctgggctccacagcagggccaggtgtctcctcaggtgctgtggtctcatcttagtgccacctcagccagtgtacarccttgggcaagtcacgccccctcctggagactctgaaaatggaacagaaaggtgtggtcatctgtgtgttcctctgtgatctggaaatgctacaacctttgcttctaaggcaggtagtagccaggcatggggacggggcttctgtcagctcccctttgattttgtagacctctggctcttagcaaagagatgtcctaggaaggaagggcagtaccttggtgatcctgtcttgcacatatagactggagcttcagcccattctcacctctccttcacctgagacctgtggctgcagaaccagaaactcayttccagaagcagcagaatgtctctctttccrcagggctcagaagtatgtattaagccttccattaactgcatcttactcagctggaaaaataatactcaggatgcaattttatctgatttctggcctgtaagctcctgaagggttctcttaagaaaggctcaaaaaactcctgcgctgtgtgactcggagcccagccctgtagcctccctccaaggagcaggcagctcagtggttgaccagcaagcccatcatcattcagcactactgggttatccatctgtccrtctgtcaattaaacaagtgcttatgagggcctggggccaggggcacataccgagattactaagactaaataagacacagcgtgtgccctccacagcagttcaggcgcaacctgaccactttctctatttggttaaactccagaaagttcttgactttattattcgcagttcaaaagcagcatgagcttttgtgtctgctccccttcacccactaagtgtcatgacgagcaggcagaacgcccatatagatgccacacatgctatgggttacgatataggacaggaacaccgagcttggggtatccaccatcttgtggcagacagcaagcaagccagctttttgtctcagagrgaaayattacctcatgtctcaggattggttgctgcaaacccaacccaggtacagagcagtcagagccttgcattctttgtctacccagcaagatgtgtaggaatgcaagaaactcatggagaagtgtctccaaacaatgcattagcattgcacatgtctggatttgaatcctacgtctaacaatttaagtgcgaaattaagtgcgaaattgggtaaattgcaatggctgaacttctcagcctcagtttcctcttctataagatggggataatgcctactttccaggtgactgtgaaagagagtgtagggtcactcgtctgggaacacagtagtgaactaagaaagcccttgagttcaagaaacttagttgcacggggaatcctttcagctatgtattaagtatgcaatgccagttagtcatgtgtgtggaaaagaatagaggaggctgggcacggtggctcatgcctgtaatcccagcactttgggaggctgaggcaggcggatcaccaggtcaggagatggagaccatcctggctaatatagtgaaaccccatctctactaaaaacacaaaaaattagctgggcgtggtggcacacacctgtagtcccagctactcaggaggctgaagcaggaaaattgcttgaacccaggaggtgaaggttgcagtgagccaaggtcgtgccactgcactccagcctgggtgacagagcgagactctgtctcaaaaaaaaaaaaaaaaaaaaaagaatagaggaaaaacgcagaggccgatacacatcatggttcagggacagttgctgcaaggatttgccatgtgacccagcaccctgaattgagtaaaggaatgaccttactacctgtgggaagagcattctggdcagagcagataggctgtgtgtaggtcctgtgcttggcctgcttgagggacagcatggaggctgagctggagtgagcaaggaaaagtcgtggaaaatggaatcagagagtaggcagggaccagttcatgtaggatcttgcaggccttggtgagagccttggattgcattgtgggtgtgcagagaacccactggaggcttcaggtaggtaggggcataagcagaaaatagcatggaagaggccaggagaggctgcaaggtctgggatttgcttttatcctgctgctactaacaagttagcctgttagtgtttcatggatcctggcagaagacatgagattcctgggtcaggagtgttgtaaagtgggaaagatctcactgctttttgtgcacaaagcctgagctcagagggaactcttctgagtttgaaggggaatgataactcagtccatactttcagaagctgagcctcagtcaacaaataggaatgagaatcttggaacagattccagggcacagtgtatcagaaggctcttattctctcagcctgcatgtcttacctgtaaaatagggagaacattgcttcccaggcatattgtggggtcttgtaaatagaaattgaatctgaagaccctgtgcttattctctgcgttaataagaaacagcaaattcttcctaataatttatccttctaggtttttgattatcccttttcttcactgagaagctattaatgtttgctttgtagctctagtgcataacacacacacactcagacatgcttgcaaaatgtgcctgccagcgtcttcctggataaagggtggtgttggtcatttaggggagaaggagagagaagaaggtgaaaagagtcagaaccccagagaggcaagagaaaatagctagggtggcctctctctctcttttttttttttttttcctgatacagagtcttgctctgtcgcccaggctggagtgcagtggcgtgatctcagctcactgcaacctccacctcccaggttcaagtgattctcctgccttagcctcccgagtagctgggactacaggcacatgccaccatgcctggctaattttttatatttctagtggagacaggatttcgccatattggccaggccggtctcaaactcctgaccttgtggtccacctgcctgggtctcccaaaatgttgggattacaggcatgagccaccacgcccagtcagggtggtttttctttagatcatgtttcttcctcctgccccattctgtacatctgaagggagctgaggcttatacacagcatcccccacatgcaaactcatgtgcaccctccacccaccccaggatgctcagccagctggccaagcattacagctggaattcagatggcggtctctagccagtgctgggcacattctgccatcgccgtccctagacctcctgcccttccagtcttcgtttctctccaagacccaagcagtacagccagccttggcaaggcccacctcttatcactgcattgtgggaggagataaaatgagacttgtgtgttttaaagttgagcagaacaagatgtttttaaaatgctgtgttccctatgtgggaggccttctaatgrtcagctggggacartgcgtccagtcctcccacccctgggaggtcccggaaaggactgcagtgtgggatgggaggcacactcccagtgttggatgcctacctggtggccagctcagacagagctgggacagagctgtctctagcacctctggccatgagggtgtttggccattcccagcrgtcattcggcgtagctcagtttatctctcctgccagagtcgcctccttattggacggagggtgaggagcactcrtgatcactttgtggggagagtgggcagagtagggctgagtggaggtgaactccccctgccgcatggacgctccccgaggtggggtatgggcgccatccagagagaccagctgaggccgaaaggtagattcttagcatgaagagctgggcctctggagccgggctgtttggatcaccttttatcttayttttttgagacagagttttgctctgtcacccaggctggagtgcagtggtgcgatctcagctcactacaacctccacctcccaggttcaagcaattctcatgcctcagcctccccagtatctgggattacaggcacatgccactacgcccagataatttttgtattttcagtaaagacagggtttcaccatgttggccaggctggtctcggaaatcctgacctcaagtgatccacctgctgcagcctcccaaagtgctaggattacaggcttgagccaccacgcctggccccatttcttcactttgaaagagaacataccaccccttggtaaagctgttgaggtcaaacaagcaacctaagagaagtgctgacttggagcctggcacagagttggtgcactttagggacaggacccagtgctttcttccccagccatctccaggactcatgagctgggggtgcacttggggagacatcaatactagtatctcagtctctccatggtccacgcctcctgacccccagggacaggctctgggaatgcctcctggtcagaactggcctctgttctcccacctgcttgctgggcctctgctggtccaagctgcccagtgtcccctcgtatcgtccatcccgagcctcaccagggctgccaggcctcagctgctctgagcatgccctgaccccgtggtgccgatccttgcccatatgctccggccacccatgttytcgctcctcccactggacagcttggcagcccctggtcaagagggcaaggtctccctcctttcctgactgctgggccctttctgatgagagctactcttcctctcctctggggcccaggtatggrggtggggctgagcctgggccagggcagtttaatcctgtgatccaactggacaccgtgacacccctccaaccttcagtgtgtagggatgggatggttcatgcgaaatgcctgctgtcgcctgacgctcccacccatcccggaaccctggagggtgctgcatgcctcgccattgtagtagctgggtttataacgtgatcttaatccccattagggacactgctagaggctgcscctcagctccttcaggcacctcctggatgcccctgaaaatcagtagcattaaaatatttccatgaagtcacggactagggagaaaggggcctctttaagccacgtgtcagactgtgaatctcggctccagagcggccacacctccagcccttcctttatgctgagggttttagaaccagcgacagatgcctgagggcaggtgtaaggggcattaggagctctgaattgtctcttctttatcagcctccagcaccacccaaatggggggaaatcctttcttctgggacaggtgtgagcctgggtgcgcgcatagtgcaacccctggaattcccagccacgttacacgcttctaatgtcatttggctatcctaggactccaaatgtagcwctcctcgatccacacacataagaagatttgtggatttaaattctttttgtgaggctatgaatatgaaaacatattcgcctccttctcatgtgaccctaatcctggttaatcgtgtttctctggggcacttctccacactgcctactctgagccactatttgtgcttcagcagaatcttttttttccccgacttccccagcaaaggaacaagcaggaggcactaaggtgcaaagaggaagatttgcaagcacatcgaagggttctcccaasctgctggcactgctgggctgtggggcaaatgggcaggcgccgatgcagaaaggagcagggaaacaggctccaaaggaaacggacttyccaagtcatgctcatggagacygggccactctctagactcccacagggtgtcctgtgcacccctctccagtccagccacratgtgccagttgcaatcactactgtctgctgctcacaagccagccgggctcccctttgccttcagtccccaagtccacgttcctcaggacttccacgatccagctccacccacagcagcccctctgaagggcgccctgttttctgtaacataccagcgtctccatcatcaccaccatgtgcttttttgggcacaggcctggtttaccctccccctctgccctcctccatcagtgctatgccccctgtctccatggccacctgccttacacagccttccctctccctttggttgtcattcacctgccacttgtggatcactaaggcccttggcatcatgtcttgggaggcactggttcctcctgagcagatttatgcgtgtgaactgccctgggctggatcctggagccggcctagtgtgcggcttcgctatctagcagtgaagatacgcatgccgccagctgtgttcttgaagcatcgcaggcatgcttgggtacctgggtgaggtacggcagtggagcatggaagagcaggctcaggaatcggccctcaccccttcctagccatgtgacctggagtaagccactgatacccaagggcctcagcatccccttctgtaaaatgggattatggtgtcacctccctcataggacctggaactgcactttagctagtccctaaaatactgcrtagtctctcaaagcccaacttccttctctgcccaaagagcaaatgcctgcccgaagagcccctggggactttcgccaggcatccacacacaagaaatgtattagctatggatgggtcaggcatgcacagataagttggggagggagtgagwtggagagaaggaggggcggaccagaggccactagatctagttagagatattccatgggcttttgtctgcaggcttatcaaacaatgaggattctttgatatttaagcccggcaggagtcagagaacaacaggagaggacccagcagatcaaactccaagaggggcccaggagtgggcggtggtcaagccacaggcgctgattggagcagccatgggcrggctaaggggaccttgccctctggctctactggtgttgactacatttctatgggagggactgatgctgtcatcagggarcttgggggacaggcttcttggagtgtccccctggtgggacctggaatgtgttgaacttggctgagtggtgcaagggatcccctggtgccatccctgccaaagaccctatcagtgtcatgagcctgaggatgaaatctcccratgggtgagtgccccagcagcagttggagcagagtttgggcagattctagcgagagcagctacccaaggtggaggggaggccagggctcagggcatccagctgacccacgtgcttcttgcaaatcctctgaggtggccagcgcctcagaggggtgtccggggaggggcgggaggcatggctttctgtggggcacagctcctggggcactcattgcttagaccacattgtcagctgtgccccttggagttaggtctgcggggtcacctggactggtcatggtgctggcaggacacaaatggtgcattcaaagtgggcagtggaggggagctgagttgaaaggtcattcacaaggtcatagtgtggtgtaggaaacagcaagtgtggtgcagtccctggggctggaaatggtgggactgtttccaaccctagggctgaagggacaagaggacatagacttactgagacccccaggacacagctaatgtgtggatggggtcatttgacaggagcaagggaccatcagcccttggctgtcccacagggagggcgccaaggcagtcactgcctgtccccagttccctctctccctctggccttcctccagggcttcctgtggctcccaggaggttgtccagactttaggggggccaccagaccttgcctggccccccccgtctgccagtgccgctgcagtcttccaatccacttgactttgttttctttcagttcgttggactcacctactgtccccacaggccttcatacctgtagcttcccctgcctgggaggctctcacactccctgcccaatcacctgtccaccctgtggaccctcagtcactaccacttcccccagacatcagccagtccctcttaygccctctgctcgtggcactgaaggctgccagtcagggctctccaggggagcagagcctatcccatatttgtgtatgcatattaagagattcaactttcrgaactggttcaggcagttgtggaggctgccaggttcaaaacctggtgggcaggccagagggctgaaatctcaggcaggacttgacttctctgttacaatcttaaggcagaatttcttcttttccagggaacctcagtttttgcccttaaggccttcaacctattggatgaggcccacctgcattcatctcctttacttaaagttaactgattggagagcttaaccacatctgcatgctaccttccctgaaatacctagacgagtgtctgaccaaactactggactccatggcctagccaagctggctcattacatttatttatttacttagagataagtctcgctcccccaggctggagtatgatcatagctcattgcagccttgaattcctggactcaagtgatcctcctgcctcagcctccacatagctgggatgacaggggcaagccacatgcctgctgatrcattaaatctaaccatcacagctggtcttttgtgtgattccttaataatctcagcctctgtcccaccctgtgatgttgctttcagtgagcaaggacraagatcattctactttctctctccttttttttttttttcgacagagtctcgctctgttgcccaggctagaatgcagtggtgcaatctcggctcactgcaacctctgcctcccgggttcaagcaattctcctgcctcagcctcctgagtagctgggactacaggcatccgccaccacacccagctaatttttttgtatttttatagatagggtttcaccatgttgtctgggctggtcttgaactccttacctcaagttatccaccctccttagcctcccaaagtgctgggattacaggcatgagccaccacacccagccattctactttgtctaacytttgttttgttcagcacttgacagcaactgctagatggccggagcccagtgagtaattgtcaaatgaaagaatgaaagcaagagcgagaatccacaaaggggcttggcagtgtccaagtcagagatgttgccaagacaaagtgagatgctgtatgtaaagggtctgcatgtagtaggtgtgaaactcacacatgccatttcttcttcattttcaaccccactagccattatccacacacacacatatgcagttctgaatttctcagaggaatgatgatcctgggtaggtgacattttcctaatgttaatgttaatgttaaatattcttttgtgatggtcaggaattgttctaagcactatatatatatatatatwccaatagtattgtttccaatatgtgttaaatattcaagattattagtaacatgattgtacggtgtggtagctcatgcctgtaatcccagcactttgggaggccaaggtgggcagatcacgaggtcaggagttcgagaccagcctggccaacatagtaaaaccccgtccctactaaaaatacaaaaatgaaccaggcatggtgcacatctgtagtcccagctactcgagaggctgaggcaggagaatcgcttgaatccgggaggcagaagttatggtgagccaagatgacaccactgcactccagcctgggcaacagagcgagactccgtctcaataaaaaagaagtaagaaagtgactctcaggactaaccaatagtcattaatttgttcaattagccaagtctaggtgagcaggggctgggatcattgttgcattttacagatgaggagctgactggcctcggcttctgaagtggcccaagtcacgctgtgctccgtggctgctgtccctggggttgggggtgggtgttctctcctctcctgggaggcgcagggagcctcagggcagcacagttgctggctggctggcttcattcgagactgatttttttaatcgacataaggagagaaatgtccaccccagtcctgccattgacagggagcttgtcatcacctgtttaccttgcagtggccaggacctcctctcaggcctcacctcactgtggccctgtttctcttggatgatgttttctggagggaaacgggtctggctcccctcacggctgatccttcctgacccaggggaggagagcggcgttgagtgggtccaggcctggctcggccatgagagcacagctgtcagcttcaggggtgactcagagcgggtggagcccagctggaaggagaaaacaaaacaagggaagggagggctcacactcgcccctgccaggccctgagctgcgccacacacaaagcccactcagtgctcacagtgccaccatggagtggggataggctggttcctcttccacagctcagacagcaaggaggcccagggcaggggccgacctcagcctggcaccatccacttcacaccagtaggtgtgaagttgggattctgcattggccgtaatcctgactttacacctaccggccgagggccttgggtaggtggcttgaccactgtgggcctctgtcccagctctgaaagctggagatgatacccagtaccttcatcgggagcttgttgtgggcccagccaatgtgcaccggtattgtgcttagaacacagtatagaaaagacaaaggtgatggtaggtgtcctcagtgttgacacattactgctctatgcagtcacctcaagtagggatggtttttaacccccgctttatggatgaggaacttgaggctcagcagcccatgtaacttcctgggggtcaccgcaaacagccccccaccccttgtggcagcagctaaaccaactcccgaccttctmtccyccccaaagctccaccctctctctcttttcagttgcagcccatgacacctcctaagatcctgcccctgggaatgggaagaacacctactccggggtagccaccctgtagaatacagcaggttttttytaaggagtcaagcgggtcttgggacttgggcatctggttttctttagccctggtgcacttttcctgtgtatccttggaaaagtcacttcccgtttctgagctcagcttccacatctgtggactgaagtgaggcagcagcttgaagcgtgaggatttgattcggggatccaggtgcttatgaagttcttggaagggcagtgagaatgggggacctccagggtttgggctgcaatgcttcaggttgaggcccacaggccacgaagcttcaggaagtcagggcagaatctgcagctgccccrctgcctggaggtagaagaaggcaggttctggagtccagattctggggcagctacacagcagcttctaccactgccagaggaaggaaggctcttgcctcgcccacctgcccgtcccagctatcactggtcagatctcaacyayttccaaagcrctatggacagggatgctgkgaaatgtakttcccaggcttccagcccctgcagttaggggaagcacacagcgagtgggaacaaactctcactcctgtagacagtggccagcataggaacccctgctggcagcaagaaacagggtgccctgagaaccctcgaatgcaggcaggattgatgcaactctcaatatggkatttgagccatgtggattgcagataccactctagcttctagccttattcgttgatcatagctacaagtttgctgagttcttaaatgtttctgaacagtctcccatcacaattcccagtgcgtgatacccagggagcagggagggttaaggacatcagcaaagagaaggcctcatcacccagggtcagcggtatcaggccaggagtaccccttagcttcagggggatggacaggtggcaggaatcctggggcggggtgggctttttaaagcccagcaaggcttccaaccaggtgcctctagctctgactcacttggcccaggtttcttattaggctgattctccaaatgagggattaaagtggaggtcagacacactcccttgtaataacacaggggcacaagggactgcgctgggagagttccatgtggaagttccacacactcagcttccagagacagcatcttcttcctggggacccatgccgagcacagagtgtgtaggaaaggagggaaggaaggagggaggaaagaaacgtttagacattgatcccaaagatacaaaagacctggtccaagttggctctgccatctcctagttgttttaactcaatccaggtgcctgccctccctcagcctcagttttcttgtctgcaagttgacagtgaaggtaactcccgtgtattaagcatctgttaaatgtgaagcatttatgcacttaactctcatgtgaacctttgaagagatgtgattttccccatcttgctggtgcaggccctgagcctgatgaggtagacgaggtccctacccaagacctctcagctaggaggtcggaaatttaggaatcaaacccagatctggctgacccccaatacccatattctgttcaccacccagtgaatggggctgctgaaagggtcaaatggatggcagctgtgactgttttggcaaactataaaaaacaatgcaaaaaaagagatgacccccaattcaagactggcagtcggaggttgtgaggtggccaggctttcctgcggatgtgtaaatcttggatacttcagaagacaatgcatctgcgtttccaagtgtgtgggaaaaaagactgattggagagtggaaaattggagctaccagagcaattttgaggaaccttttcctggggaagatcaaagctggtggcaaactcaggtgggcctgactctctacataagcctctgggaccagctgcctcctgacccaaggcaaggctgttgcagagtctgggtctgggagcccctgggaaccctgacatttcccccagtgtgttaggagctccttcctgcaggtcctgggaggtcttggccacgggagtagaaagcatgaagatttagctgttcagcacatcaaggaattcacacaaataatgaattcggccagaatcatcatttgtgtaataccactggtttgcatgatttgatgcctgatttcatttggtcttttaaataaccctgcgagtaggacaggccaagggttctgctggactttttcctttttgtttacaaatgaggaccttgaagcttadtggggagagacagaattgacctttgtggtcatctactctgtggcgggaactgagctgttcacttttgtgcaaggccatttatcccacagcaacgcttcrtgtgagcatttttgtttgtttgtttgtttaagatggagtcttactttgtcggccaggcgggagtgcagtggtgcaatctcrgctcactgcaacctccacctcccaggttcaagcgattctcctgcctcagcctcctaagtagctgggattacaggtgcctgccaccacacccggctaatttttgtatttttagtagacacagggtttcaccatgttggccaggctggtctcgaactcctgacctcgagtgatccgcccacctcagcctcccaaagtgctgggattacaggcgtgagccaccatgcccggcctgcgtgagcatttttaatcctattttgtagattcaggaattgaggatcagagagggcaagtgccttgcctatgaacacacagccaggaatgggaagagtcaggatttgcatgcaggtctctcatgcctttgttgttgttgttgttgttgttgttgacaactgttggccatgatccactaggaaattcttcacaaaaccagaataaatgggttccaagcgtccagtgaccaggcatgggccggacagcagttcagaaaggagtcattcttcttactggaaggtttgagggccattaagtatccaagatttactggtcaggtcttacttggtcccaccctgtgcccatacatgaagccagccrgccaggatcccaaaggccaggacatgggaggatctgtttttcaataatgggaagtccccggatgtgttgcattggaagtcatctcactgtctgtgcagagctggcctgggagcaggaggttctgacataaagtgaaagcagatgcagtggggccgcttgggtggggcagggaggtggtggctgccatggctgcagctgcaactttccagcctgcaggtctgcctcttcctcccaccatctgtgcacttggctggtgtgaggaggtttgcctcggcacctctggggcctctctgggccccatcctcttctctgaatttgccacgcccgtgacacatacaggcaaccactccaagaacaggaacatggaraggcaaagaaaagatgctgtgacttctactttgggcaatggcagaagctcgtaccagatcttttctcccactgagaactataaaagctggaaaaacttgaaatccagctctttgaaggcattagagaacaactaaagcagccaggacttgaggtgcgaagaccccccaagagaaaggaaataagttgggagaaacccaatattccctgctcattttctgcacgaggtatgtgctgatttttgcagagggttcagaggacgagcagagagcagcagttcagagtgtttggcagtctcgcaaggtggggaaacaaaacagagataggtaggtaggtagagggagtcagtgagttcaggactgctaggtcaaccaaaacccaaggaaccaagaacctagagcaamaacaaccacaaagaaaagaacatgtgctctgtgccttctaaaattttcctttcaaggcatttgccagcacttaagtttcatgggtccagagtctaagaaaccaagcagaaaacagcagatgaaaagctaaaaagactgggcatgtggctcatgcctataatcccagcactttgggaggccraggtgggtggatcgcctgaggtcgagagttcgagaccagcctgaccaacatggagaaacctcgtctctactaaaaatacaaaaattagccaggcatggtggcatgtgcccatagtcccagctacttaggaggctgaggcaggagaatcacttgaacccaggaggtggaggtaatagtgagccaagatcaggccactgcactccagcctgggcgacagagtaagactctatctcaaaaccaaaaacacaacaacaacaatgacaacaacaaaaaaacccaaacaaacaaaaaagaaaggctaaaaagttaagcttacggtgatctcatagtacaggggagacagaaattggagataggagcctgtaaggaagagtcaccctgataagcatcttggtttacctgttgagaacggctatgccccaggggtaagagtaaaccagaaatagaccagtcttcatgaaaagtgaaacacagctgcagttagaacaaagtaatgtgccacttctgtacctgctcatcaggagacaaccggtcctctctgaaggaggacagcctcatccagagcctctgcatttttgtcatacacaatacaaacagcaaccaggcctgccaaggacagaaccaaataaccaaagaaagaaagagcaaccgagaaaatagacaatagaaatacacccacattatccaagtatcacaggatatccaatgtgggctttaagacggctgtggtgaataaaattgcacaaagatagatgacaaggtggagaaattcaccagcaaagtagaacctgtcaaaaaattaggtagaaattccagaactaaaagacaccactgaaatgaagaactgaattcataattcaaatagagtaggcacagcaagaagggggagtaaacaaggctggaaagatgacagtaaaccaagtccaaagaagttatcagaaagggaatggggaagatagggaagataagagcaggtattgatggaattgaatgatgagccayggctacacagaaagccacaggagaaggcaggagtctgcctttgctaccattttgctgtgtgaccttggataagtcacttgccttctctgggttttagtttttcatttcagggagacaagcgtaagggttacccacctctcctggtggcttggggatcacatgaggaaagttgtggccactctgtattgaaagcgtcaattttgccaacagcctgcacagttcgctcaggcatttctctagtgaccatagtgccaggggctgtgtgaagggctgrgagggcatcccagcctgtgatgggtatttactaccatcccgttcagtgggtatttactacaggttcaaaaccccgtgtggttccttcatttgtgtttccaggagtttcacacagttctctcagtctctggtcattgcccctcaactccctattgccagaggartttatcttcattagggactctccttagggaaattcttacttttcagtccccaaaagtgtgctgacatttgtcagtcttgtgctggtgaccccgctaagctctgttgtgtgcaggtgcttcatgcctcctcgtattgagcatgtggctgggaaatgactgccatttggcagaggacagggagccagcttccctccttccccatccttccctgctccctctcttctttctccttgttctggggggcccggcctccctcaccgcacacttgacatgcagagatctttggtctgtggcgtcctggcccagatgtcatttccgggagccagggctggcattcccccatgcctgcaggctgccccacgcttgctagagcacggagaagacatgcagtcctggtttcttccctgcagccagggaaggggtatagcggtgttcttgcttttccattgcagttttatccagggctttggaaagcgctaaatgataccagctcagaagcctctgatggttatggggagtgccctggccttggaggtgtggctgcaggatgccccagaggagaggaggctgtcacagtcccacaacctgtgcagcacaaccttgccctctgccctgcctctcacgccatccctagcagcagcctagagcattaatatctctcacgcagaggcaggacattgtaggaaacctgacctctcatccagagccttgtttgatcaacacggatcaacagtcatctgtttcagggaactcatctctgccctggcattaggggtgcagaggcactaagggcaagggtgtcctaggccctgctcattataaaggcaaatgtagtaagaccatggcattcctctgctcagccccaccagcaggtttctatgtcacccagagaaaacttagtcttgactgtggcttctctggcccaacacactctcaccccagctgcatgctcagattccccctcaccccccacccactcctctcctccacactgtgtctgatccagccatacaggcctcctttgctccacagggtctggggccctattgatgcctgggaggcgcctaccttagatccttttacgatgcaccccagccaccttgtccagggcctggagaacgcaaggaccagcaaatatgcagtcaatgaatgagatgaatggacaaccttgatgggctgacggccccgagaaatgagcagaatttgtgttatcaatccgtttttcccattgaagggatggttcggaagggctaggtgacttgttcatggtcacgcagtgagtagtgtgggacaggctgctgagaatggaaatgtgactcagagtctgtgctttctttctcagttctccctctggactgttggccgttttgtttcccttcattcatttctgggtttcttcatgacccaagcctccactgagcattgagtgtgtgcacgggtgacagggtcactgccatagtgaggctgagtttccatcctcacattgctcccagtccagggaggagacatatgtgtgaagagcacagacagagtgcagccaggaccctagggagccaggagaggcccctaactcaccccaggagagggcagggcttcctccaggagtcagcaccagctgagccctagagaatgagtaagagccatcggcaaagcagggtggggtggttttctggacagtggggacagcctgagcagggacacrgaggtaggagcaactgtgacctctgggtcagtcacattgcttcaagttacaaataacctactttaccccataaaggggatttattccctcatgtaactgaaaagtcaaggtgagggtggggctgcaggttgagcaggatcagggatttagcaccatttgttcgggttgttcagctctagtctcttctacacacgctagcaaaatagccagcaggatgttccacatgtcaacaacaagccagccagagcaaaagaaagtttcttccctccctacagaagcttggctggatgaattaaggcacatgcccatccctggatcaattactggggtaagaggtgggaaccctctgccagtcaagtgaattgtgagcctatctgtgatgatgcagaagttattcttacttaaattacagagctgctccttgatgggggcaggtggggagagaattggatgggatacctgtggacaccactaggttataaacaaaatctaggttgtcatgaaaagtgaaaactggagcagagaccggataaaaatgacgttgccaactgagctgcagagctcagaccttgtcctccatacgttgggcttctagttctggaagctgtagagggttgcaccctatgcatcttgggccctggatgtcttcagaagggcactgtggatttaatatggttttggagctgyccccctttctaccaaaaggtgatcaatctcctttcaactctaattttcctggaaaaaaatataccctgcttattgacaatctacaccttgagaatggggaggaatcgatcagatttcttccattcttcagcattccaagcaaagaccaaaaagaccacgctccagggcagacgtgcaaccacagttgtaccatacagaaatcccaaggtgtcggtgagagccagaggggtctccgatgggcatttgagaggtacctgtttgccttcttcaaaagaatactccccccttgctctatatccctccagccgtagtaatctgaagaccagttaacaagacaggtgtctgctccagggtagagccccccaaccccctgttcctggtcccccaacccctcccgatgtaaggaatcagaggactgtggatttggactcggatcctgctccttcctttccttaggcaagtcatctaagcactttgagtctcagtttcttccaagacaaaaagggaaactaatatctagctgacagtatattctgaggattatctgaagagatacgtatgcatgaatatctcatyctctcagctcttagtggatcatcagagaatattgattcattcacatgttgaagaagaaaaattaaagttcagcaatggcctaatagataccagaagcccagcatacatcattttatcttatcttcataaccattctataagtaggggtgttagtatcccactttgcagaagaagaaactgagggtcaggaaggtcaaataactttcccaaggctccacagctgggaaatcagaacttgaacctggaccatctaaagcccctttttatggaactgaggccaattggcagagcttgaatgcccaggtaaaaggaaccctgggccactctctaagcataccattgttgttgtgcttgttgctgaaatccaaaatctggaagagaatgaagtagagagaaaggcaaataacatgcatttaacaattcctgtgtatattgtacctacatgcatcacgagctctttgacaaatgtttgttgagtgtgtcaatgtgctaggttcttgttggaaacatggaggggacaccttctgcatcccataataaccttgcaaagagatgataacatccattgtatgcacgcactcaggctcacaaaggtagataaaccatccagagccacctgccaggttggcatgacaccagaaggaagaccacggaatacgtcctggtggagatgtggagagaaacattttttatagcaggatcacagaatctcacgctgttttcttcctccttttctttgcagatgacagacaaccttctgtgccttcatcaagctggttgtgtacccaccatgtccctggcgacaggatgggaaagaaaaagccctaattaaggatmgtcagaaaccacagttggaggaggacggcagagacagtttccctccccgctataccaacacccttccttcgaggtcctcgctcctgagggaccctggactgtcacagagattaatgaccccttatyttctttggatgtgaaaggaaatcactggttaaagcttgatcgagagacattatcagctctttaaggattgcagragaataggctactttattttctgaaaaggtaaatatatgcaagcaaagccaacatgccacgaatgrcgttggtctaccacacagccgtgtctgggacacagttgggggtcatcccccagcaggagtgaagtcgagcttagcggcccttgtgtcctcccttggaattcctgccatcccttttgattgagcctccacctctgggatttttcttccatttttctcctctcttaggagggagttcctgctacccatcgtgggaggccaccatcaggactgcgaagatggtgaccctgcggaagaggaccctgaaagtgctcaccttcctcgtgctcttcatcttcctcacctccttcttcctgaactactcccacaccatggtggccaccacctggttccccaagcagatggtcctggagctctccgagaacctgaagagactgatcaagcacaggccttgcacctgcacccactgcatcgggcagcgcaagctctcggcctggttcgatgagaggttcaaccagaccatgcagccgctgctgacygcccagaacgcgctcttggaggacgacacctaccgatggtggctggtgagatgctgcctgagagcggggtctgggctgagagttggggtgtggactgagagtggggtctgggctgagagtggggatctggataagagtgggaggcctgggctgaaagtgggagtctgggctgagggtaggggtctggtaatgagagtgaggtgctctcagagttaaatgctcagtccccgtgtacacctggggccctgccaggcagttagtaggattcagattattgtcccacmctatttattgaggatctattatatctaagtcagagcaggaagcacggctttagtttcctgtggctgccataacaaatttctgcacaattcatggctcaaaacaccaaaagtgcatcctctygcagctctggaggccagaagtctgaaaacaaattatgggcagacttggctcctcctggaggctctgagggggaagccgccccaggcccgctcctggctcctgccagctgccggcagtgctgggcgttcctgggctcagagctgcagcagtccagcctctgcctccacttccacagggccttcctccctgtatccctttatgtctcacatgtccctctccttttcttatgaggacacctgtcatcaggtttagggcccaccctaayccaggatgatctcatgcagagatcctcaacaatttcacccacagaggcsctttttccaaatgtcakgctcacagattccggtgactagcacttgaacgtatctttttgggagccactatttcacccactacagctattgaaatgcaaaaagagagagagatccttattctcatggaattttattctggctgggaggggaagataagaaataaacaaggtaggctcacacagaagtgctttgaagacagatccaatgaggtttgtcatagaaacttagagggggcttctgtaaatggggtcaccagggaggtctctgagacagcaggactcaagttgagacccacaggcagagaaggcagcagccatgagaagagcaggaccatgcactgcaggtgtctgggacagcgggtgcaagagcccgagggtggcctctgctggatgtaatggggagtagaggagctctgcatggctggggggctgtaaatcaggggaggtgcagtgagacgaggcctgagagtcagcaagacccaggggaggactctgggatttcttgtaagtgcaacaggaaatcactgtagaatttttgtcagggggtttcatgatctgatcttgtcatttgaaaggtcattcccatgttaaatgcaaaatagatcgaagaagagcaagatatatgtgttcmtgtcttatttattgagcacctactatatgccaagcatcactacattgagatggaaaagatagagtctttcctttcttgggttgcaggagtgatggggagagaagggaaaacagacaaactcaagccaggaccataggtgctgtgcaggaagtgggcacaggagcgatggtcttcatgtccaactccccttggagcctggggttatcgcagaaggcttcctacaggagtgatggccaggttcatcatgaaggattcagagaggttatccaggtagattctggggaaggtctatttgaaatgaacagaaaacatgtgtgagacttagaaaggtcaaaagccctgggctatgcttccaaagacctggctgagtcctggtttgctaatctgtgttgagcaccactgtgtgcaggtcctggggtgggctctggggaggtaacagagaaccgggcaggtagggtcttttccctttcaaagatccaagggtctakggaaggaggtggygagccaggcatggtaaggattagggtctgctctcagcctcagcactatggacttgtggggcaggatcagccttagtcacaagggctgccccgtgcattgcaggatgtttagcagcatcactggtctctacctactraatgctaggagtgccccatccccagttgcgatagccagaagatctccagacattgtcaggtgtcccaggtggggtgtgcrtgtgtgtgggtgcacatgcatgcacaaagttgccctcccttgagaaccagcagggttgggaaaatgacacattgatggcagaggtggcttcacacacatcccatctcctctctggatctgattccccctgtagcagcagttgctgggaccacgttaagtccaaacttcctcttcagagcctggagtctgtgatgttcagtgtcaccatgggattctgtttacaaaggccttttggggacaaacagggtactacacagcctgtttatataaaccaaacaggaagggaccttacacaacagcaggtaaaggagaaacttgggggcctttgtcctcattttacagacaaggaaactgaaactcagaaaagttaggtgacttttgcaaaagagaacatcaaatccaacctctggaaataccgtattaaaaactgttattagagagtatcaccaagacagtatcgatctttcttcttggggagggcggtttctaaaactcttaggctggtgtcgcccaggagggttaaaaaggcgtaagggaaaaayatcagcttctggatataagccatgtgtcttcaaagaacacaggctataatgtagacttaggaactgggcctggcatcagcgttcctaggttttgtcgcagagtttgtaggtcccatcaggagtgactttgaagaagctcttcatctcactgagtctcagcytccttcgtgttacatgggagaaatgttacttcaccaggttctctacaaccctgcaaacattagttttaacaattgtatttatttttgttggtttaatgggcaagtaatactgaacttaggtgggttttttttttttttcagtactaattaaggctgaatatatttccacttagttgtttcccatttaccagatgtcttcccctacctgcagcccttctctgcagtctttttctgaagtttagcctctggtggctgatcccagggcagccacttggaaggaatggggcttcaccctctggaaatcaacagaaaggagcagggctttagagctttggggttctaaaaaatgcacagataatacggaaaccacacgctttgaataaagaatcgggatacaggcatggaatatctgacaacaaagccatcctgagaactccaggctgcgccattgctctgcttaaaggcccccctgcaggcaggaccatttcatgaatggaactggacttgggtcatgatatggtttggctttcacccaaatctcatcttgaattgtagctcccacaattcccacgtgttgtgggagggacctggtgggagataattaatcatgggggcgatttcccccatactgttgagggggttggaagaatcttaggtgagaatgtgaggtcccgagctcccatcctgccctgagcttcatagtcctcctcagtcaagtgggcatcacaattccagctcgtcccagccctggcaggaacagggacacaggagcagtcaccagggctcactcttttagttgagttgagttgagttgagttaaattgagttgagttgagtttacaaatcagccccgtgccctgcaagtgaagagactgcaccaccatcccaggctggacctactgacccctgtgaccctctcctcgggtctctgtcccagacacccaggaacagggattccttcttccccagtccccatgtccaattcagagacaagccatgtcgaatgctgactctgccttctctacttgcccccaacttgggaaaccgttttgtgatacgcaggggacattctcaagggacagaaagagtgcgaccctcccctgatttccgccccctgccctcctaaggcatcttcccatcccagacatccatgcccagtgcccaaatgcaaaataataccatcatactgtccacccggcgcctagcaccaactctggccaggtcctgggcccagctttccaggtaccactgcttcgcccttaccacccccaccaccaggagggtgtaggtatctcattgtcctcactttgcacttaccaggtcacccactgtcaaagggcacagtcagatccccttgtagttaaaggacatggtctggagtcaggcccaggatattcaaactgttttggtcctgggaaactcacttcacctctgtaagcctcagtttcctcacctgtaaaataggtctataagatcacctttctcatagaaccattatagaaactcagtgagaagctgcctatcaggttatcagcacagggtcctgcatagggcaaccatagaacatgcgcttctgctcagggtgagccatctgagtcctgcacgagccatttctaagcaccgcctgtcccggcgctaacctgtccaccccacctgtccaccccacacggcaccggggatgtgataggggctcagttgtgatgagttgaatgaatgaatgtgtgttagctttagcagttgtcattcacttattcaatggacatatcttgagcctgtactacctagcatgcttgtgtctgctgcttggatgccaaaggggccagggaaaccaacagcagctggggattggaatgaggcctgcggtgaggccccagtggtgccacccatgtgtggaaggccagagactgatatttccagggtccaagggaggcttctcagaaggcgatgcatcattcattggccgtggaaggaggaaggaggatgggaagggagcgcgggtacctcttcccaacactctcgggacgggtgtggcctgtggatagggaggacttccagccatcgtgcctcaagacaggacaaactctgccatagcacaggctccagagttcctgtggatcatgcccgagtgcagggtgaggtgaggcacccagggctccagcttcaaggagatgtccgctctcgggccgtgcccctgggcatgagtgggcctccttatcccacttgcccgactcctcactcgcctcgcccccagcctgcagtgcttgactccatggagacctccccttccttctcctgccttgcttctcatccctctccagacagcacccaccatggacacctgcatccgtgccccagcctctgcttccagggaagcygacccgaggccccgtgcttcccaaggagctcaggccaccaggcggcaggcattgattgagcgctgattgtatgcagattgagcgctgattgtatatacttggaaactagtctggaaggctggagagggcgtgtccctgaacttccaaacactctgtcctgtgttcatatcagtagcactgtcatactttttttttttttggcatggagtttctctcttgttgcccaggctggagtgcaatggcgtgatctcggctcaccacaacctccgcctcctgggttcaagtgattctcctgcctcagcctcctgagtagctgggatttcaggcatgcaccatcacgcccagctgattttgtatttttagtagagaccgggtttctccatgttggtcaggctggtctcaaactcctgaccacaggtgacccrcccgccttggcctcgcaaagtgttgggattacaggcgtgagccaccgcaccyggccagcactgttgttcttttattgccactgacaaaaggcagagaaaaccagaatatttctttcccaaaacagtgacgccacatggagtaacctgcctgctccatctcagctggtgtggggaggacttactatgataatctagagaaagagccagtttcccatctgagctctacctggccctgcactcactctgkgacctcaagtgagccctttccagggtctgggcctccatttccccttttgccaatgaaagattggaatgggtctgagatttctgaagcgtggggcttgtgatgttaggtgaggcagggcactagagaaagtcgcatcacagagcccggaggtcatttctgccgtccctccttcccacctgtctctgcagtgctggggcttcagtttggcctggtgtcttactttgcaccttgtcagcgcttgtcagccttgttctaagggagaggagagtttgcctgggcaggcagcagggtagagctgcaaccgaatacagtagttttgttttcattgcattgtacaactaccattttacttctgccaggtaattcttgctttctacgtgtggtagagatgagaggtttcctttctaataagtttatttttattatttggccaggcatggtggctcacacctataatcccaacactttgggaggctgaggcgggttcatcacctgaggtcaggagttcgagaccagcctggccaacatggtgaaaccgtgtttctactaaaaatacaaaaattagccaggcacagtggtgcacacctgtaatcccagctgcttgggaggctaaggcaggagaatcccttgaacccaggaggtagaggttgcagtgagccgagatcgcaccactgcattccagcctgggcgatagagtgagactccatatcaaatcaaatcaaatcaatcaatcaatcaatcaatttatttttcttaaataagtcattaaagaaaagtaagtcagtcagagtccagcaggatgatgtggtgctgtgtgaagcaggcagcatactctccacacacgtccatggccgagcttgagtcctggcttctcaggcctctgtggcacccagtagacactcagtaaatgtcactgcatgatggatacacggtgccaggctcccaaatcaaagtagcggcgtgatggaaggccaccccctgggcctgggcacatctttacaagcctaaggggcacagcagcccttgctagttggagacctccatggaggttcaggggagtctggctgtggtcctctaccctggggctctcagagtgtagtccccccaccagccctggcagcagcatcacccaggagtctgttagaaatgcaggatttcggggccagctttaaacctactgagtaagatctgtgccttagcaagcctccagggggttttccgcacattcaggatcatggagccaccctggatgatcccatcagaatcaggcattttatctggatatcacatctgtgtgtgtgacaacatattcataatatttatcattttcaccacttgtgtgtgtacgattcagtagcattaaatatattcacagtgtgtgtaacaatcaccattatctataaccataactagcagatttttgtcatcccaagcaaaaactctgtccccattaaacagtaacttccccttacctcctcctcctcccagcccctgacagccacgctgccactctctgtctctatgaatttgactactctaggtacctcacataagtggaatcatataatatttttccttctatgtctggcttctttcattaatcataatattagtattttcaaggtccatccatgttgtaacctatttcaaaattttctttttatagctaaataatatcccatcatatgtctggaacgtactatgtttgtttattcatccatcgctggagactgggttgctcccaccttttatctattatgaataatgctgctttgaacatgggtataccaatatctgcttgagaccctgctttcaatttctgggggtatatacgtaggagtggagctggtaggccacatggctgttctgtttaaccttttgaaaaaccacccagtttttacctcggctgcacggttttacatccccaccagcaatgcacgagttccattttctccacatcctcaccgatacctgttgttttgcccttttacttatgataactgtagcagtgggtgtgaagtgtggtccagatcatgttgcttcccatgacgtgtctaacggtcttaagccagaggagaggctgcctgggtttaactggaagagcaatctggttctgcttgtgtgcctccccttggggcatccgattccttccattgcagtggggactgggtgccccgggatctccctacatatgcccaggtcactcatcttctggacagtggccaaagccactgctggccactccttcctctcccagccaccccttgcccctggggcccggagtagccgatgggaatcaccccacagcttatcacccctaccccaaaatccagggtctgggctttccaaaggccaagattccaagagccagagttagggttgtgtggtgggagaaacctgctggtgggtttctagaagcctgggttcaaatcctggtttgtatttgggatgagttgcttacctctctggcctcagagcatcctacctcacccacagtgaaatgacacagcactgtggcatggggacaaggtcagatgcaacacttttatgaaatctctccagggtttaccacgagtgaggaaggctgaggcaccaacaggcatcactacatagtgtggccagagctccacctgaggtgaygggcgggcctgggcatgcagcgggggccaatagtgaaaccaccgggggccaatagggataccaactcatcctggttttagcactgagagtcctgcatctagggaaaccccttaacctgggcaaataagtaatatttagtcaccctggaataagactggcattcaatctgcgagcagctgaccctcgagctaggtcttttttttttttttttcgagttggagtctcgctctgtcacccaggctgaagtgcagtggcactgtcttggctcactgcaacctccgccttccgggttcaagagattctcccacttcagcctcccaagtagctgggactacaggtgggcaccaccatgcccggcttttttgtatttttaatagagatggggtttcaccatattggccaggctggtctcaaactcctgacttcgtgatccacctgcctcggtctcccaaagtgctgggattacaggtgtgagccaccgcacctggcccaggctaggtcttaaaagatgaaaacaatttgctaggcagatcgcagaagccttgtgcatccagcaaactgctgattcttcaatctggctggagcccagcagtgctggggccgggggaactgagggtcaggcaggaaagatggcagatgtccctactgctctgtcccccatccctggccggggctggagaactgkcatttccacctactcctcgctcttcttgttaaggcttgagcgggagcacgcaacccctgggccctggtgtctgagcagggtgggagtaagacacagctagaaggcttctgctatttttctctctttcaagtggtgacacgtagggggatggagggcctttcagagagacaggagcccccagggaggagcaggttggagaaacgctgatcacatgtggagtgggaggggcctgtgagtccaggtgtggctggatcacccaagcggcttcagcagtgcctggcacatggtaggtgctcagtaaacacttgcagaatacatgaatgctctctttacttcctgagtaacccttagtctccttgaaggaggaagtggaggtgtctgtgtgtgagccgcctccatctccgggggcccagcagagagaagggtgaacaggagggccccagtaaacgacagcaggtagctcaggggctctgctgccaggaggctggagccacaaagccaggttgaccaccttctgtcctccgcccacagaggctccagcgggagaagaagcccartaacttgaatgacaccatcaaggagctgttcagagtggtgcctgggaatgtggaccctatgctggagaagaggtcggtgggctgccggcgctgcgccgttgtgggcaactcgggcaacctgagggagtcttcttatgggcctgagatagacagtcacgactttgtcctcaggtgagtgccagaccctctcccaagcctaccgtgctgcacccaggggccccttggagctgtaggaagcatcttggctcaggctcaggaaggcaaggttcagtcctgggactgaacttacccagggaccccaggctccacactgcaccccctgggcctcagcttccccatctctgcatcattgcaggattggaatggactagaagggcctctgcgtgcagagaggaagccatacacgggaggtcccccgttgttgggagcttggcacatggaggcctggggagagggcaaaattaatgtgaggactcttatctttaaaattcatccccattttgtaatctaggccataataaaaccacatattttatgtaaaatatattttcccctgtcgccaagtgaaacagacatttcaggaagatgccccaagtctgtcctgggtctcctgccattcccactataccactcacaagtgttccacgctgagaagtgcaggggtgggggctggccatccccagcagccttctagaatagtctctcctgtctgtgattcctgactttagtccttagaccacttacctgcctctcagagcctcagtgtaccaggtgtcccatgggtacatccatggtaaggatcagagtcaggtttccttgactgcaaaaaaagggctgtggaaatatcctttggatgagattgtctgtgacaggcgggcagtggtggtgatggctagactcccttgaggtcatgaaagagagaaaaatagcagaagccttccagctatgtcttcattgtctctattttacagatgaggagaaggaggcccggggaaggcaggtgacacccctgaagtcacactggaggctcactctctcggagctctcaggctgtctgagaacgggtgcccgtgctacaagactcagctttctccccttctctcccaggatgaacaaggcgcccacggcagggtttgaagctgatgttgggaccaagaccacccaccatctggtgtaccctgagagcttccgggagctgggagataatgtcagcatgatcctggtgcccttcaagaccatcgacttggagtgggtggtgagcgccatcaccacgggcaccatttcccagtgagtccctcctgtggccccgcctcgctgctctgccccttgcagtggcaccctgtccccccaccctgccgtggtcctgctgtgcctccaccggggtgcctcccctcccccagcctcctccggcacacacaagcccagttcccgtggccgcctccccgactactccaactcttctctccctatcacttaacaaaccacaagctttagtgtcctcttgctaacaattcctgaagggacctccacgcgccctggagactctatgggaaggggccgccactagaaagggtcagcccatgtgagttcagcctccctttatttctgaagtgcagcctgacaaataacaacaccttatttttcaaacttatgtgagcgtggcagggtgagggttcctaagaaatgaggagtggggagtgcaggtgcagcctgggcccctccccagggcaagcagtgctgagcaacgcggctgtggcttccctgacaatcaggagcttagtttcctgagcagacaccgcacgtggcactcggcacatattatctcaatgaatcctcacaatagccattatcattagctcctcccagtgaggactctggagctcggccaagcaccttgcctagggttgaactcgacacagagcctgtgctgtcatctgacccttactgaagggaagtgttttgatgtccaggtttccacaagctgtctgtcttctgccaggttttctaggaacagagctagcccccggatgtgggtgcaggagactgtggagctgtgccctcaggagaccgggagtgagggaggcagaccggggcggggtggggtggggtgggacccaggtccagaagtggctcagctgcagtctctctgggagcaggaatcacacccgtgggaccagctttggcacctttgcactcagggtgcatgcaaccgcccaggtgagaaaggggcagccgcgggcctcaccagccagtgccccagcagctgggcaaaggtgctctggccctgagaggtggaggcaccacggccccactccactccttaaggctgtgcttggagcaagtcctcctcacctttttggggaatggggccaaaacccagcagaatgtcctcaaattaggaaaggccgtcctctggtgtctattggggcttgctgtgggcagaaacccggctggggtagggaggtgggggtccctgagggaagctatrgggggcaggagaggctatgcctgcttcattatctagccactacccccagagctgcatgcccaggttcctgggcctgtcccctgccccattaaccagcttctctttctccaactgcagcacctacatcccggttcctgcaaagatcagagtgaaacaggataaggtgagtggaggccccggcccctctgttctaagttcaggcttcctcatctaaggctctgctctaaggtacggcattgagttgcaagacagcccccagatccccaggccgctggaggtagcatctcccacttagctatccccctgggggaagaggtcaaacactgggagagattctcaaagtggggtcccccgggccagcagcatcacccgggagtttgtcacagatggacatcctcaggcccatctcgaacctactgaatcagaaaccctggctgccccgcattctggttttaacacattctccggggacccctgtgcttgctgcggtttgtgaattactctcaaagccaggctgcacctcctgcttctccatctctttccatgtctccatcttccccagcaggcccctggcatggggctggccaagagatgggcaaagggcagaagaaggagggaagtgaggtacccaccacactggccttttgcatactctrtcaaacttagataggctcggagaggtcaggaaacttgcccagagacacacagctagttctggataaggctagaattgaagactcccygtgcctccagcatcttgccctttgcattgggttgtgctgcctcagggaagaagccacttatgtgtctctatagggtggggttggtggaagggacagcctcctagagatggtaggaggccacactgagaggtgaatggtttaccagagacccacagaatccacccttccagtccattcctaggggctggagtttggctttctggacgtgcacgccctctcctgcctgagaattccctttcgttgtgctcaaggcaggctttgggtggtggaatcaaggccaggcctgatatcggcctcctcccagctcagccactgctggctgtgtgacattgggcagatcacttagcctctctgggcttcagttttcttatctgcagcatgaggagagggaaacctgggacatgaggtcattttaaggattggcgatgattccagccatcatcaggtggcttggtgcatatgtcttcactcactgacagtgtcyagtcccacctcacactgttccctggagcccccttctcctgagcagcctcccatctcactccctggcctccttggatttttctgtgtgtcagctcagtgatcctcctcacacggtcctgtagggccctcctctgcatcattgctctccatagcacttattagctcagcacctctgtctcttagtgatgtggatgagtgtccatctttcctacgagcatggaagcccacaagtgcaggcgtatctattaggctcatggctgtgcctccatggccacaacagtatgtacatytgacaggcgctccatgtcctttgccccccagaactcactaagggccrtgtcttcccatccccgcagatcctgatctaccacccagccttcatcaagtatgtctttgacaactggctgcaagggcaygggcgatacccatctaccggcatcctctcrgtcatcttctcaatgcatgtctgcgatgaggtatgccaccctccccctgcccacagggctgcctcgaagctcaccgtcctgtgttcccaagagaggccagggagggggagggcaggtagacctagcctgcctcttccggaagctcggattccctgtctctacgacaggacttgcaacatgtgtctcccagggtgttttagtgagtaacagtgctctatgagaaagttctcrggagcaatagttctggcacattctgtgtaagtgcccaggaccgtggtggtggaagctcggatctcgcagcagattccggatacagaagcggattctcatagcgagagttgtctaaggccacagttctcaatcccacttgctccttagaatcatctgtgggtctaagttccagcacccaagccacaccttggcccaattttaccagaattaatgggagccaggtacccaggggttccactgtctaccgaggttgagaacccgtgatctcgagaagcatgcatttgccttcccrtgtccttcgctgtccgctaggctgtgttcgggtttccacttatgctctgagaggtttgctgccaccccaggaagaggggcaggagggcaggccacacagcccccacttcctccctgatgttgggttcaggcagggccctcacgtgtcccttcttgtctcattcagcccagccccagccccaccctgcctggtgcctggtgggaatctcagaaagggtcagaggcattgcaaggcaggtccccaggctcagccccaccctggtgttcccaggtagaaacatgggtgcccctgtcatttccccaccccacccacctccagccagctggtcccagacccttgcttgaggttctgctcaagagccctttctcccrtcgtcccaccgatttggccctaacgttcttgccctggagcaggcccatgtccatgttgcatttcctgagaaagccacatgtggcatggtgctgtccccgtcccctctttgtccccacccctccaatctatcttccacgctgcagcccagatagcacgtcctctccctggaagcccctccatgcaattccttctggtcatcttgtactcattttccaagacccaactcacatgccacctcctctgaagagcttcctctgacctctcagggcatagctcctccctcctctgtgctgcgggagccctgaatttagccccatttccaacaaggaccactcagtcagtgactccaagaagctataagctccaaggctgcttccccctgcagctgcccagctggcatctgatcaagctctgcctgaacttcagtacagccagcagggtgctgggctcagaataaatgcacagggtttgtcatgtatgtgaaaggcctggtctagtggccctgagggcgcctggaccagatgaatgttggccacagagaagaaagggatcagccctgccctctgcctcactgcaatcatgattcttggacccattttccagatgaggaaagtgaggctcaaagaagtgacttcacatgcccagggcaccacggagtggcagagctgggatttggggcagtttgcttggccccaaagccctgctctccttccactctcttccattccacgccctccttcctattccttccctctgtagctcctcaatcctgggagaataggttgcacttgctgcagaggtaagacccgggcccctgagaccacccagatgcagtaatctctcagggtgcttctggaattagacttgagttttacttaacttgcatttgcttcaccaagactctgagagttccaggaacgtagagaagggtttttaatgaagggttagtcagagtccttggaaatgctgtttatggtcctgtgggattccaggaacgcctacaggcttcctttctcagaggtgccaccagcagccctgctgtctggttctcatctttgctttgctcccacaggtggacttgtacggcttcggggcagacagcaaagggaactggcaccactactgggagaacaacccatccgcgggggcttttcgcaagacgggggtgcacgatgcagactttgagtctaacgtgacggccaccttggcctccatcaataaaatccggatcttcaaggggagatgacgcagtgaagggctgaggatggacgcactgtcacacctctgcatttccagccccagcatcttgctggagccgttccatcccggagcttggaggggcagcctcaggtgtgtgcctgggcaccgctcacagcctcttgcacccagccgttggcagcatctactcagcaaggtcactaagctctgccagcgtggcagagcatgtcttggaacctgtcttgagtggggacaacgtccccccactgctgccctagagctggggagacgctgggaaaggttcaacctccacacactaaaatcattttggctcctggggcaagcttggggaatgaatgtggaagatgcctatattctgagagacaggacagtttcccaggaagatgggcagagacttgagtggcgattacctccagcacagagacgtgccaggcggtgttggcgctcggggcgagatgctgcccttctttgcacgaagcctggcctcttgcttggcgtgataaccctgtcatcttcccaaagctcatttatgagccaccagaggctcctaccccaaagattttcacagaaacttgaggccaggtgccrtggctcacacctgtaatctgaacactttgggaggccgaggcgggaggatcacttgagcccaggagttcaagaccagcctgggcaacatagtgagactcctgtctctacaaaaataaaagatttaaaaaaattagccaggcacggtggcacacacttgtagccccagctactagggaggctgaggagggaggatctcttgtgcctaggagttcgaggctgcagtgggctgtgatcacaccactgcactccagcctgggcaacagagtgagaccctgtctctgaaaaaaaaaaaaaaagaaaagaaaaaaaaccccaaacttggcaccgtgtttctgactcctgcagatgcctcttcccaagcagttgttcctttgagtagtcagtctcatggttctaatcgtggcgagagcggatctgaccacttccatgtgcctttgtatttgggaaagaaaagcatgcattggctgaaatgaaacaaaagcccttacttgggaaaagggacccccaccagcggccctgcttgctccgtagctgggaacatcttttctggtttcctgagccagcacctgaattgcaacgaagctctgaggatactcaacaccacccagcagtgcgtcagaatggaacgtacattctcattctcagactgttcaatatggtgcccgtaacctccaaagccacacaggaggctgccagcagcattttccccaagggcctgagctcagggtcaagtccctgctggccatcttggggctgtcactgggggtctgggtcaaggacatcccaggaatggtaactgccacatacctcatcttcttactccccagctactctcttttcctcattagccttcctgattatttattgatttcttttttttattcaactgacattgtttgcaccctggctctgttggtggtcctggtgttttaatgaagcttgcctcacccagtagctgggaaattaggtgggggtgcttaagggaggtttgtaggagtcctcggacgtgggatattgggggtatctagggcttggatggtttgtggaatgtcctcagcatcctcccgtcccaacccaaccttccttcttcctcattgtggacttggatttattctcaggctaggagtctccaaaactccgtgaaaccttattgctgctgggtgtggagtggagagtgacaggaatgtgggggacggtgattgttggctccagttactaatgtttaagcagaaaaaccactttcttgttgaaaatatccctgaaaaggtcgctgctgctttgaggaggcgtgactttttcctggtggagtgtgacggaggcatggggcctgtgctcccaggctcgggggagccccctctgcacacggggagggaggaacttggggacatcagtcatgggtcacaggtggcttcaggccattcacaagagtccccggaagttgcgtgccaagtttggttttttccctgaatctctgcatatgagcatttttctggagaaaggaccatagcttttattagattctcaaaggttcagaatggggaatgtgttaaacaaaccgaaaacctgtttcagctttaaaatcctccaaaactttaaagacttttcttttttctgagaaaggctggtaaatcactgagtcatcattcagaacatacagcctcgaagggcagagctcacacccatatatgacgttaagagctcaacaaatgtttgttgagtgactgagtgaccccaggggcagactccagatcatcagacactgatacagagagcgatgctatctcctcaactctccctcttctcctaaaagctgagtctatatagggatgacaggctcaggctgagcagtcgacttctctgggttttgctgtgtaagaataggtccctcaacatgaagatgtgtctgcgtctgagccagatgctgcctgggtcggttgcctggcctccgtctggtctccctccctcctactagggtggtcaagctgtgagatctcttccagcctccaaatccagctttcccattttactgatgagaaaatcaaggccacattgcagctgggtggggagtggagcgtgacaggcacgggagaggacagcgattgttgactctagttcctgatgtttaatcagaaaaaccacttttcctgtagagcacatttcctaaaaggctgctgctgtgtagggaggtgtggccttttcctggtgcagtgtgaaggasggaagtgacgggcagtcgtgaactgtctgggacagatagcacaagtcagagtttgagcaaaactagggtgttaccggcgctatgttgaaattgtctggaggcgggctttcccagcgagtctccattcagcatctggaaaaagtgtaaccagaatggaggtgtctgactctcctgtgctctctcagcgccgagctctagctgcaggctgcctgggtggccttctcacaccctcccgtgcaggagactgcatttctctttcccacagcccagcagatagctcattggcttagcaatgggcacttaacagaatccagttgttgcagccagaattaaatgcaccagtctggcttaaaccaactggaactcatccctggggtgaaggtggctgggaattagacaagagtgtgtgttagccaaaaggcacatgcatgctgtcagcaggagaatgaggagcactggttctgggcaggcagtggcaggggctccctcaggcccctgattcccagcccacagctctttctactctgcagacagagttccttggagactggccctgcattcaggcagggagcagaggggtccctgcctgcagcacccagagctgaacctgaagctacaaagatgggctgatgaggtggcccatgaggtgtcagcaacatcccaaccccctgggtctccccagtgagtcagggcactgatttgctatagctggagctacatgcacctctcctcccctcagccaccttttaggggagaaaggagggcagatttgtaacctctggttctctgcagggatcctgggctggaagaaagttcataaatggatgaatgccttttaaaactccagcttttccaagcatcattcaccaaagcatttggttaggcttagagagaaaagctggatatgagaaaatagaatgtaaaataggagggaaaaaaaaaagaaggtggagagggcagttaagatctgggtgattctttagggaaacggctggttgagaggctttgatggaatcccattctctgctgtggccagaaggtggtgctagaggccagtcccacttggatgtgaccctggcctctgccaggattcaaaccacaaagaacatttggaactggratgtttgctttgaagcagccygaaaacaagtgaaaggaaaccaagataactctctctccctccgctggcaaggatcaaaaataccttgtgcagggaagcccgagcctcgaggggccactgcccagctaaagatgactggacaccagccatgcaccatcaggaaccagcacctgtcctcacccctgagaagagccccgggggtatcattatatccatcgcagacatctggtttgcagcaaatgtggctacacgccatcaggattatcctgccctgtggactgggctagctagttttgagatagagtcaacctccccatttttgtttgtcatgaaaacaccagctcctgcacccctggggtgctacctgacacctgtgcaaagaaaaggaggaaaacttagaagaaaaggcagagacaggcaagacagcatctcacagcttgtcaggatcagggcattaccgactattttttcttaccaaaagagcactgaatttcctaggggaaggtgagccacctttacacctcctgtcctccctcccagcccgtcaagcgatcccatcacccagcctcatcactcagcttcttcctagtacaaaactgccatcggttgtacgtcctgagctgtgggacgtcagctttaaccctagcctgtctcagggcctcgccctccagccccccgccccttagggtgatcgtgggtttcttcccttcctcctgcacaatcgcttcccttcactgaattcccttcaaagccaaagtttcttgagcactttttcttgtgtgcagtcttgtgtgtttgggtgttggtgtttttaaatttgctttctattcccccctgcctctctccatgtcgttacgcagctgagcactggttgggatgcattcgaatgacttcagcaagatcctgctttcctcagcccccgctctgttttatttattgkttaatatttccaatgatccaaatcaaagtgaataaacaaagagctattttattgtttgggtgtgtttgttgcttttctacaagggtcatgcatttgcgcctccttcaacactccaactcagagggcctcctgggttggcgtcgccactaccgaatggccagaattcaggatacagaggagagccccagcgtaggccttggagaggcctcttctcaagcccaggagtcccattacctgccgtgtgactggcgagtcacctaagttctctgaacctcagctgcgtgtctcatgtattaaatgggcgcgacaacactggccttcagaggggatgtgggagtaaaaacaaaagcatctccagaggcccagtagacatgcaccacctgcttgaacgtttgctgagtgaattcaccttggccagggcctgattgggctgggctagtgtctgtcctcccccgacagagacgggcacacccagggatggacaagagtttggtccaaagttggcactaatctccctttaaaaaaaaaaaaaaacagattcagaaacccaatgttgcgagcctgtaagataaaattggtatacacagtaaccaggcctcccagtttgtatggcacacaatacctccatgggcgtgatctttaactcagaacagccctgcgggctgctgcatggctgagggcggaggtgggttcacagccaggcgcctctctccagtcccgggcctcctgtctgccctgccgcctccctgtcactctgtgcttagcaaagacgttgagttatttgagacactgtctatggggaccttctgagggcagcccccagaggaaggatggggcagagattcacacaggggctctggagccaggccgccctgggtcctacctattagctgtgtgagtccgagcaagttacttaacctcgctgcctaatctcctgatggataagtttggaatgatataatacctctatataaatacacatagaggataaaatgagttaacacacgcaaaaggcttacaacaacaaatgttagttattagtacatcagacacgggagaggagaaggagctgtgtgcaagactgaaatgaacagcaaggctctgtcggggagcccggtctgtttccctccccccatgcctctgtcctgctcctgccccctgccacgggccttcatgttgcccgtgtatctttaagttgtttcttcaactctagagttccctttcctccttgccctatcacttctctgtcctctccctacagggccctgccgtcatctggcgctaacacgcgctcccacccagccatccgttctataggagacacagcctcccccaaattcgctcctggttggcctcacatcacagctgcaatgtggaccagcggccacgaggtggtgctatgctgcagtcggccccgccgcccgcttttccaggccagctctgtagggctccagcgcctggccgccctgtcctgcacatcgcaccctggtctcaggctagagcccatggccagggaaagaaattgtcagggccctccttggacagccctgagggcctaaaggcattcctccaagacaccccggcacctgcctggaagctgggaccagagccaaggsccatctgcttctgcacccccccgacccctccccaaaatgcagatcctcccaggatttggcctgggaacgctgggaagtcctaggaataaccgcgaggctgctccaaacacatgcttggccgtcaacaaaaagcgaagggactaaaaagaagttcctaagtggaactttccgatttcctcttcgctttcccaggatatttaatgtgcacagggattgaaaggagagtgtggcgaccctgttgggtcattctctacattcagccatggctggtgtttcccacccatgccccctcgtttttcttttctttcttttcttttgtcgatggcccacagtgaccaggggtgaccctcagaggctgccactttgcccctgactgtgagtgagcac

SEQ ID NO: 95613 - DNA, 32996 bp, Homo sapiens
tatcctgcagagttttattacagcctacagaacctctctgtgagcagcaaaaacataggatacacaatacattttcagcctaggcaaacgaatgtaatcttaacgtctaaaatactgctaatgcattcatccacttggtattgttaccagggtcactcaaggatgccaagtcttgtgagatccttcccactaccttgtaaggacactggaagtgtttaaaggcttgaaaatcagctttcaggaatggaattgagaagcttaagaggctggccaattgacttaagttttctcaaacctaggatttattctctggcttagtcccccaatcttgccagatttgccttttttttcccccctaatcactccttggaaaatactgtttccacttacctcaaccattctgttttcaagacctgccccatccctatcctgatttgaggaagatggaagaatggagaaagggataaacaagcttctccatggactctggaaaataatttctggtactgttctagatagacaggctggttttggcaaagtcattttgatctgtccctagtgagagtgacagaggagtagtcatgggcttaagaggtgacaggcctggagattaaacatcctgctgtctccactataaactctctccaactacttttaaaatatacagttaatctccagaatgtcagacctggaaaggtcaatgtggactgtccagtcaaaaccattcacttcccaggaaatagaggcccaggatggccagccatttgcccaaagtcaaagagagagagccagggctaggcctagaaagcagctcttttcatgctgacacgcaaactctctattactcctgcacagaggcccagctccttacaactcaattctaacaaccctcagaagacgggaatcactacggccccatttcgcagacgaagaaaccaagacccacagagtttcaatgtcttgcccaaagccacagagggtcggggtcggtgctggttagaggaacacggtcccttgccgcccgtcctggggcctcaccctcgagaaggcggcaacggtggtgaaagatatagcaggcctggtctttgtacagcggatgctcgtgaagagggggcgagcggtagaaccttgggtccttgtagccgcggtcccagggcggaaagatcggccgcgccagccagggcacgaagtgcatcttccccgcaaaggtgatgggctccagtccagrgatctcgtacaccctatccaggggaggaggctccgacttccgcgtggagcgcacgccccactcatacgccccgcgtctcggggccccgaagcccccaaggccgagctgcccggagccagctagcgcccgccttgcgggcccggacgccaatgccataccgatctgatagcctcaagacctccacctggaccccgccatgttgccgcgcgcagggcctgctgggaacgaatgagaccgggcgccaaagctcgttttgggaatggcagccaattcaaccaatcacagtcaggatattcttgtcttgcaccggcccccaacccattctcattttcttataggtgatacctgctaagcgctccccgcctacccagagactgggaggaacctggaaaatcctcacgtgaggtgaagcgcaggcgagtaggtgagtggtcgtggtgggtggagaatcgctccaggacttcagacctggacttagacaaggttgactgcttatgagcagttggagcttgggaaggcacttccctttctgaggcccagtgtccctcgctgtaaaaatagggatagaaatgcctaagctgttgcacctgtacagcgcgctgctgcgagcgcctctgtcgctctgtccctctcctgagcgtgagagtgtcccccaagccagctctgagcgtgactgctcactgtacacctcttccccagcgccaaaagcgagccactttcctcgcttttcctttccctctggatttcccaattcgcctcctagaagcaaggacagagcaatgaagatgcgcctttgctccttgctcaacacctgtctgtcagctgcctgctgtgtgtcaggcgctgcgctgagccccggttggcattggtaaataagacagatgggagatgtagagcttacagtttagtgggagatgcagacagaacgcaggtaaacaacgcgaacaagtaagtcaactgcgatacacacacttcctatcccttttccgtagttatttttctctttagcatttcacactaccgtaccatctgttttccatcctgatcttgcttaataactgtttctcaccctaagatatgagctcagtgagtgcaagggtttctgtttcttcactgctatatccccagcactgagaacagtgcctggcacatagtaaatatgtttagtgaatgcgtgtataacagaaacaaatagagtgccttatagagaatgagtaggggaaggttcagggaggacctcagaagggaggtgacctttaaaaccaaggcctgcggggtgggaaaagtcatccagcctgaggcaacatgtgtcaaggcctggattaaaggtggtgcctcttgaactgaaaagatagagctcagaggacgcatgaaccaactctttaaaattcatgactgacgtggccaacttttctgctaatttccaaaatagcagagaaagtgggactgttaaaacgtggagaagtcctacagtcatcgttcacacctgtaatcccaacactttgggagacctaggtgggaggggccacttgaggccaggagtttgagatcagcctgggcaacatggtgagacctcctctctaaaaataataaaaaaaaaattagcgaggcgtgatggcacgcacctatagatctaggtactcaggaggctgagatgggaggatcacttgggcctcggagatcgagtctgcagtgagctgtgatcctaccactgcactccaacctgggcaacacagcaagaccctgtctcaaaaaaaaaaaaaaaaaaaaggccgggcatggtggctcacgcctataatcccagcactttgggaggccgaggcaggtggatcacgaggtcaggagatcagaccatcctggctaacacagtgaaaccccgtctctactaaaaatacaaaaaattagctgggcgtggtggcgggcgcctgtagtcccagctactcgggaggctgaggcaagagaatgatgtgaacccgggaggcagagctggcagtgagctgagattgcgccactgcactccagcctgggcaacagagcgagactcttgtctcaaaaaaaaaaaaaagaaagaaagaaaagaaatcagcataaagagggaaccagacctcattcactcataatgcatacctggtccatagcatgcaataaaaatgaattgggttgatctaacaccttgtagtctatgaggctctgtgaaggtaggaacaatgacctgtttacctctgttgcctcccaacacctagctcccagattgtatctgtaaactgaatgagcagtcatagggaaccttccatatgcccggctgtgcttggtggtagaatacagaaagaataagataccacccttttttttttttttttacagagtctcactctgtcacccaggctggagtgcagtggcgcaatctcagctcactgcagcctccgcctcctgggttcacgccattctcctgcctcagcctcccgagtagctgggactacgggtgcccaccaccatgcccggctaatttttttgtttttgtatttttagcagagacggggtttcaccgtgttagccaggatggtcttgatctcctgacctcgtgatccacccaccttggcctcccaaagtgctgggattacaggaatgagccaccgcacccagccaaggcagaggagattcttaaatttaggaaaggggccagattgtccctaacaactgagagtgagaaaaccctagccagtcaaacagcctcactgaagtcggattagcatatatgctacatgtagacgtaggtagcaagaggaaaacaaactcacatctgactcatcagcaagccagccattgtgaacatgcatagatgcccttcacagaggtccccacaggaggacctgtctctactcaaaatataaaacctagccgggcattgtgttgggcgcctgttttcccagctacttgggtggctgaagcaggagaatcacttgagcccaggaggcagaggttgcagtgagtcaagatcatgctactgtactccaacctggcaacctgggcaacagagtgagactctgtctcaaaaaaaaaaaaaaaagaaaagaaaagaaaaagaaaagtgtttatgagcagcttttatgagcagggatggaccaagtgcatggagtgctcacaggagggagtgaagccaggcaggccttcacctgcacctgtttttctctcttcactgtccctccatctccagactcatatctagacttgtttaatccaactcacaactggattttgtacttggatgctccacaggcactcagcatacctgaaaccaaactctcttcttctttcccttaaaactcaacttcttcttgagccttctgtctacccaaaacccaagccagatccgaggggttggatgtcccttctacccctctgtccccccacactccctcacatctagtcagtctcagtgttctgttaatttcctcttcagtatttctctcattgacccctgtcttctcattctgcctgaagctgcaggtctcagtcctcatatcatctcacctggaccatcacaaccttcttctgtttcctgtgattgaagaacgatatgttttgaaaccagacatgccagagttaaaaccctggttgccaccattttagaagctgtatgaaactctgggcaaagctgaactgtagtggttaggattgcaaacaaaggtggcaaaactaggggaaaaaggamataattatcacctggggaagtgcagttatcaggaagggacacaggtggcttctggaatgctggcaagattctttttacttgactgagtagtagttacacaggtgttcttttgtatttttaattaattttttgtaattgagttgtaggtatatattttactttatcatttaaaacattttagggccagacatggtggctcatgcctgtaatctcagcactttgggagactgagatgagaagatcacttgaggccaggagttcgagaccagactggcaacatagtgagaccctgtctctacaaaatgtaagtaaaaaaaattagccaggtatggtggtgcacacctgtagtctcagctactcgggagactgaggcaggaggattgcttgagcccaggaggttgaggctgcagtgagctgtgatcatgccactgctctccagcctgggcaacagagtgagacctcatctcagcaaaacaaaacaaaacaaaaaatatcttttaaaattcaatgagacttttctgtataaagtgtcagctggcactcagagcacaggaacagatcaggaaaccttggttaccagctctgattgttatgtcctttcttccatatgccaagctatgcttggtgatagaatacaaaaggaataagacaccctcctgtgctcaagggggtcccaccctgctaaaccttcctgaagtcatagagcttatgagtagtagaaccaggtttcctgaagccaaaccctttcctctagtaaagaaagattcacttcacacgagggattgtccttctaaaaccaatgatagtaagtggttaatgctccccaccagacagcacactccttggctgatccatctccatccccagtgcttgcacagagcctggcacctgcaggctttggagaatgtgaggaatagaggagaccagagaataacccccatgttttccctctcccaggctggccaaggagcagggcctgcgcccgtggtctcatagagcctggcctgttctggaagagcacscagttgttccttctaggctgcccaagccccactgatgatggctgagagggaagaggacgacracactgaggaagcctggatgcagctacggcccacagaacccttgccttcccagtgctgcggcagtggctgctcaccctgtgtgtttgacctctatcaccgagatctggcaargtgggaggcagcccaagccagcaaggacaggagcctgctgcgtgggccagagtcacaggtgagagaggctgcttmtcratatgagcaccagggcaacaatctacttgccttggccctgcaaagcacacctctaggaagccttccctgactgtacagcagaagaaaagagtatgcataacagaagcaaacagatctaggctcaaagcccagccctgaagcaaacttattagcagctgtgtgatttgaggcagagtttaagccttagtttccccatctgtaaaatgaggctcaatgtttgtgatgtgtagcacagagcttgacatccatttcacttaactatatttattgagtacctattatataccaggccctgtgaaatagtgaggatttgagagtgagcatgacagacacagtccttgtccttatggactaaactagctatagtttattctaggtaaataaaggatgttagggctgatatttcttcttctctggcccttactgacttcttcctccttaactcctccgggacttcatagtctggactaagcagtttagccctttattgtaatgtttggaagggttcacagttatagatgtcagaacactggacttcaccccctgtataacacagrtagggaaactgaggacctattccttctgacactgtgcataggttttgttttgaatctgtccctgtcttggtctcccgcatctgaacagtcttcccattttctgtgtccctcctgactaatgtggagtagaggtgtctcccatttctacctctctcaatgccatctggcatcgtaatcacttttttttttcttttttgtagagatggaatcttgctatgttgccagggctggtctcgaactcttggtctcaagtgatcctcccgcctcagcctcccaaagagatgggattacaggcgtaagccaccttgcctggccatcatcactttttgaccaaccattccccattcttgtggctcaaactagaccaaagcttagtcatttttacacgtgttgttcttaagctatagatcatacatcctgaacaaatgcagttgtttttcttatcttttcttttcctttctttttttttttgagatggagttttgctcttgttgcccaggctggggtgcagtggcgctatcttggttcactgcaacctccgcctcccaggttcaagcgattctcctgcctcagccttccaagtagctgggattacaggcatgtgccaccacacctgactaattttatgtttttagtacagatggggtttcaccatgttggccaggctggtcttgaactcctgaacttaggtgatccacctgcctcagcctcccaaagtactgggattagaggcgtgagccaccacacctggccttgcagttgtttctctgaaccccaaaacaacatgacwttattattattattattatyatyattattattattattattattattgaggcagagtctcacttattattattattattattgaggcagagtctcactccatcacccaggctggagtacagtggcatgatctcagctcactgaaacctctgcctcccaagttcaagcaattctcctgcctcagcctcctgagtacctgggattacaggcacctaccaccacgcccggctaatttttttttgcatttttagcagagacagggttttaccacgttggtctcgaactcctgacctcaactgatccacctgcctcagcctctcaaagtagtgggattataggtgtgagccactgtacctggccatatttttgctttttataaagatagagatggggtcttgcaatattgcccaggctgggctcaaactcctgggcttaagcaaacctcccctcttggcctcccaaagtgcttgctgggattacaggcatgcatgactttatatttagtgtctccttgtatttctgccactggaagttggtgatggggactagagtgctctggcttctgccagtgactggggaatgttcgtgacaacctctgtttctttcttctcactgccctccatctccacatggctcaccccttcacttctttctgatctctgcccaaatttcatttctcttcctaactcaggactaccagacaccatctagatgtactcttatgtgtatatcgtccatcttcttgccaaaatatcagttctggaagagaaggggcctctgtctttctcactgttctatcctcagcaccttgagtagttcctggcattacagttggcactcattaaatatttgcagatgaatgaatgtgtttctccaagatctactaagtaccatatcctgtgtgctaggcacaaggaggttggtaataaagatgccagggtaccagtgctgaaaaaactcagcttacagaagggggataaagaatcacagggttacttggccaggcacggtggcttatgcctgtaatcccagcactttgggaggccaaggcaggtggatcacctaagctcaggagttcaagaccagcctggccaacatggtgaaaccctgtctctactacaaatataaaaattagccagacgtggtggcacgcacctgtagtcccagctacttgggaggctgaggcatgagaattgtttgaaccaggaggtggaggttgcattgagcccaaattgtaccactgcacttcagcctgggcgacasagcaacactctgtctcaaaaaaaaaaaaagaaacacagggtagtgatagaaagactcactaaggaactgaggcccggttctgccagttaattgtatgatgttgggcatgtcattttagtgtgctaaacctcagttttctcatctgaaaaactgggatgttaatactttataggttgttatgagaatttcatgggatgaatatgtaaagcacctggcacatggtagatgctcagtaaatagtagctgtcatcacctattataacactggaaatttaaatgataccacatttaaagttgcaaacagaggtccagcgtggtgcctcacacctgtaatcccagcactttgagaggccaaagtgggcggatcacctgaggtcaggagttcaagaccagcctggccaacatggtgaaaccacatcactactaaaagtacaaaaattagctgggtgtggtggcacatgtctgtgatcccagttacctgggaggctgaggcacgagaatcacttgaatccgggaggcagagattgtagtgagccgagatcacaccactgcactccagcctgggcaacagagcgagactctatctcaaaaaaaaaaaaaaaaaaaatttgcaaacagatggatgcaaacaaacacattttgtcagtcctataaaatagcatattccaatttttttaacttttaatgaagcaataataataggaaaagattttacatttccatggtaacttatattttataaaatgctttttacattgtatctcatctgaccctcatggtaaccctataaagttatcagggatgagtggccctttttatagactaggaaactgagacccagaggatcaattgatatgctgaaggccccacagggaggcagcagctgagctggggctaaacccagttctcccgactcccagtccagtgttctttccaaagcaccaggcagttgtgccagagagtacccaggtactctggctgatgatgaagaggtcatcctggatggtgggtgtgggaaggggcacagtggagacaaggccttgaatgccaagcccaagaatttctgtcagctcagtgatactgtcagcactaccatgggtaactggggttccagagttggtgctgcaggatggtgcaggccctaagctgggattgaggggtcccaggagtaaatggagtattttacaggaaagaaagatctgtgagtcacagcattcagagaaggcttcctggaggagatgcaggttggggtggaatgttaaaggcagtgggctgagactkagacatgaatttgaatttttgtctacagtgtgattgtggacaagtaagccagcatgactcaactcaggcctcagtttccacatatgtaatacacagatattgggttagacattctgaggtcccatcaacttataaattatgcaaatctggattttagcagctttgaagaatgggtatgtcttttacacattggagatgaatgttctggataagagggcactgcttgagcaaataaagactcagaagtaggaggcagcagggtgttcttgggaggacaaagaaaagtctggcattagatgcctgggagataaaatgaggcatgagggtcgtccacagggcctttgagtgggcagctaaggaaggagcccgcattttaccctggagctgaggggagccatggaaggcttaagagcaggataggctcaaaggaaagcgctctggcattcttagatccaattttgaaagggaagtaaggtgaggctagtgtccagtttacaggaaacttcccgagccaagacagcctctccttsgggacagtgggaaggatgctatggatgcctgtgtgtctgtggagccccggcctctagctgttggatctcttcctgttgcagagctgcccctccaagctgaacccagagaccttcgtggccttctgcatcattgccatggacaggctcactaaggacacctaccgtgtccggtttgctctayccgggaacagccagcttggcctgcggcccggccagcacctcatcctacggtacactcaggtagcgggaggaccaaagcttcacagccctgctttgctatttgctagctgctggccttgaccaactagcgtactctcccttaagcctccatttgtcatcttcaagatagacatagtgacacatgactcagagagttcttgggattgaactagataatgcattttcataataaataataacacaatcactttaatagcatttactatccaaggcacagttctgggtgcttataggcatgaaatcatttaaccctcacaaaatcctgtgtggtaggtgcagttataccccagaggaaattgaagtaagagaggtccagaaacttgccaaggtcacacagttaggaaatgttggagccaggatttgaaggcaagcaatgtggctttagagcttgtggtatgaacctaatatgattagtaccaattgatagaattgagaataaagggcttgcccagcactacatagctaataagtcacggagccaggatttaaacccagacagcctggctcctgagttatgctctttaccactcctctgaggttcctacttcctcccagcctacttaggcactctactcccaccccagtccccacccctgcctgcccagagacaagaccctttgggatgtccaggtagagttgtctgccaggctgttggctctgtgaatctgaggctcagtagagagatctgagctgcaggcatgggtttgggagtcattggcacatagctgagtggcatttgggaaaatgtgtgcatggaaagagaaaggcgcacaggaccaaaccctggaaacaccagcatctacggtattggcaagaggaggaggagccagcaaaggaagcaaggtgcagccagaggagaaggtggaaaccagaagagcactcactgctgctcagactctggccacttgcttcacactggcccctggtgtttgtgcccagctccttctggcctgtgacctggccagcagtcctagaagttcactatcccagtgggcaggaggggccacagggcaggtcatggccccaggcatccttccatccatgaaccagaatgctcagaactccctgcctccaggctggctcccctccttcaccctctctgtccctgcggtgacatccctaacacacatatctgaccatgtcactgtggggtgcagcatggaggcaatgtagcaccccagaaggtatctgaggtaccacatcgcctccgtaatgatgtcctaacccaaggccccagcttgctttcccaccatgttcttctccctttgccaacccacccctgccctggtctcagcctcctgctccacgccccattcccaccacccttcctgtcccgatttgcccttgtcagtggctggcctatcctgcagcacccacctccaggaggtttcctaggctcccagaggagactgcgcactccctctaaaacataccagttttacctctgttgcagcagacgtcatagtgctctgcagccaagccatgctctgtgctctgttccttaggtccccatttgtttcatatgcatttatttatttatttatttatttatattttttgagacagagtctcactctgtcacccaggttggagtgcagtggcatgatctcagctcactgcaacctccgcctcccaggttcaagtgattctcctgcctcagtctcccaagtaactgggactacaggcatgcaccaccatgcccagctaatttttgtatatttagtagagatggggtttcaccatgttgaccaggatggtctcgatctcttgacctcgtgatccgcccactttggcctcccagagtgctgggattatagacgtgagccaccacgcccagcctcatatgcatttattaaatatttctgtccagccctctcatgcttttggtgcattgagacagggccttatttaatctttgcatacctcagagaagaaagttttgtacgtagtaggacttgagagaagactgcttagggaagcttctgggaagctctgaagaacagtggtgaggaacccagctctgaagttagagctgtgattgaatttgagctgtgcaagtgacttcccttctctaagcactggattcctcatttggattgttgtttgagttaaatgagataatgcatatgaaatgcttgatacatgtatgcatttaatacaccatggctattactgtgactcatggtggttatcctgaccctgtttttggtaacatggagaggattcatgcatgagacagggctttagaccagggccctttgaggatccttccagtcctaatgcttmtgtcaggtgctagtaagtgtttaataaatgttagcagttgttttagtctttatcactctgtggtcgggaagaggtcaggaaaaatgacagtcatgtctccaaaacaactcacatcctcagtgcactttttgaaacactctcccatctgtagtcccagaggagccacacaactggaatgcagatagctgtccccattttacaaaaggggccacggggcatgagatgatctactgggatctcacagccagcacgtggcagtggatgagcccagtactcttttttttctgttgcatcttgcctgcctctcagtgaggacctttattttcaccagcctggcagaggagttacctcataaggatttgcagttgtttgtttgtttgagacagagtcttgctctatttgcccaggctggagtgcagtagcatgatctcagctcactgaaacctccacctcccgggttcaagtgattcatgtgactcagcctcccaggtagctgagactacaggcgtgagccaccacacccagctaaatttttgtacttttagtagtgacgggtttcactatgttgtccaggctggtctcaaactcctgacctcaagtgatcagcccacctcggcctcccaaagtgtggggattacagacatgagccaccgtgcccagccttaaaagggtttgctgaatgactggctgactgactgcacacttctgtttctcagagggatagtagatgacttagaaattcagagagcctatacgcccatcagccctgccaacgcagaaggatactttgaagtgttaattaaggtgagttgacccttgaggatgctccaagatgccrtggagaagctatgggtctaagaatggagagctaaagggaaaatgtgggaaggaaactcagtgctgggaacaacatggacaaaggcaattggggaagtaagtcctttgtcctggaacagaaggaaggagtgccaagggagcaggatgcaatctgagaggattaggcaagaggtaggacakggaggagcttatagacaggactaacctaacatcacctcttaggggaggtgggcagaaccggggcatttgagttggaccttgaagaaggagtacaaattggcagtggccgtaaatggcattctaggctgaggggatggttaaccaaaggttgggaggggtgaaatagaacaagtcttctaggaactatacccagcctgagagccaggaggagagggtgctggtggagaaggcagggtggatggaggaattggcagatatgagatgaacaaagtaggttggatgcaaaacaccctggagaccmaaggaataggaaacaaatatataagaagttgtggaggcccaattatgtggaaagaataattaggttgagctacatgaaattgctgatattctaacttttttgacttaaagaaacatcagcttcatgtgggtcaacctaatacacagctctagatcatcatttcccaaatggaatcattacgaatatttaagaatagtgttcacatccttaatctatgttataagacatgacttattatctatattgcattgataagtaaacggagtcccccagaggtcccaaggccccacagctagtaagaagtgctgctagtaggtgagtcctgccccctgacaccgagacctcagcactgcctccagctcccgccttcctacctgccgtctgagcccgagtgtttattcctccacacataagcttggatgggatcccttcttcatgcaactgtttgtctgggagattccacaaatcctctccaaatggcctgcttccccaggctgcttgtcggggtgtgtttctgtggaaaggataagcctggagacagttcttcagggcagctggatctctcccagctgcaaggctgattttctccttcgtttgctagaaagcctctctttagagagatgcttaattatctctaagccactggctaggaaaagccagaaatgtctttgcaaattgggaaggcaggcagggcttatcgtttgaccctcccaagtagaagggaaggagaagctcccatttctcagacaccttctgggcaccaggtactgcctctgtctctttattctaattatctcatttcaacctcataaccaacctatagagtaggtcatattattcccattttacagatgaagaaactgaagctcaaaaagatgacatcatttgtctcaaggcctcttgggtaatatgatccaaatggaaggacaaaagttcagtgtcagttctgtttaacaagtatgtattaaacatttactctgtgccaggctctgtgtgggtatgtattagtccgttttcacgctgctgataaggacatacctgagaatgggcaatttatgaaagaaaggggtttaatggactcacagttccacatggctggggaggcctcacaatcatggcagaaggtgaaaggcatatctcacatggcggcagacaagaagagagcttgtgcggggaaactcttctttgtaaaaccatcagatctcatgagacttattcactatcacaagaacagcatgggaaagacctgcccccatgattcatttacctcccactgggtccctcccacaacacatgggaattcaagatgagatttgggtggggacacagccaaaccatatcagggtactaaagacaacatggaagaatccttcccttcttcttgggtgctgtcaaggccacagctggggtcatgcctccccctagayaggggccagaaaacaaagcgtgcatrgagacagcctccagcaaggcaggagaaaaacctcacctttcctwctagaccccttccagttgagccagggacttccgttgccttgtgcaggtggtgcccaaggaagtcagggatgatatcagagatggccatgggtgcttaaaaacaggtctggggaccaaagccctttctctgtgttaagcctggctataatcttactccaaacacccttccagtcctgtctcccagtgcttcgccctcaccctcaccctaccatgttcacttgctattcccaaaacatgacccagattgtcctacccctgaccatactacacctgatgtccagagtcctctctgcacccctgctcccatccccagtgaattccatcttgcccatctttcaaggtccaactcaaatgcttcctcccccaggaagccatcctcgatcccatccatggaagtggctgcagccttctcaggtttattcctagtttattcttctcatgggtattagatggtctctaccttgtatatgtctgagacttaggtcccttctagattgtaagctccttaaggggagagcctgaatctggattgattgattgattcattcattcaggtatttattaagttacttccatggttcaggcactggctgccttcatggagcttaagatctagctgtcttgcctgcatcctcaacatggtgcctggcacagagtggacaggcacccaggcaatatagactcccttctccatggaggaatcacttctgtaaccttcatttttcatccagccaggagatggtgtaggataatgcagagactgcagatgggtggcctgaatctagcccatagatgtatttggtattggccagcatagagttttaaaattttgaattaattgcagacatttcaaaaatgggagattttaaataaaaatatggatttcgtgcctcttttggaaaatcaatagatttggccaattaggccccacaaactatggactgaaacctgcaaactggcttccctccttagaaggagcactcgctcaccaatttatcatagtccccatcactccctattgtctccctgatgctgagactgtgtgttaattgccattaatcatcacccagttcttcactcatttatggtacctgcatggtccctgtgggcatttgggtttgggacctctatgctgaaggctttaggtcctatggattctcatcccagcctcctgtctgccttctgtgtaagcttctgggcctcatctgaaaattgggaatggctgtaccaactttgtaggataaggaggacgattaaatgagataacacatgtgaagcacttagcatacagaacgggctccacattaatggttaatctggtttgtgttggcagcatgtacctgtcccgctgacgtctccctgtgtttgcttccagtgctaccagatggggctgatgtcccggtatgttgagtcctggagagtaggagacacagctttctggcgaggacctttcggagatttcttctataaaccaaaccaggtcagtgccagcaccttaaatcttcaggagatccctgttgactgtggttttcatgtttcggcccatagcatctcactgtgccattctccttgagctcaaacacaatcccaggtgtatccttggggttggacatgggagaagatggaatagacacttatttatttatttatttatttatttatttagagacggagtttcgctcttgttgcccaggctggagtgcagtgacgcgatctcggctcaccgcaacctccacctcccaggttcaagcgattctcctgcctcagcctcccaagtagctgagattacaggcatgygccaccacacccggctaattttgtatttttagtagatacagggtttctccatgttggtcaggctggtcatgaactcccaacctcaggtgatctgcccgcctcagcctcccaaagtgctggggttacaggcgtgagccaccgcgcccagccagagtagacacttataaatgaaactgcctgcccagctccaaagctacccagggcggccattgcttagaacatcagacccttgtacttgacgtttaggagcccttatgccctctgaccctcaggcgcctttccaatttcacagtacagtcacatgactaaatatgccccatggcttcctgcttcctagctcagatggctcttctcctcatcatcctggcatttttaaacccttccccgactttcccagtaagaattcgtaatttctcatcagttggtgcatatctggaaagcattttgacagtatgtaccaagagtcttcaaatccttggccccagtaattccacttatggaagtccgtcctatagaatgaatcaaaatgctggctcttctgcgtatgttcattgcatctttatttataatagcagaaaattggaaacaaccgaatatccaacagcaggggaacagttaggtaaaccgggctacaggtacttgatagaataatatcctggattttaaagttctgtttataaatgatgttatatacttatgctgtaagatgaagtgacaaacactaggtacaaaactgaatatacaggaggttgggaaattaagttaaaatgcacagagaaaatatgaaaagaaaatgcaatgaaatgttagcagctctgggtggtgaaattatgggtgatttttattttcttcattatactttctaaatcatttgcagcgaacacctattactttatgattaggaaaacaaagcaaaatgaaaacaaatggaaaagaatgaatcatgccttcctctccattctttttgtttaatttttaaatagcttttgttggctgggcgcagtggctcacgcctgtaatcccagcactttgggaggccgaggcgggtggatcacctgaggtcaggagtttgagaccagcctggccaacatggcaaaatcctgtctctactaaaaatacaaaaaatactagccaggcatggtggcacacacctgtaatcccaaccacttgggaggccgaggcatgagaatcatttgaacccagaaggcagaggttgcaatgagctgagatcatgccgctgcactctggcctgggtggcagagagagactctgtttcaaaaaaaaaagcttttattgttttttttccttttataaatgcagtacatgttcattacccaaaaatcagcagatggaaagagacaaaaaaaaaagaaaagaaaaaacactcacaggcattctacccagacacacccatcttatggcttggtgtatatccttccaaatcctcttccacatgagtatatgtacaaatgcacactgcatgcacatgtgtagtatatatgtataataatatcaagcacgtgtagcacctcatgtgtgccaggctcagaccttagcacttgctatatggtaactcacatagtcttcacagcagctcttaggtgctacaaccccattctacagatatgtgctatgcatatgttaatactattccatagtattcttctagtactaaccatgcttagccttgcattttagaccctgcatcccccagatgcttgagagcagggaatggaaatcgtttgtgtttcctccttgtctagagtggataacagatgaacgttgtcttgaccgccttttctggtggagcctcccaatgccttgtggctgctccttcacatgcacggaatacttgaaaggccctgcatttatttcctaccttcctgccttcctgtcttcccgtcctccttccctccctgttgcccaagctggagtgctgtcatagctcactacagctccacctactgggctaaagcaatcttgctgcctcagcctcccaagtagctgggactacaggcgtgtatcaccacgcccagctaagttttgtatttttttgtagacacaggatttcaccatgttgcccaggctggtctcaaactccttggctcaagtgatcctcccacgtcagcctcccaaagtgctgggattataggcataagccaccgtgtccagctcctggatttcttagctagggaggctgtagggcctgatggtagggaaaaagaaatggtgtctcacaccttaatatgcggtcactgaaatttcagtaagccttggtttcaccacacgaggatgtctgggaagctcctgccctcttccgggccctgttttgctgctctgcagtcgtcttcgttacagatggatattacatcagccctgaagactgacatattagcatctgtctgtgcattcattcaacaaacagacacaagtgttcacccagggccaggggactctggggacctagagatgggtcagatgagtcccctgttctccagaagctcacagtctgctgggggagtcagacacacagacaggtgacagcagcacagtgtggccagtgtggttcagagggactcacagggagctgtggaaacacaaagaaaggagcctcccctgccctggcttgggaaaggccctccaaaggatagcccgagctaggatgggaggaggcagaggagcatggcaagctgaaggcctggaggctggagagagcacagacacagcaacagctgccaggcgtgagtctcagcagcttagggagggggaggaatctaattggatctgcaccaggcagttttcttttttgtttgttttgttttgttttgtttgagacagggtctcactcttgcccagctggagtgcagtggcatgatcatggttcactacagccccaacctcctgggctcaagcgatcctcctgtctcagtcttgagtagctgagattacacgcatgagccaccatacccagccaaccaagcacttttcttcatctcatttaatcctggtaacagttctgagataggtgctgttatggggaagtgcgtttcttttttttaccagtgaggacactgaggattatattggtgaaagagcttgcccagatcacatggttggggatttatacccagaggcctaatctctagaatgagggtggtaaatacccctgcatcactcaggtactaaactttaaggcactgaccttaaagagggtcacccctcttttttttttttttctttgagacggagtctcgcactgtcacccaggctggagtgcagtggcgcgatctcagctcactgcaagctccgcctcccaggatcacgccattctcctgcctcagcctcctgaatatctgggactacaggcgcaccccaccatgcctggctaattttttgtatttttagtagagatggggtttcaccgtgttagccaggatggctcgatctcctgacctcgtgaaccgcctgccttggcytcccaaggtgctgggattacagaggttcacccctctttaagaggcctagagcctggaaatagattcagtgaggaggagttgatggaactgggacctcctggggtgggaactcaccttttttttttttttttttagatggaatcttgctctgttgcccaggctggagtgcagtggcatgatctcgactcactgcaacctctgcctcccaggctcaagcaattcttctgcctcagcctcccaagtagctgggactacaggcgtgcaccaccacgcttggctaatttttgtatttttagtagagacggagttttgccacgttggtctcgaactcctgaccttaagtgatccgcccaccttggcctcccaaagtactaggtttataggtgtgagccaccactcctggccgggaactcacctttttcaagtgactcttttgtgccagtgctgtgctacatgcttatgcatattatttcatttagcctagagatgagcaagctcagaggtccaaggtgggcccttgagatctctgcagaggtaccctggggcagaggaagcagcccagagagcagggctggaatggcattgggagtgggcaaggctttgatgggagcaggtttcagctcaatgtaagttgtaaagacctccctggcaaaggatttggcctacagtagagcaaactgccttgggaagtaatgagccccctgtcagtagaagtatgtaagcagagttcttgtggggatgctttagtaggcaaccaggccacttacaggatgggctatgctgttatgttccctttcagtccccatatcccatcatctccattacccaaacctcacatgcctttcacaaacaaggacggctttctggaggaggtagagaggggacataggtggttggacaccaaggaagggcactgccgtccagttgaaggaagctcraggaaaagtcccatagtagaggggataaggtgagactctcccaacccacctgtcayacataccccttctgttccccagtatggtgagctcctcttgctggctgcgggcacgggcctggcccccatggtgcctatcctgcagagcatcacagacaatgagaatgacgagacttttgtcactctggtcggttgcttcaagacctttsagagcatctacctgaaaaccttcctccaagagcaggcccrtttctggaatgtccgtaccttctttgtactcagccaggtgagcccagggtggtgactttcttttttgattgagactctgctgtccctttgcacctgtcctgaggaccagctctagcctcttttggcaatggatgctgtggtcataatccctgccactggtggagcacccacctgtatggaaggcaggtgttctcatgttcattatacagatgaggagatgcacattcagtgggtgaagctgcccaccggctcacgctgctggacagggctgaggccaggatttgagcccagggctgtctggttgctgagctctggctctcaccccatgcgttactgcctcccatcgccctctggcatcatcagttacatgggcaggggcctggctgtagagggcagggcaggctgcagacctccctccaactgagtgatgttccttgaggtggagaccacatgtctgcctcagcactctctcttcagtgcttagcatgatgccaggcacagaacagggactccattagtgactgctggagtaaactgatctgagttccctgtgcttgctagtatcctcccacctcagcctgtccctccataggaggaccccgccgtagctggcagcgactctccctgctgacccctcctccctctgactccacatcccctcygctcactcaggtaacccttctggggccacccccataggttagagcatgggggattgtctgcccctcatctcaagccaggccctcagctacctttggtggcctgcctttccctggttggtagcttcacttttccctcctgtcccykctgggttgggattcctgctgggccccctgtgttccctggtgctcagggtcagccttcttgcccggtgctgtggggtaccattctcatctggtcccgctatgaggcagctttatgtagtccctaaacacttacttgatcctcaacattgtagctgggtgtggagggtgaggaaattggatttcccgtcccaatataagggtccctgggctccccaggggctgggttctgcaggcctgtccatggggcagaatgctcagtggcatgacatgagagcgtggtgaacatttatagcagcggaaagtgcccaaggaatgagaatggagccaaaggctagcgtgcagcccaaggggtgggcgcgagggatgggccactgttgcccagcagcatgggcagcctgcctgagagcctggacaaggatgctgggaggagggcaggaaggcagcacctggcagagggtccccaagctgctggccagccttgctttccctcctctgtcgcctgagaatgtggcaggtgtcagacacacaacagtgaaggtgacccactcccagccctccggctgctcacctatctatgggtgacagccacagagacggctgaaaaggactccccttcattcagcacattctctgtagccagcaccattctaagcactttatttaatttaatctccaccacaatcttatgaggcttatactcccatcatgctccttgtacagatgtggaaactgaggcacagaatggttaagaaccttgcccagggtaacacagcaagttagtggagagtggagtatgaacccaggaggtcctgttcaaaggctgtggtcttagtgctcctcagaataaggcagcacagcacaaggtgctgtgaggatgttcgggatgccagtggtgggtagaggccaggcagggtcagggatggctttaccaagcaggtggcatttccgttaaagttcaccagcaatagaagatttttagtccccagctgggccagggtggtgccagtggcctggggttgggcaagcgagtgggctggccatcagtggcaggtgaagggggtgactggtggctcctgcctgtrcacactctcttgactcagtgtgctctctcccctgcctgggccacagctgcagcatcctcaagagtctccccgtaccagccactccctgctgatttgtcctgcctcctgcagtcctaaaggcagatctgaccctaccaccaccctgtttctagcccttgcctggctccctactgctcacaggatgaggtccatgcctgggaactgcctccctctgtggcctcatctcctagcccgccctccccgtgagctgtggcctgatgtcatgggtctgcctatggttgcaagtgtgctgtgcttttctggcttctgggcctttgctcacgccattctgcctgccaggagtgctctcctttcctcacctcccacctctgtacccctcacatccctgttgaggtagaagtccatcctggaagctttcctagagcccccaggctggccttgatggttctgctgccaccaccctggctctccttcacagcacccacctgctgcaccgtcactgtttgtggggtcccctatccgtctcaccagcagccaggcccagggcatctcagggtgcatggtgggataggctgagctgaacctaagtggtctgagggaaatgagcagtggaaaaggggaggtgaggccagtgggccccaaggccccatctggtgggtcagaccatagtgggagcttgggaaatgccagatcatcagagaggatccccctcatcagcacagactctgtgaggtggggctccaggggaccctgtttgttttgttttgagacagggtgtcactctgttgcccatgctggagtgcagtggtgcaatcataactcactgaagcctcaacctccctgggcttagatgatcctcctacctcagtctcccaagcaactgggactataggcacatagcatcacccctagctaatttttgtattttttgtagaccagcttttgtcacattgcccaggctggtcttgaactcctgggctcaagcgatcctgccacctcagcctcccaaagtgctgggattacaggcttgagccactgcacctgcctccagggccctttgagtgtgcctcagaatagaggcctctcctcacagggcctctcccagggcttacaccagcaccacggctctctggacagtggctttccatagtggatactctcctcacaatcatgatcctgagaggtcacagtcactcagcaggaaagtggcagtggagctccactccccaccaatcctgtctttgtgcctagccccaggaactagcaacttgccttcataggatctgcagagtgatggctctgttctggattttgtttttttgtgggcttgtaagatggttttttcatttaaattcttcagactatatatagttgtcccttggtattcatggrggattgactccaggaccccctgcagatagcaaaatctgaggatgctcgagtccttgatataaaatggtgtggtatttgcatgtaatctatgcacatcctcccatgtgacttaaattatctctaaattataatacctaatacaatgtaaatgttgagtaaatagctcttatactgtattttttgtgtgtttctattgctatattgttattttttaatgttttttaaaaaatattttcaatccacagttggttgaatccacaaatgtggaacccatggatacagagggctaactgtatacttaatgatttgtatacttttctacacatatgttgtactccaataaaatgttcatttaaaaaaatagaagaaattccttcaagtcacctgggagtggagccttcattttgtgaccctgaggaggaaagctgcagctaaggctagaagggcagagagaaggatcctgggtccgtggggtcaccgtccagccttggaatgcgagcttagcctttctcagtgaaggcattgtgacctgggatctgtgctgtatgcagccaggacccttgtctcttctgagcagctgccatatccccagtggctagctcggtgcctggcacagaataagcacttggtaaatatctgctaaatgaatatgttcattgaaaccttaaaagaaatgagcaaaagttatgctccgagggtgatgatgatagctaaccttggaaagattctgggaaacccacagtcaggggagaaaacatccgtcccacagtgacaggtgtggctgctggaaggcagtgagaaatggtgggacttgagttctggtcctgctgctgcccccgcctcattgtgtgccacagggaagtccctcttccctgtgcctctgctgtcgtgggagggtgatagttctcacaggcttgttttggagataaggaggaaatgcctggcccatggtgggcctggatataggttggcttcctacaccctctgccttggtttcctcattttgcagaggagagctggctgtgtgaacactaaggaccccccgctcccttgtagtcacccatgcctttcttgtcttcccaggagagctcctcagagcagcttccctggagttaccaagagaaaacccactttggccacctgggccaggacctaattaaagagctggtcagctgctgtcggagaaagccattcgcactggtctgtggctcggctgagttcaccaaagacatagccaggtgcttactgtgygcaggcctcrctgaggactcctatttcctcttctagccctggcctctcttccaaagcctaggccatgagcctgctactgggacccaggaaggagcacagactggaatcagaagacacggagtccaggcctggtcctgctgctcatttgccaggtgaccttgggcaagtgtctttactgctcagaacctctacttctcatctgccccatgaggttaatcactcctcctggcctcctactatgtagaaggaggatgggctgtaggggccctgaggaggtgagcaaccagcctgggagtcagggaggactcttcagaggaagccaagtccaggctgagccccaggaggagtaggagttgggcaggggaagagtcgggaggagcttccctggcccctccgattagaggatctaatgggggctccaactgtggcctcagcaccatctcggattaggggctcctgagtgtgtagggaaggacacgggagaggcttagagctctttggaggaggattctgcctttcctccagtgccatgagcctgacacatgaaggtcttgggttctatgacttgaccacatcctgagagcaaggtggggccctcgactgtcttgtattggccccaagcctttcttgctgtgaacagcttcattctcagtcccctttcctggctcaaaaatcgagcctagcaaaagaagaggcacgggaaggaaacgcccctccctcctcctgcaggcagccactcagcctgtgccttcagcttggtgccctggtgatggttgctatggagatctaaagatagagcaggagtcaggagacctgggtccctctcccagcttgtcccactgagcggctgccgatcacggtccacccaccccaggaacctggcacccctatcccaggaacccagtgcccctgggcagcgcactgcagttaatgaattctgccttcaacagcctgggctctagcgtgctgcaccagcttgggctagctacaggcagtcccagaattggaatattaagccatggaatcttagagttagacttttatagtcatagaaatgtactcttcaccatatcaaagctgaaagttcaggactctaagaaacatacagtgtgacagacttatcgtatacacgggaaactgaagcccagtgagactaaatgacttgcccagggtaaaacagtccatggcagagccagcactagaagcctcctagcttcaacctcatgtgccaattctgcatcagtgattttcgaactgcgctctacaggaagcaagggttctttgcatagcagcagtgaaaggacagctccagatggatccccagtacccccttcaaccagagcagctgcatttttatcccattcatatattggggttttgaattatttttatttgtacaaaaggattttcctagccactaaaaaaaatggcaacaaatctctctgctgtgtcacatttaataaataattgtgacacatagctggggggtggtgctggaggtttcagaccgcctcacaggcagagttccagggtcagagagcatggagtactgtgtgtgaccttcttccagaagcacgggcacaggagcatgttaaaggccctgaaaagaccagtggcaaagaaactcctttcattttgtttaatccagagtttttcaagcttatttaactatagaacacttttctgtgggtttcgtagcctctttctagcacagtatagtgagtgggaaaggccctgactgagagtcaaagattctgagcaggaaccatgatctcttcctgcctagtatgtgacttgagcaagacacttttcctctccccaggcctctgaggtctgcgagttttcctccaccctttcctctccctcagtttgcacatcctattgactcagctccaaatagcgggggcctgtcaggagcctgactctgttcagacaccagggaaacaacagcacaccaggcagatgcagttatgtccatcggggaacttacagcctagcaaggaaggcagcaattcaacctgtaagtctaaaagtgatgggtgtcatgaaaaggtaagtgcagggtgctgggagagtggttggcaggggctttagcctagtctagggagagcccaggggcacaccactgccagcggggatagaggcttcaaaagctttgaagtcactcatattaagagtgttgccggacacggtggctcatgcctgtaatcccagcactttgggaggctgcggcaggcagattgcctgagcccagaagttcgaggccagcctggccaacatgacaaaaccctgtctctacaaaaaaaaaaaaaaaaaaaaaaagattaaccttatgtggtggtatgcgcctgtagtcccagctactttggaggctgaggtgggagtattgcttgagccaaggaggtcgaggctacaatgagctgtgattgagccactgcactccaatctgtgtgacagagcaagaccctgtctcaaaataataataataaaatcaaaaagagtgttaagggggtctccacttaaggagtagagagtccggggcagttctcgtatctctgtccttgtctcattttagatgtttagatatttagatattatacaaggccacccagtggtaaccaacctagaatgtgctggcctcctcttcccctcactccgtgtaggttctgtgcagcctggctgctggtggcatctcttatcatgggacattggtggggacccagccgtgcccttggtgccaagaagcctaaagggctcctgtcgcctggaaacttgagagtgcagggtcgggtgctgtgccccacaaggtgctgagcaagcccaagaagaagagtgtggggtgtggtgtgtgagttcagacctcttggagctgtgggggcatggttcccatcagctgctgttcctctgatgatgtccactgcgtgttgtgggaggcgtggccaccgtgtgatgttgtagtaggagaagggagacttaggagctagacatgatacgcaggcatcaagaggtcaaccaggtgtccacaatctgtgagccacacagagctctctttgtgcatatgcatcccaagcttcaggaaggcaacagctactagagggcctgaggacagattcttggtcgcagaagcggcattggctttagttcagccctcaccatgtttaccracgtcacttctgtgttcccctcatgggtctcccagctcccagtctccatgccacctccacgctgagaccagaccagttttccccacacacaaatccaagcctgtcactcccctgcttgaaatccttccctgtctccctgtggccttggggtagggcctctctgctctgccacctctccagactttttgtatgccaccgcccactcacacccacctctcaggctccaaacatgttctcttgcgtcagctcatcccttacactcgctgcttcctctgcctggccagcctcccaccttccgatctcccactcaccttttttgcctcctcatcttttgaggtctcagctcagtgtcacttcctcccgggagcctcgcctgtctcttccactccagcttggtcagtgagcagagaggcttgtgtgcttttctgtcgctgtacccataagtgtcatctgcatgtgagcatgagggccggcccattgtacccctaacaggggaggatgctcagcacttcctggatgtcgaatacctgagcgataaacaactaatgttcaggaagtgctttccaggtggcaaaaggtgtttcctctactttgaagcaagaatcttcaccaatatacatgctattttattaccccaatttactgatgaggaaactaagcttctgagacttcaagcgattttccaaggtcatgtagggatacacaagttccagcatgtgattgtggtaaaggttgtgtgtgacacatgagtgcaaccagagatgtgtataaagattgttactgggccgggcgcggtggctcacacctgtaatcccagcactttgggaggccgaggcaggtggatcacgaggtcaggagattgagaccatcctggctaacacggtgaaaccccgtctgtactaaaaatacaaaaaattagccaggcgtggcatgcgcctatagtcccagctactcgggaggctgaggcaggagaatggtgtgaacccgggaggcggagcttgcagggagccaagattgtgccactgcgctccagcctgggcgacagagcgagactccatcttaaaaaaaataataaaaggattgttattgatgaccaggtgcggtggctcatgcctgtaatcccaacactttgggaggctgaggtgggcagatcacctgaggtcaggagtttgagaccatgctggccaacatggtgaaaccctgtctctactacagatagaaaaattagctgggcatggtggtgcgcacctgtaatcccagctacttgggaggctgaggcaggagaattgcttaaacccaggaggcggaggttgcagtgagcccagatggcaccactgcactccagcctgggtgacagagcgagactcagtgccccccaaaaaaagatttttattgctgcattctctgaaatagcaaggaattaaaaactgcctgtagatacagcaattaaagtgaactccatccgcatgtaccaatatagacgaagtcctaaaaacataataactaagtgaaatgtacattgtgaaaggatagctacagtgagatacctgtacttggaaactgtaaaaacccaaaataatgctaaatgctcaggaagagacagagacacaccagcttcaaggatagtggtggcctgtggtgataggtggaagggaatgggatggggtgatggggtttttagccatatctgtatttgtattttactataaaaatacttgacataaacatgacaaaatatgaacccctggtaaatctgggcaatgagttccccaatgtctactatattattttctacctttttctgtttttcaaatagttccataattaaacatttaaaaaaaaatccaatgtgcttgttcaatgctctctagaaactaggggcttagaaacattcactttctctctcctacctcagaatggactatgcctctttatccccccacacattttagccattcactgaagattatttctgagcatgaactgtgttccaggccccattctaggtgcaggagacacagcagtaaatcatataaatcattcctggtattcatagctgatgggctgttccctctacttgtccctcttcctcataaactcaaaccagaatgacttgccaagcaccacactgttggcctatttttttctttctttttttgtcgttttgttttcctttgtcaaggaagcagacctaggtttgagtctcttactgatcctgtgacctagggcaagtaacttgggctctgtgaacctcagtttgctcatctataaaatgggaatggtaacactgtctcctggggttgtgtgaggatgagggaaatgtgtaaaccccaaacacagcacctggcacggagtgggtgtaagaccccgttcccccttctttctccctccccaacagtgccctgactcatggttgacctctgaggacagcatttatttccagactttcactatcaagaactctcctttttattatttttcccatgctttgggagattttgatcccaaattgcatgttttaagtcattattaatttatctcccattttttattaatcaaagacacagatagctgcccctcagagcttctgatctgtacatccagctgggagctgcagtggttgacataattccagccagaggcaaaggagctcagcagtgtgtgtggcccaggtggcccaaggaggggaaacgtaggtgcatcttactctgtttcttttttttaatggaccatgagtcatggaagctgctggggttgcccaggtaggtgctgctttcacaggggatcactgactgatgggctggaggctgaggtttgggtgccagggtctaatgtggggccccacgtgggcctcatcctgcagggctcac

SEQ ID NO: 95614 - DNA, 47297 bp, Homo sapiens
aattgtgaggtaatacatatttaaaatgatcacattttggacctattaggttaaattaaatatatccctaatgttaatttaatctgtttatttttacttttgaaaaatgtgattaatagaaaaattaaaaattacacatttagttcacttatatttctatcagacagcattgatctaaggaatggcaagaaagaaggtacccagagctctgcctgacctcatggagcacaacagtgtgatagcccttagccacctaccagtccagacttctatacagaagagaaataaatcttaacattgacttaagtccctattattttggtttctattaaagcatctgttcactattttaactactaaactacttcattaagttgttgagagtattaaatgagttattgcttattaaaatattaaagtattagagtattaaataaattattgcttataataatttataataatttatttattatttgagtattaaataattagtattwgagtattaaataaatattagtattagagtattaaataaattattgcttatgattatttataattatttatttataatttattatttagttataacttataattatttataaaatattaaagtattagcatattaaataagttattgcttatcaagagtttaaaatagagcatgctacatactaagggctcaatgcccgtaaattattttccttcttattctctgaattgaaatgtggttctcttacccataattccatattactttataagtttacattatatcgtgccatcataattttatgcacttaaattggaattcacttgaaggaattttgccagctagcatgtgtctctatctctagtctctgtgaatctcttaggtaaacacagaattcctgcacaaaggtttactgagacacttagttaatactttcaactatcatcccattaccattgtttccataaccataagaaaaccacagtcatgtcattcctccatagctcaaactttctctggttttctattgctctaaggatgaataccaaacacactcacgtatcttttccacctcataggatgatttcttccttttggttttctgggctgtaaaggatgaataccaaacacactcacgtatccttcccacccggtaggatgatttcttccttttggttttctgggctgtaccatatactgtagctttctcttatttgttcagttgatctctcaagaccttatgcatttcttttatttttccttgagcatgtttctctttccgcatcctctagataaatgccaattaccacgtcatatcaacctctttagagagccttagatggccctccggattgccttaactcctctgctaaatgcttttagaacaccacgtttacaccctccctaaccatcctgtcccatgtctctactagaatcaacggttataatcttataaatgtagcacctttcacattattaaaatatttttttctattcactactctcttttctaccaaatggtacttccttgaggacaatactgaatgaacattttgtaactcctttgaacatcaaggcagaatgtctaataaattcattagactagcaggtaagctctacaaaaattgacagatacttggtgtgataattcagaagaaaataaatatcacttcatctcagtggtagagataaagaagtatttatggagttactaagatatcacttgaaccctataagacggaagtcagattcgtggttaagagaagactttagaaccagactatctggaattgaatcatagatttgccacttattagctgtgtgatccatgacaagctataagatctccctgtgccttaagtttgtcatttgtaaaatggacagaggaaatggcagtaaatcttacaagactatgaggagaattaaatgagcaaatatgaatctagcttagaagagtgcttcgtgtataataagttctcagtaaatatatgttatatatgggctttggattagaaaaaagagggaagttatttaaagtagaagaaaatacacaaaatatcataaagggaagtaagaaaaggtacagtgtgcaagagagtgggtggtcctacttttgagacacagacattctgtagatgagtggtgggaggtagggcaagaaaagggtcaacttaaagactataatatagtagatgggaaattattaaaagtttttggtcagaatggtagcatcatcaaaactgttttttgtttgtttattttgcttttgttttgtctgtcagtattgccagagaaaagatgataatatacggaaaagattgtaacaaacactttagagctattatctcctttgatagcacatatccatgagtagatattattaccatgtccattgtattgatggagaaactgaggtaaaagaagacatgatacagaacgagacaatagtaatacctaattcatacaccttctttcagatttcaacatatggagaatttttaacactgtatgaaacacagaaagggggcaatgaaagaaatacataagaaaaagaagaaacaccaaccaaaaagaaatctataggttttattattatcaaccctaagagaaaagtattactctcttttattttttttagttctatctaatgtagcataatgtaagaaagcacttatgtgctttgcagagaaaatttttgagtggtctcaatttcaatttatatgtgtgctaaaaatgtgtaaaattaggctaaagtaaaaatccaaaaaaaactactttccctttgagccttgagagggttagtttcatgctcagcatgtctataaacaaaggtctaattgccaagtgctaggacataaagggaaataagtggaataatagctaaagagactttatggctcaaaatccatttcctttgaagtgggattatttgagtcattttgaagctaggttgctggtggttataatgttggggggcaaggaacaggtaaggatgagaatagaggggagaaggaggaaaccttgcaggatagaatcctatcagtgcctaggagagtggagggttaactcacaggtagtacatacactagaataacatgggtgggtttagtaacagagatgagtagatgtccaggagtcatgaggctgagctcctcttttctgaatgaagataatgggataatccttcaaaagagacatggtgacactattagagcaaagaagtaggtcattgaagaaaagagaacatagttgtggacatggagcttttattccgtgttttcctagttctatccatttccacagtcatggatcaactccacagaaagcaggaagaaagcaaaggaggaagtggtttttgaaatcatcaaatacagtggggttttttgggtttgttttctgttagaggctctagtgaactccttaataaaaaagaaaaaaaagttgtaacaactggcccaaatcatgtttgaaagttgtcaacagacttttacaatttacaatgtttttctatcattattagagtgaattaagagttacttaatctgcttataaattgtacctaaatgcctagggtagagactaacatattttcagaagtttttattatgtgaattatcaatattttcatgttcctttaggaacatatgtaaaacttatttaataaatacaaataatgttgacctgcacattactcaacagagataagctgatacttgataaattcttgaaaaaatagacacctggtaatggggctcaaagggataatcattatggattattttaaatattagagttttaatacaaaagtaaaaagtaattcttgtgttacaaggatttggctcatgctattaatagtcccatgcatttttttaaatttctactctagaatgttacataactaacacaatcttgcagataaaagttgtaattgtctaaaggaagttgaagcccattccttttttttttaacattatatttttaaaaagcactaaagcaagtaatgtttaaatacaaatacattacaaccattggtcaattctctaatgaaataaaagcattgaatcctcacccattttacaaataatagaattattcctgtgacctcaaggaaaagactttaaaagagtctgtattacaaattacagcagtaaaaaatcttcaatggttgagttatttttcattgcaagaaaacattctctggctccagatattttcttaaagcagacagcaattttctcactgcacatagatttcaagaaatgtggatatagcctggcaagtaagttgaaattttgtaagaagacatggaaattactagtaggtgagagagtacacttttataaaaactttgagtaatatttgcaacttgttaaaaactgaagactgtaaaatgacagtctttctaattttatataattattattaaaatattttgacagaagtatattaacaatcttcatattacttgtgcacttaactattttgttattaaatataaagtttaacatagttttatattgtaaattcaatatgtagtggggctattagtggagtgtaattcttacgccaatatacaaaatttgttggcttctacataatttatatacaaactttctgcaatattgcttcatgtaaagggtttttaaaaaaatttcacttgtgaatttgtttccattgactatttaaaagaagtgacactcttagtcacttcagaatttattttattgtttatagcagggaaatgtaaaactacccgtatcttctagaaaaaaaatacgtagaattaacctaatatatgtcaatagggtcaatgtgtaatatgaaaatttatttttaaatatatttcatgatgcataaatcatctcgttactgtaatctgtacaatttatgcacaatttcttaatatactggatttgtattctttattaaaatactataataaaaaatttcatttagaatgaataaacatttcaaggtgcttaaacattgtatcagtttcaaaaattaaaccaagttaatcttgctatagtcttaacaaatgcaatatttggaaaggaaaatagttcattttatttaagaaaaatctcattaaacctggaaacaatactacaagcttatgataatcaaaagtacaaaatgtagtcatacatcattttctagctaccttatattttctacatatagctatgggtaattactttgatttcaggaaccatagtttgtacttcctttcccctactacatttcccagaaaactaaaagacacttaagaatgacgtgtttgagtggaggtttggctcaatatttttattaaagagaattttagaacttaatattttaaactattaatttgcagtggcccttggatttaatctgatctacctataaatccaaaatctaccatttattgctattcctgttaacaatagtagtgcctacatcctaactaactgtatgttatgaggattgaataatacatatgaaatggttagaaacgtgcctgagccatagtaagtgctcaaaaagttgttcctattatctaacttcttcatctattttgttatttgcataaaaaatcctttaaaggttattgtgaggatcaaaatgtgtgcaaggcacttggggcccacttaagatacagtagatattgtcataagcagctaagtgttaatataataatctcattctgtagtaggcattgtaatttatggataacattttttcattattatattcctaatcatatgctctaaactgatacaaaactaacaataaatgtatcatttgttctttgtattattttcataaaattgaattttctctccagttcatatctatcttccagagattacatgagaaaggaaataggagtcgcaattattatggatttgttagaaacatctatttgataacagataagggaggaaatacatattatcaacacattttagtaagcccaaaatattaactttttaacttagataagaaccagatgggaaaaatgtctatctgtacttttcaatcaactgagaaagacgagaaaaaagaagctcacactgggaatgtaatgactaatttatcaaatgcttatgcttcaggtacaaatgtcattaacaaatgtatccctttgttatttttcatacataaatctcatgtgctttacatgtttatcaaagcaattacaatgttcttttttttaattttattattatactttaagttttagagtacatgtgcacaacgtgcaggtttgttccatatgtatacatgtgccatgctggtgtgctgcacccataaactcgtcatttagctttgggtatatctcctaatgctatcccttcccccccgccaaccccacaacagtccccggtgtgtgatgttccccttcctgtgtccatgtgttctcattgttcaattcccacctatgagtgagaacatgcggtgtttggttttttgtccttgcgatagtttgctgagaatgatggtttccagcttcatccatgtccctacaaaggacatgaactcatcattttttatggccgcatagtattccatggtgtatatgtgccacattttcttaatccagtctatcattgttggacatttgggttggttccaggtctttgctattgtgaatagtgccacaataaacatacgtgtgcatgtgtctttatagcaatgttctttaagatctgaccatttaatttacttttagaagtagaatgaccagatcattttgtggcagtacaatcaaataaaatacatctctaggaggtcttgaagggacacctgctccaatggcattaattttaaatggttaatttttggtgaaaaataaaggttgtccaatgggacattgaatgaagatggttgataagatttgggaaaatgctacttgacttgctatttgacatggcactttaatatctttagttgacaatgatgacaattctatctatctcttggaaattttctttgccatttagctactgactttgtagtttatctcttttctctagatttgttgctatgcaaagatgacaaagacttaacaaaatattttctgctgcaagtggtagatattcttctacagtatgcaaaaacacctttgatggtaagagtgaaatattggacttccatcatcctcatcaactacttgaaggtttggttgggtttaccttagaactgcctgaccaccctgaatctctggaacagttacttgctgattgcacagataccttaaaatacagtgttaaaacaggtgatttttcagattgatgtttttgaactgtaaattggatgaatagctttgagtttacatttgtattgaaaaatgatcatagttttatttattcttatttaaaatatttagctttgtttttttcaaattggattatcatctaaaaattgttttcagtttaacaaaattattttaaaattaaaattctaaaaataaaagaaagtaaataaaatggttttgattcaggaaattacattttaatggcaagtaaatgtataatttttatcagttttcatttatttttataatattcaatattgatgccaaattaattatcctttgtaccagtaaaatacatagcatcaaaattaccacatatacatatcttatatttctgaaattgtgttttttgattaaattagctttactgtaactagattctttttttttgttttttcttgagattgagtttccctcttgttgcccaggctggagtgcaatgacgcgatcttggctcactgcaacctccacctcccaggttcaagcgattctcctgcttcagcctcccaagtagctgggattacaggcacccaccaccatgccaggctaatgttttgtatttttagtagatacacagtttcaccgtgtcggccaggctagtctccaactcctgacctcaggtgatccaccctcctcggcctcccaaagtgctgggattacaagtgtgagtcaccacaccaggttactgtaactaggttcttagccatttaaagtgatcatactttcaggggcaagtgatgtttgaatagggtctatggaaccctttttctaaaatcttaaacctactaaatagtgtgttggaatgaacatagtctttgaaaaaaaggaccaacaaagtggctctaaatacattatctctacttgggcttattaattttttattacattatcttgaaaaatatttatgtataattttaataattagaaatcgcttgtgaatggatactttacgtttgataaatatcaaatatacggacattgttatgacatatttcttacaccccagcactttaaatatcactaatattttattttcagaccaaactgatctgccatgctaatgcacaaagatgatttacatttgagaatgctcattgctgcctgtattttaataacagaaaacaaaggatgcttgtctttaaatttatcttaaataaacagagaatatcctttgaaacaaatactatgcaatattaccrtttaaagttttagagaagtcatggggaatttctcataggatattgatcattataaaaaggtatgccacaaaataatatattcagtatctcagttatatttaattatattgttaattccatgtgtgtatgcatacacaatatgtaggtgtctctacctacctatttataataaacacatttgtaaactatctgtatmattttaggatatctttgtaaatatcatttgtagaatgtatttattataaataggtagttgaatagataagtaggcaggttgtctcctatatatgcataaaaatcactattctctatgtatagtttgtattttatgtatttctaaaacatgtatatttataactagaaaaccatttttaaacaaaataaaaagaaagcttttataagattagaaaaaaaaaccctgttgtagactcaaatttaactgtataaagtaaatgtgaaattaaaataaatttatcttagaaataaaaatagcaaatggtatttctgaaaaatagtggggcaattgggaagcatttctgacttacataaattaaattccttttttttcctttagcgttgcaaatgtagggtaaatctgtagacccaccctccacttttccatttccatttctgtacatctgaagtgcagagagaaaaaataaagatgctaagaaaatgataagtaaataacagaaaggaacactttgctaacacagctcacaacttccagacattgcatttcatccaacttagtaagtacgtattgagttcctgtttgttaagaacccacacaggtgctctaggagaggacactgttgaaatacggataatgtaacatactagaggaaaaaagagagggactcacaaagagctgtgacacaaatcatctgtaaaatatgtcatgaaagaagtgcaaaagataatctatttaggggataagaaggggaagattaatttttatttacttatttatttgagacagggtcttgctttgttacccaggctggagtgcagtagggtgatcacggctcactgcagctttgacctcccacactcaagcgatcctcccacctcagcctcccaagtagctgggagcataggcacacatcacccacccggctaatttttgtatgatttgtagagacaggagtctcactatgttgcacaggctggtctcaaactcctgagatcaagagatctgcccccctcggccccctgccctgtggaaaaactgaggtttgttttaattgtttagttatcactgagattttaatgatgcatagcccatgatagtaattagtattttgtagacatgaaatgcaaataaaaatagcctatttagcttactgttatttttaatttttatttttgcttaataatggctctttagttaaacctggatagggcaatactgtatttccagacaatatgatttgttttgtatgttgtataaattattatacaaaataaatttataaattatattccaaagtgctgggattgtaggcataagccaggatcccagggaagattactttaaactaagttggatattgtgggagtccatttgtcttgctataaaggaatacctacatctaataattacttataaagaaaagagttttatttggctcacatttctgcaggctgtacaagaaacacgccagcctctgcttccagtgagggcttcagggagcttttactcatggcagaaggccaagggaagccagtgtgccacatagtgagagaatgagcaagagaatgaggagggcaggtgcaaacctttttaaaagtcagatctcccagtaactaatagaaccagaactcattcattacagcagagatgtcaccaagccattcatgaggcatttgcccctatgacccaaacagctcccattagaccccatctccagcattggggatcacatttcaacacgaaatctggagggcacaaatacccaaactatatcaagtatagagtgttcaatttgacaactaataaagattacttactaatataaatcttcaaaaatcattgtaaaagaatctaatattatgccccccaaaacatataaacagcttttcagtgaaaattatttaatgttttagatggcttcttcccactttgcctaactggtccattgaagtagttgtacacacccccatccttgaccttccttccttagatgcaggaactttytcacccttgagcatattgagatctgtttcagcttgctccttttccaaatctttttgtctggcaatgcttaaatttagatcttaccttaaaaatcacttcctccaagaagacttctctggagatttcctcggcccactcccctggctactttcactcccctaagaatggacttaccacacccactgttttcctatgtagcactttttacaattgtaatcaaacacatttgtgtcattatctgtttaatgtctttctttgcgaccagcctgtaaaatccacatgatagcaactatgcccatctggtttaccaccatatcgtcaatacttaggaatgtctctgtataggatagtgcctcaataatgtttactgaataacataatttaaatgtgctcaatacatgagtacttggtaggtgaaaaactattatcaaatttcagtattttttaactctagtttttattttggcctattgcaattttgtttttgtctccaggacatcctcgctattttaaccagctgtccagtgggttagatatgactggacttgcaggggaatggttgacagccactgcaaataccaacctgtgagtatccctctatacctaagaaatgtgagattattagacacacgtaagcaagagtgaagatttaggtagtggaagttccattttgctggatatgaggcttgctgtgtcaaaaacaaaatagttgagacttgggagaaatgcaaagaagctgctatgtgtttcctgtgtgacatgtgtgaagtttacctggttgtmgaaattctcyggcaatgttcagggcctgaatttgcttgattagcctcagatgttagggtgtggactgggagtcaagttctaggagtggaatcatttcaacactattcaaaacagcccacagtacatagtttaaaatacacacacatagaggccaggcacggtgcctcacacctgtaatcctagcactttgagaggccaagggcggtggatcatttgaggtcaggagttcgagaccagcctggccaacatggtgaaaccccgtctctattaaaaacacaaaaattagctgggtatggtggtgtacccctataattccagctactctggaggctgaggcacaagaatcgcttgaacctgggagacggaggttgcagtgacccgagattgcaccactgcactccagcttgggagacagagggaggctccatctcaaaaccaaccaaccaaacaaacaaacaaaaacaaaaaaaaaagcacacacacatatatatgaatataaattagaacctcagtggtattgagtaataatattgtaatattattactcaaaggaaagcttatagccttgaattccagcttttgctttctgaagaaattttgctttctgaagagctgactctaatkgcacagtgtgacacagagggagagttcccatcatggtcacctctgaatccttttccctgggtcccacattattcttgtcttgtgctatcttcttgctttacagctgttattattgaaaacataataactctaagttgttttttggcgtgtttcctcaaagtacaatccttatacaaaggatatttatcaatcaatttctagaaaaggccttttctacccatttaatgttctgcaaaacatcgtctgcaactccagatatatgtctttttaacttgtctcttaaagaatatatagggtttttttttcttaataactgggcattttctgatcctaaactatgttgtgtgttctgaagggatgggagttgctttcaaaattcctccaggtgggaaagaaattttcaggtattgcccaaaacaatggaagtcatggtgatttctttgtagaactaatatactcaatctggaataagcaatttagaatatataaaaggtaaccatttcttgcatagtctaatatagaattaaaaagtatatgatcttgttaacacatgactttactttgtctcttccgtgtaatataagtcacagctgaatttatctatatgtattataggtttacatatgaaatagccccagtttttactgtcatggagacaattcttctcaagaaaatgtatgaaattattggctgggaagaaacaagcagatggaatattttcacctggtaagaaaaagcaactttctgtaagctaaataaaatacctatcgggagacactcaaaatgtgttccaactaacattgttatttttgacagacattcataagccattgcattatcatcgcaaataaaatttccagaaatctaaaagtgggaatttcattctttgacctttcaccaatttcayggaaggataattttaaaataacagtgatttagcacctcattagtttcagaaactgtcaaattgttattatttcaataaacatttatcaggattgaaattagcttaatggtcattatttcccttccataggtggcagtatatcaagcctttatggtattttagtagctcactataaacaatatccagagataaaaacaaaaggcatgactgcacttccatgcattrtattatttgtttctgagcaagtaagtatcaagtataggttcttttcaacttttaagaatcatgaaagataacctgataaaataaagactaagaatattggcattatgcttatatcaaatatgttcaggtaatctctgagtctggatctacattttgatattgaaaaggaaaaaaacaactttccagtaaatataggctctataggtaagcaatacaaataattcaggattaaaatttaatttcagcatgacaaacagaaaacaaatgttttatataaatataaaacattctgctaactttaccaaaataattattgtaaaaatttcaaagatttaatagttatttttcacattgaataaaaagaaaaagaatgtaattactgtttcatctttccggttaggaccaaaggaatcagttaaaagaaaactatattttttatagactagatcctcagccaaactcttctgatactgacaatatctccactgatatctcctttacgtttagtattccactctcgtgcatagcatcaaaactttttaaacctgtaatccgattgctttcttcttatctatcatggcaacatgtatgatcttaaaatgtagtagcagtccaagtttgagagttctacctaaaagtacctagaaacgaagagtttttattgaaatattcctgtttttgcagtgcactccctttgccaaactcaaattggcattacacatctatatagtaagtcctcacttaacgtcataggttcttagaaactgtgactttaagagaagcaatatacaatagattcttgaattacatcagttgctttattataatgtcaaagagaaaaaaatattggtttcgttagacatcttttcagctaaagtcaatttccaagaacctatggctacattaagtaagtacttactatatattatcaagttggaaactactactttatattcaatgcaatgtattacagaattttatagaacttaacatgcttgtttacaaatgcaattttcgttatttgaaatataatttgaaaatatttataacgagtaaataagctgaaattccatatgttgatctttaagaaatcagttttttatttaatctctgtattctttattgaaatagaaatatggttaaggttttaatttctgtattttttaatctcatatatctggtcttttcctagcgattaaaaataatccgggccaagtttatctttagagctgctatcacctctgtcttgctggacaaagtaaactagcaggcaagagatcaaagtgggtgtcaaagtctgaattaagaattacaggcactgtaatattcagtacattcataagacctcatgccttaaaaaaaaaaaaaaatctcaaatgggctgggcatggtggctcacacctgtaatcctcgcaytttggaaggccgaagctggtggattgcctgagctcaggagttccaaaccagcctgagcaacacggtgaaaccccattcctactaaaacacaaaaaattagccggtcgtgtcatcgtgtgcttgtagtcccagctactccggaggctgaggcaggagaattgcttgaacccgggaggcagaggttgcagtgaccctagatcatgccactgcactccaccctaggcaacagaccgagaatctgtytttwaaaaaaaaaaaaaaaaaaaaaaaatctgaaatacaggagctagagctgtccagagcagaaaaagattttcctggaggaaactgtcactaactttataaatgatgtggcttcatgtgtatgcagggaactaaaatattcaagctcccacccaagcttgtaaagagttctattctgtgacagtgccttctggaaagaggtgctacaacattctagatccaaacaaatgtcaagatgggggcctggaaatatgccttgatacctgtgtgcatatatatccacagacccattcaaagctatgcatatatgccccaagtgcacttgtgtgtaaatggggatttcatgtaggagaagtaatgtcttttcttttcttatttttgcccaagggtcattactcaataaaaatagctgcaacaattttgggtattggaattgataatgtaattgaagtaaagtgtgatgaaaggtatgtttcttaatacattctcaaagttttattattactctgcttcatagattgagatttcatttgcctgtggttccattttttggcaagaatcctctcccagattcattttatttatattttaaaggtaagtcattatgaaagaagcaccaaaattatttaccctattgttgacatttatttactaactatggccttatgaaaattctattgccatatatttgttccctattttatatttatgaaatacattaaattatcaacatagtgatgtttggaaattaaaaattcaaccatgttagagtacaaggtgaaaatatctttatattttctttggatcccattcttcagaaataagcaatattataaactttatacatattctggatataatttttattaatataaaacttattcatacatcaattctgtgttatgttctgtaatttgctttatttcctttggctttatggtatagcttcgaaatcttgtgaattcacacagacttttttttttaagttacatcagtttccaattttataaatgcagcaaagttttacaagtcctatttaaaaagacatttataagttttccctttgattttagtacttaagagcagtgcttaagtgaatgtaataaacgtatttgagtttaataaacacatttgagttgccttgaatatctctcatatgaatgcctctaggttcmaattatgtgtgaatttataactcratacaaattttccatttgccctttaaacatttttagttaattatattcttactgaaatgtaacattaaaatattatcaatatttttatacttagaaaatctgacagaaatgatgtttattgttgttcagaacaatagaaatcttttaatatgctgacctgccaattgtatattactgtgaattgactgtacatgtcctttgcctattttttaagtggtagtttattacttcttattgccttataagaaacatttatatattatgaaattctgaaatatataaatataaaatatcttgcaaatatgttttataagtttattatccagtaagctttatcacaggttgtttgtccctacacgtttcctgagaattaccactctaaagatattttacatcatttctactattattaataggatttttctactatttattttcaataattggtattaagaaattaagccataatttacttatgtaacttgctcaacattctcatttttataaacaactttaggtattctaggtatacaaagatatgtattccaattaggtttcttattttattatctgtctcttttttttcaaaagaaaatagaatattgaagatagtgagcattattatcttggtactgactttaattaaaatgttgccaatgagttacctctaaggctgctgggcagttagtctcatagctgaacggagtagaaaaatattggctttaatttatttcatggaaacatgctgtgaagaaatgtgaggccaccttaattatgccacccacatcccccctcaaatttgaacgcctgatatttttaatcttgatatcaagaggtcttaataactaaagttttaagggccaggcgcggttgctcacgcctgtaatcccagcactttgggaggccaaggagaatggatcatgaggtcaggagatcgagaccatcctggctaacatgatgaaaccctgtctctactaaaaataccaaaaattagccgggcgtggtggcgggcgcctgtagtcccagctactccgaaggctgtgacaggagaatggcatgaacccgggaggcggagcttgcagggagccgagatcgtgccactgcactccagcctgggcgacggggcgagactctgtctctaaataaataaataaacaaataaataaagtttaattactttaaataagaaaataaggaaggaaaaaaaaaagcatgatcgaaagagagtttattattttgtatcttccttacaatgatcagaatcttctgattagtaagtgtgcagattttaaggtgaccgaatagtagatgaagcactctctaacttaaacgtggcttaaattaattgaacatttattacttattcatacacttataaatgtctttaggagacactaaaaactaattgttttaaaatcttgcacaacacttcttattccaattggtagaatttgtatgtttatatacttataataaatcaatgtgtatttgcatttttgaggggaaagatgattccagctgagttagagaaaaatatattacaagctaaaaaaaaaggtatgttctacggttctatatttaacatgtaaatatctttatatactttacgtatgtttattagtgaaaaataattgataagaaaattgctgaaaaaatagaataaacacaaaatgtgggaaatttcttataaaactgaagtggtgtaattaagtagcattgcagtatttctaatattattggttctgttacatatgaaaggcaaatttatcagggtctttcctgtataatggaatttggccatttctatgtttgtggtattactttctttaaaataagtttaaacagaaataacaatagataaaattgaaagggaaaggtataaatccaccttacagttatgttactatctctagtgattatgtacctcagaatatttgaaatcattagctattcaatatccctaatcaaagttatccagatttctgatatccagaagtgtaatgggtaccagtgttgtatatagttcctgtggacttcatgagattgtaagaatgattccgctttttcatcaccagggccaaactccattctgtgtctgtgccacagccggaagcacagtgtacggagccttcgaccctctccctgacatcgctgatatttgtgagaagcacaaactctggatgcatgtggatgtaagtcatctcctttagtctggcttataatacctcttttttwaaaaaaaatcctacaatccttaaagattcctaacaggcatttcaggcaagtcaaaaatttctctgtrcctagattttataatgaataaatacagaaaatacagataaagaataatcttatttacatcttttttttcttttctttcttttttttttttttttgacagagactcaccctatcacccagactggagtgtagtggcacgatctcagctcactgcaacctctgccttccggtttaagccattctcgtgcctcagcctcctgagtatctgggcttgcaagcatgagccaccatgcccggcccacacctggctttttttttttttttttttttgtatttttagtagagacagtgttttaccgtgttggccaggctggtcttgaactcctgacctcaagtgatctgcccacctcagcctcccaaagagttgggattataagcatgagtcaccgcacctgcctacctaagtttatttttaaatagacttaatacatcatgaaaagggctaaaaatacaccaaattatatttaaaagcctaaatctctattaatattcaaccccaaatttagaatatcaatgttaaagtcaaacatgatttgaaattgaaataagacttagcccattactctaatatacatttctttattaatatcaaagaaataataactttcgatgctattaatttagtacaataacttttaagaaaaatttctttgactttgattagagttgaataaaattaaagttgtagcatacaatggagattttaatttttctgtagtatagcctaatttgatgccaacttttaaaatctgtctttggaaattatacagaaagtgccttcttgaatttattaggaacttaagacttcaccgtgtcatgaacagacaatgaaaattcatggtaggaaatttttttaatgcattgtttttttttaagtagaataattatagccagctcgataattatctagcataataattaaatcttcatcatgttttaaaataaatttaacataggaaaagtagtcagtgtaattaaaaaataagtaattagtataagaccacatgttctttgtatttgttgtaggcagcttggggaggtggactgctgctatccagaaactattcctataaactcagtggyattgaaaggtaagacctggggcattgcttgtgaaagcagaagaacccatttagactccttttccagtgactgtgagtgctaaccagagctgttttatcacctatggccaagtctgtgacctggaatccacacaaactaatgggtgtccctcttcagtgctctgctatcttgatccgggaaaaagtaaatgatttctgtttttaattactgacataatagatggttaacaatgactagccttattgtgaatgttttatattaacaaaaatatgacctcactgaatgaaacatactgcagcacaatttgccctttggaggagaacaagttgatctttaagtagcagtcatttgacaaaatcaaatgagtatagtgcataggtagtaaaccagctacccgtgggtgaaaagatgtggtatgagatgaaagacagtgagaggatctatagaaaacctgattatttataacccagttattaaaaacataatgaccagccgggcgcagtggctcacacctgtaatctctgcattttgggatgctgaggcaggcagatcacttgagcccagaaattcaagaccagcctaggcaacttggtgaaaccccatctccacccaaaatacaaaaaaattagcctgacatgttggtgggtttgtgtggtcccagttagttgggaggctgaggtggaaggatggcttgagcccaggaggaggttgcaatgagctaagatcgtgccactgcaccccagcccaggtgacagagtgagaccctgtctcaaaaaacaaaacaaaacaaaacataatggccatagatatatgaaaaaaagtgcaacatcattaatcatcaggaaaatgcaaattaaaacttcagtaagatataacctcacaactgttaggatgcctattatacaaaaaaaaaaacmaaaaaaaaacaaagatgagcactggtgacaacatggaaaaaatggaacccttgtacacttttgatggcagtgtaaattagtgaaaagagtatgggtaaaaagtatgaagatttctcaaaaaactaaaaatagaactaatatacaatcctgcaatctcactactggctatatatttaaaggacaggaaatgaaatgagaatgcctaagagatagctatactcccatgctaaccgtggcattattcccaatagtcacattatggaatcagtctaagtgtccattcatggatgaatggataaagaaaatgaggtgtatatactcaagggaatactatttgtccattwaaaaaaaaaggaaatcctaccatttgtgaccacatggatgaatctggaagtcgttatgttaagtaaaataagccaaataagttaagtaaaataagcaaaataagacacaaaaaggacaaatacctcatgatctcactcataagtaaaatctaaaaacattgatcttacagaactagagggcagaatggtgtctaccaggggctgaagcagttgggggagggagttcaaggggaagttgatcaaaggatacaaaatgtcagttagataagaggaataagttcaggagatctattgtaggacctggtgactacagttaataacaacatattgtattcttgaaaattgttaaaagagtggatgttacatgatctcaccacaaaagtgaaaactatatgaggcaatgcatatgttaataaactagatatagtcattccacaatgcatatatatatcatatatatacacattccacaatgcctatgtaggaaatgcatgttaattaactgtatttagtcattccacaatgcmtagtgtgtgtacaacatgcatatatgcaatacttcatacatatataccaaaacatcaagttgtacacacaataaataaaattttgtcaatttacaaataaaatgaaataataattttaaaaagccaccaagcaaaatatctcttaggaataaaatttggcccactggccaatttgtaatcttagagtatagagccaataatagggcatattttcatgtggatgacaatgagtaactgtaatatatttttggcacaaaaaaaacataaatgtggccaggtgcggtagctcacacctgtaatcccagcactttgagaggctgaggagggtggattatgaggtcaggagtttgagaccagcctggccaatatggtgaaaacccatgtctactaaaaatacaaaaaaattagcccagtgtggtggtgtgtgcctgcagtctcaactactcaggaggctgaggcaggagaatcgcttgaacctgggaggtgggggttgcagtgagccaagataatgccactgcactccagcctgggcaacagggtgagacttcatctcaaaaaaaaaaaaaaaagaaaaaaaaagcataaatgtatgtatggtatgacattattttctttttacatgtgtatttattttatttcccttcgtagtaaatgtgacagtatacaaggacttgagctcattatctcctccaagtagaaatacaattataaagtttgcatattctttattgagttgtcaagtkgcaaacacattttacctaactttcatttctaccttkggggacatcattttctattttctcttacttgcaagcaatccagaggttttgggtataaaaataatctgtcttcctactatagccttcctgcctactctttgagtacttaatgctcacttcatcttccctagttctgagggaatctttattcattttctcatacctagtgcattatcagctctgctgactggaactgttaacattatctctgcttcagctcctgctaagttggctgcatggcagcaatatcccatccacaaaatggcagatgctcaaagcctgcaggttagcagactgatccttcttcagcattggtatgtgtccagaaccttgacattattgtttggccgtatttttttttcatttgagaagttttcaaatttgtctccaacccccaccttgctaacaggtctctatttaactttcagatttcagatacctttctttttatggctcaaatacaaattttctgcagtcttctctgatttcttagcccaccatgagtatgttgaagtaatacattttattctacataagtacctatcatgagttttcaaataaattgttttttatattttgtctagtactttaccttttcctaaagatagatggatggtcaatggaagtacagcagaattcccaaaccaataagcatttaytatgtttaaggtcatttctggaaaacaagtctatcttggtgcagccttgaattaagaggaacgttctattcttatctattaaccatttgaatgtccagggctgcagatagacaattttaattcatgccttaatgagtagaacaaattgagtatatcaatatttaatgaacatatttttcaatgctgacaaggaattgactataaggaagtgaatatatacatttttgtataattgtacataaaatatatttaaactgattttaaatattcttcatttttacactcaagggaatgaaaataccatatgtttttcaaacaaaatgctagccacatcaatttcatttattcagaagaagcttttcataatgcaaaatataaactcattaagtagcttctctttgtcgctaagatggggattgaaatccttgacattgcacaaaggcccaggaggtgtagtctgtggctttctctgaactcttacttcctcttgtgtttcctattgttttattcatatccattggcttccttttagttccaaaaagatgtagtgcagctgtctccattatgatctcagtacatctttctccttccacctgtcatggtctgactcaactttcactcccacagctctctcccccagcatatttcttgctaaactgctgaattcaaaaatgtttttttactcagaaaccttccttgacttccaggctacatggaatctttgacccttaggccagaatattctatagcaccatgaaaactctttcataacatttatcatgggtataatttgacactcatatctgtgacattgtgtttagtgcccagccccgcccttacctacccagcctcctgccactcagactataagttctatgaaggcagagtctctctaccctttttcwcaccacaaatccaccgtctcagcaccatgtatgacaagtgctataaatatatgctgcttaatgactaagtgtagctcaatcatcacaccagataaagctcatctttttttttttttatactttacgttctacagtacatgtgcacaacgtgcaggtttgttacatatgtatacatgtgccatgttggtgtgctgcacccattaactcttcatttacattaggtatatctcctaatgctatccctccctcctcctcccaccccacaacaggccctggtgtgtgatgtcccctttcctgtgtccatgtgttctcattgttcaattcccacctatgagtgagaacatgtgatgtttggttttttgtccttgccatagtttgctgagaatgatggtttccagcttcatccatgtccctacaaaggacatgaactcatcattttttatggctgcatagtattccatggtgtatatgtgccacattttcttaatccagtctatcattgttggacatttgggctggttccaagtctttgctattgtgaatagtgccgaaataaacatacgtgtgcatgtgtctttatagcagcatgatttataatcctttgggtatatacccagtaatgggatggctgggtcaaatggtatttctagttctagatccctgaggaatcgccacactgacttccacaatgattgaactagtttacagtcccaccaacagtgtaaaaatgttcctatttctccacatcctctccagcaccggttgtttcttgactttttaatgatcgccattctaactggtgtgagatggtatctcattgtggttttgatttgcatttctctgatgacctgtgatgatgagcattttttcatgtgtcttttggctgcatacatgtcttcttttgagaagtgtttgttcatatccttcgcccactttttgatggggttgtttgttttttttcttgtaaatttgtttgagttcattgtagattctggatattagccctttgtcagttgagtagattgcaaaaattttctcccattctgtaggttgcctgctgactctgatggtagtttcttttgctgtgcagaaactcatcttgatgatactgttttaaagtgtttacaatagtctctaggcctgctctwacaaaagattaaaaagggggttcaaaagagcctaagaagaaaatatttacatgtgtaaataggacacccaaaatacagattcataaactattttcatttttgagttataatttctattctatttccctgaaatacttcaacactgaccgtcacattgtggtccttcctatagatccacaagcctagcctgaaacagagtgtgagttatcttccttaggatgttgtgtttccacaaacctcaagtcaaactgcccttttttcagctcccaaattcatcattgtatagatatatgttcttgaaaattacttaacatgttaatattctcagtttcttcaatctataaaaatgttgtcattatagtacctacaccatcagttttccatgaggatcaaatgatgtaatgtgaaatggaaagcatatagcaaacacataaatacatataatgttatttacctcttgtacaaatagttctgcttaattaacatttaaattataccccatcaatgcacataaatttaggttttgatgtgctgaagcaacatacatactgagaaaacatttctgtctcaatgatgggtaacatgtccttttctagtgattatttcttaatcttccaaaggaaagcttcttgaagtctttaacactgaggaggaatgttttccacatttttcatatgagacaaaaggctagaaaagacaaaattaaacgaatggattaaatgtatggattattttattcttcatctactatggtcatcagagctgtttatttggcatctacatcgttggttcacaggatagtttagttaaagtggactaggcagtcagttctcattaacattattaaatgacagtcacataatttcaaaagagcagcaagacttcaaggcatttaagaaaagttttaaaaaatagacaagtattcaccaaattgtaccatattctagataaatccaaaaaactgaatatggtcatttattttcaaaaaaggatatatttctacattaaatatgcaaaattctacttaaatttgcattcaaagtggaaatagttaagtgaaataaataattgtggtttcttattgaaatgtatatgacttacatgttagatatgtttttccttttttagggccttctagatgcatgtaatcagatgcaagctgaatatcttttccagtcaggtaaactctacaatgttgactttgacacggcggataaaactattcagtgtggccgacatgttgatatcttcaagcagtggttaatgtggaaagcaaaggtaggaatttgtcatcttttactcattctactttttattggagtagaaaagaaagggggtaagggtcatattaatatgcgtatttggaataaaacaccaaaattttaaagttttagggctataataatgtggtttttaacaagagcaaatttaactaatcaatcgaatgattttcattatttatttgggattttgacattttacaaccacgagatagcagagaatatatgaaactcaggtgtgttcctaagatgagaacctctcaatgtcgtcaggcgccaaacagatgtgtaagtgtccgaaatgcacaggttgttaagaaaagagggaataatgaaactggagactataggaccagtctgactcattcacatttaaattactctgtagcaatgcaccatctatattgatgaagtttaacagtttactcatgatttgttgagcactatttaaccaggcggcagtctaggtgctggcgaatgcagtgagcaaagaaaccaaatttccttttctcatgtcagtgacatttgggagggttgtggaggatttgggtgctatagacaataatcaataagttagctagaaatgatatctaaaaaaactaagggagcttagagaatatagagtgatgacaggtcatgcattaaaaacaaggactgtggatattgttttcagtgttacgtaaaatcagtaaatggttttgatccaaggagagacagaatcagatgtatgttttaaagggaattgttttggcttcttatgataaatgcacggcagggaagagaagagaaacaatatgattagttaggaggtccttccagtggtctgggcaagacatgacagtggattggcctaaagtggtagcagtgaaactagtgaaaagtagttggatcctagagtagttctaaggtaaaataaataggacttactaatggattggatgtagggtataagaaggagggagtgaaagaacattccaaccattttgatctgagcaactaggagaaaagagttatatcctgaatttaagaatgtgatggaaagaactgatttttatcattgaaatatcatttttttaagttaagactgacagataataaagtgaagattttgaatagtgaattgaggttcaatttggaagttgtggaagataatatacatttaaaaagtgtttacatgtagatagtatttgaagtcatgggactgactgtaggtagaaacaagagaaggcagggaaatgaaacttaaaacatggaaatcagggagaagcagaaaagatccaaccagggacactctgaagtgtagccaagtatatagaaggataactaagaaggtgaggtgtcagtcaggcgccgtggcttatgcctgtaatcccagcactttgggaggccaaggcaggcagatcacctgaggtcaagagattgagaccatcctggccaacatggtgaaaccccatctctactaaaaatacaaaaattagctgggtgtggtggcgcaagcctgtaatcccagcaatttgggaggctgaagcaggagaatcgcttgaamcctgaaggcagaggttgcagtgagccaagatcgtgccactgcactccagcctggcaatagagcgaaactccatcaagaaaagaaaagatggggaggtgtcaccaaatccatgggaagaaagaatttcagaaaacaaagaatgatactgtatcaaactctgtgtattgcttgactaaaatgagaactggaaattgaaaaataaatacttcattgtggttcagtagagaacagttgtgtgagaatagaaagtaaggaaatgaaaagagcaaatgtagaaaagtgctttgaggagattgactataaagggcgagagagacacagtggtagctggagggaaattcacatccaaaggaatttttgtttttgttgttatagatgagctttgttatagcatacaaatatactttttgtcatagtctaatagatggaaaatatcattatgcaagaagaaagtgaaaaagtggaatgggtactttgttgtaggcaaaaggtgagcaagtgacgtagtttacaattagatgggcttatcctatctagagtcaggtgcaatccatctgttgtattatgttggtgcaaaagaaatttcagtttttgctattatttttaattgttttttaccattaaaaatggcagaaaccacagttacttttgcacctacctaataactagaggaaagactgtatacaaataggcagaatggtagacttggttctacaatgttatttgctgagttttcctattttgttaaagagcaagaaacaagatcatctactgaaattgtgaggagtgaagggaaactggagatttagtgagtcgaatgaaaaattatctatgcaatggaggattggccaggaaactctagtcagactgtggagaggtgctgaaggtctagttgagatttgtggttgtaactttacattaacaccaagtctccaagttgcttttccccatctgtattcacctgcccaatacaaaaacggagtagccagaatattgatttaataaggctaggagacagtcaattagtgaccttccattggtacttaaaccgatttacacaactctacctttttctattaacactttcaacatatgtaactttgactaagtataaacatagactcmaatttaatattctctagtcctaatgaacataatagtatgatgttatatttaaaataagtaagcttaggtgtctttgactcttcattayctctaatagcaggggaaatttgagaaatatcacaagaatattgtaatatgcaaaaaacctaaacaagtaatttaaattctttcagattcaggctcctcatttgtgcaattacgttgtacctacctctttatacagatataatacagtttaaataaaatattacatataaacttaattatattgctataattcaccatataatccaagagttatcattgttacaagttaatttaaattaagataaaatacaattttttatattattgagcttggagcatcttgaaacttttttatgacacagtttagcttcacaagttttataaattttagctttaaaagctgaaaaaaacaaatcaacataatgaaagtatgcatggttttcattcgtaaatgctaagagaaaacaacccagaatttaaacaggaaatcctttcagaaactgcaccaaatctaccagagacaagaggtgacagtaaatactgagtcaaaattactaacaatgattttaatggtattaaaatttattatgtaatgttatttttaaaggacaatagagaaaagaatatgaaaggagacatttatgaaaatcatcagaatgtggtcaaatgtccagcataattattttcttacaattataggatcaatatgaagacagtcattgcatattcatgtctcacacctattatgtaaaagcttatggtggaatcaagaattcaatcataattatctatgattatggtcattgtcatatgatatgagtcatatgaaaatggccaaagtcacagactgaccttttaactcatctcacattttatgattttggtcacaaggaaaatataaatgactaagtaaaggaatataatttaaattctgcagaagattttttggctcttgaatttttaagaactgttccaaatataagctacttccattgccagtgtgtttacctttattcaatctgtggttatttaggtcctagttatttgcatccaatatttagatgattccattaatttttagaactctatgaatcccaaattatagttccattattttcctaaatacctctcaagaaaactgccacctatctaactgcaaattgcaagtggtttctcaggtcaaaattctaactgaggtgacaagaatatttggcagtcccaccattaccatgtactctatgaaatttcaggaataaaaaaatgttagaaacataaaaacgtgttagtacctttttaggcctgtttttcacctttattaatagaaagtgataatgggtcaagctacctgaagtcaatattgaatctcagatgtgaatacttatttattgcctgaaagatcaatctacttcagggtcagagtctgaagatacagtttctccaaatattatacaacaaaaattatgtgttctgcaccctcctcttgcccattatttatgtttaactgaaataaccgacaagattttataaagctatttctttcacccccttcctagtcctctatagaaagatggacattaggttctgttttattttgttttattacattttgtatatatgtatgtgtgtgtttcacccccttcctagtcttctatagaaagatggacattaggttctgttttgttttattacgttttgtatatatgtatgtgtgtgtttcacccccttcctagtcttctatagaaagatggacattaggttctgttttgttttattacattttgtttatatggatgcgtgttattacattaacataaaatgtatttcttactgtgggttgtttcaagaagttcaaatgtcacccttttattgcatacactaatagatgaactatatgatcctttagataattgtataaatataacttcttttaaaaaatattttgataagtgttgaacatttgttcaaggttgaacctcaagacaagtatttaggtatatacactgttatcaaaggtttgacatgaactaaaagcatctttgatatattattagccctactgtttaatttgaagtcatttcttttgttagaaatttggtattccaaaagcgaagacaatgcttttcatagaaatcatctatcaagagcctattatgtagccaacgttctgatacagatatctatatgatcagtaacacaggattacacttagcaattatataaactttgaagtttcatagataatttttactattctaagatatgcattctgtaagttcttttcctgaagattttttaaatggacaatttggaattttgggtaaacttaaaagactttaaacctcaaatttttgcacccatgcagccttgtgtaaatttcagacactgataatcccaatgtttctcaacccacttctgtacagattgtattttgtaaatatttttataaagtttttcaactttgtaagaggtcaccagttctcctatttaatagtttagctgctaatcaaagcatgcagcttgacttagcttaaataacagtgtatatacctaaatacttgtcttgaggttcaaccttgaacaaatgttcaacacttaccaaaatattttttaaaagaagtgctatttatacaattatctaaaggatcatatagttcatctattagtgtattcaataaaagggtgacatttgaactttttaaaacaacccacagtaagaaatacattttatgttaatgtactaacacacatccatatatacaaaatgtaataaaacaaattttaggggggaaaaacccttgtaatgtatgaaactaataaattccattctactctattttagagagctgtcacctgggtcacagtttggccttttacaaaattgacttaactgatgtatttttaatatccatacttttgaaaattttagccttaaaataaacatgaagctttttagatcagagaaagataaattatttacttacagaatatcttagcatagacactcacactctattttccccttgggacaccaccatgagggcatcttagcctacaggtacaaaggagatttatactatcctgcaggaaaccctaaaattgtgaaactggaatcttatgtaggagctggtacatggaggtggggcctatgaaatcttgtactctggaattcaaacaaacaaatactctttcgggggaggagggaaaggtctctacctcattctaagacagaatgaaaatatttgactcctggggagatagcaaaggtttaattaccccttcagtgggaacagacagcatatgcctccaccacaaaggggatcagcagtaacagaatgtgaaaaacaaattggtatggaaaaaaaggagacatcttctatttttaagttccaaggcttgttcattattcactattcctttagcccaggttgtcagtaattttgctcagagagccctaatcatgcaggaacatgaagtatttttcttatattgactgaattacttttaggttttctttcatgggttgtcccatatcaagtggcataacaaagaaaagccctaaagaaagtgtgaaattatgtatagccatgtgctgaggactttgtccagtatacactatcctctttgtgaatcacaaggtatttttctctgttgtcagtatcaaggtgtcagtatccagaacaattagtttaagtggatatgaaattcttagtacaaaacgcaaatagaataatacggtctgtaaaatgaatcacagaggcaaattattggtcctttttcagttggtgtgcaataccttggcactcattttctaactttattcattgactacttttttgtaaatttataatcatcttgctcagatatatgtatttctaaaaaacactgtaatatatatatatgtgtatgtatatgtgtgtgtgtgtgtgtgtgtgtgtgtrtatatatatatatatatatatatatatatatatatatatatwtactggtaactcactttgaatacttttggtaataaggtttgaaaacattaatacattaactcaccaaaatggacctagcacttattgaacatctattgcactaggacctttacgtgtgttatctcgcttttgttttccaatagttctgttggatacgtattgtaattgcccagcagggtcttctttcttgcttgcttcacagataaaaccaatgcactcagacagtggtattgcagtagagaaagagtttaataattgcggggccagcaaagtggaaggatggaagtttatttctcaaaacagcctccctgaaaactctgaagctaggggttttcaagtataatttggtaggcagagggctagagaatggggaaagttgattggtcaagtcagggatgatgtcacaggagatcaaagctgtattcttgtgctgagtcatttcctgggtgggggggtcccaagaccagatgagctggtttcttggtatggtttatcagcacaggtgatcctagctggtccatcagaatgcagggtctaaaaaatacctgaagcacaaatcttagggtttacaatagtgatgtgatctttaggagtaattgcagaggctaaaaatcttgtgtcctctgtctatatgactcctaaactataattctaaccttgtgactaatttgttagttttagaaaggttgattcagttcttgagcaaggacaaggttagttttgggaagggactgttatcatttttgttttgaagttaaactataaactttatcccatagttagcttggcctacactgaggaaggaactagggcagcttggaggttagaagcaaaatggagtcaggttaaatttttctcacwgttataatttttgcaaaggcagtttcagtaytattatgtctattaagtagatacagaaacagtagcttactgatggatggagagaactaactctaagcaatagagttttagatgagacctggctactcatctatagccaacacgtacgtttctttccacaagttcttgttggctgtcttgatacaattcatagcactataagaatggcaaagtgcacacagaatagtgataagaaatcaggttcatctttttttgtttgcatgcggagaatatggcataaaaatgatgcatctgtagatattacagatgcagggctatttcaggaataggtgacaaaaactcagtatagtggaaggtttttttgctcaaaagtaacattcctacatggtgcaaatcaggttcaggtaaaaatctgtgttgagcttgaaagaaaggagttgacttgaaagtttgttatcataatttataattattaaatatttaaatatttttatgtgagccaccattagtactcttgccaaaataatgggcattaagagaaaatctagaaatataaataaaaaattctattttgttatcatttgctttaattacacaatgaatactttgttttttgcaagaggagccatgattaataaaatttagatttcttataaatgtaattaattatataaagtactgtgacattataaaaatcagagaaaaaatagacatataagattccacaaacattacttacgtatgcaaaaataaatataatgcaaaagcctactttgagatgaatttgttacatgaattggacaggtcctggaatcataaaatgaatctggccatcagaatgctacagaaagcttaattgtccaagagcctcatctgctcttctaaaatccaccattgcatttactttgagtctgtgcttccgaaaggttgttccaggcagtgactgaattggcaaggattccaaggcagtcctcattcctaggagacaggagagtcttctgaaagctgacttggcataaagatacctgtggcctttctaaatcttcctcagactttatggtagtcatggatgctgctccctaacctccctttaacttagagccagacttcttcactgtctgatgcctctcccagtctaatcggctctctctcctctgtctttcacacagggacttccaccaatacaattcttgaggatttttaatcccatcttggcatctgcttttgggaggacctggtctaacagaatttcttaaagtttagactaaagttgccattgtctttgctatttaatctttgtagacattttttcaagaaacttaaaaatgcatttactatatagacagacacatggcataatatttttattgtcatttcaacatgcatgaatgttaccaaaagattctacagaaaaaaattccggagagtgatatgctctatggcaacgacttcagtggttcttagcctcatttcttcagaattaagagtcagaatattctttttcaataatatcaattaacttttctataagtttgttttgatttatttttaactaccagtagtttcccctgaactaattgccctcaggaaaaaaaatacctggcataatgtcaaatgataaagtggttgtctcaagaaattagttcattgacatttaatcctacctattcataggcatttcagtgactaacagtgcctttgccaagccaatgtttgtttgcaattgtgagctgccaggtttgatcatacgttcttacaatcaaaacttatattttgatttgtacatatatacatagtttaatcatttaaataaatagataaattaatgtatatatgtccctatttcctagggagaaaaataagacattaaaaaagaatacagagtgctagggatgatgagtatttataatgttaaatagaaggatcatcaccaataaaaggtgatatttgaataaaaatctcaaaaaagtgaagaggaggtcatgctgcatttaggagaagcayagctaaaaggaaacacaatttaaaaactttgagacagagcctgcctactttgcataatgcacaacaggagatctatgtggccagagtggagtgagtatggttaatacagagaagtaacacaagtaagaatggatataaaagggttccttgactattagtgtttcctagaacattacagctttcttcctgcattggaaacaagtcctagtttaaacagaaagtgtggccttttgggactcccagcatcctcacttacagtattgtatgttgtagatgcaacacgcttacattgtactgacatcgagtgtgactgggctcctgtgtatcatgagtccactggaatactatgcttatggtgcatttcaaatgctatgtataaatgaggtgttaaaacatggtagacatttatgttgcatgtatatccttagcttatgtgcatgcttcattgtsccattggactttgcttacaaaacacaagcccaaaataaaactttaaagaatttcaggactgtgacagcacatcattcaactaatatgaaacccttttgagtacgggagccctgtgcgactacacagcttgtacacccataaagtaaaccttggtcacaaagatggtttaattactgagaatacactgaagtaccacctcataggactggaaagtctccacactacataagcctaaagtaaatgtgaatggcatggcctcaacatgggcaatcgatgcctaggcagaagcagaaagatcagttaggaagcagtttcaataatgaaggagagagtgactgggctgacatagtgacagtgaatatattaagaaatatcaaattctaattagattttgaaggtatatttgcccrttcttatggtgctaataaaaacatacccaggactgggtaatttataaaggaaagaggtttaactgactcacagttcagcatggcaggggaggcccatgaaacgtacaatcatggyggaaggggaagcaaatatgtccttcttcacatggcggtagcaaggagaagtgccaagtgaaggggggaaaagccccttaggaaaccatcagatctcgtgagagctcactatcatgagaacagcatgggggtaaccacccccatgattcagttacctcctactgggtcctttccatgacacatggggattatgggagctacaattcaagatgagatttgggtggggaaacagccaaaccatatcaaaaggtaagcccagggaaatttgccacaatattaggtgtggagtgtgagaaaaagaggagcrtcctgggtgagaacaactgcaatcttttgggcctcaggaacttgaaaatagaatttacatgttttgagattgagaagactggtagaaacaagttgcatatagaaacattaggatttcagttttgaacatgtcatttaagatattattagttatcaaagtggagatttgaacaggcagttgaatatatgagtctgagtttcacagatactaaagcacattaaataaaactgaggaacatcttgaaggtaatttaaagtatcttacttaaattgagcctttgatttgatttattttaaatttacagggaacccttggctttgaggaacaaatcaacaaatatatggaacttgcaaaatacttctataaggttttaaagaaaaaagataactttaagcttgtgtttgatgcagaggtaaggaggactcttagctttttatttatgtaatttttgagataattcaatggatctctattttcttttctgagtatttttatctgaatctgttacttatctcatgtgttgggagaaccttataggtatacttaattattgtaagcattttattttacctaagctcatataagttaggttttaaaacatttttaatttaagttccttttcttataagcaaagagtccaaaagactaagttaatgagtaccttcaatttttacatttttaaaacaatgaaactgtttgcttttaactgcgtctctggcatctctgacactaaataggatgtaatttaattgttcttagtttttttttttttgtatcttagagtaggcaattgcatttccagacagtagataatataagagaaggtaggctttaaattataataatctttggtacattgttatcaagtcactaagctgatattaatgaaagatttgagaattttgctagcattacattgtatatcaatctttaaggctcaataaaccttctactggcactcattaaatcattctaataagagtaactattaagaaacaaaggtgccttgtttatcttctaaattgtctccgtctctctctgttattatcttaatatttgcttattgctctgcttttaagtgaaaactaaacttttctttgtttttaatactacgcacaatctgacagtttaacttcgtctctgaaataagctttgatagctgacttaagttcccttccatcctttgtctatgtgaatgacactcagtcatctaagccagaaaccttgaaattcatcttgaaagcctgacattcgtcatcatgctgatcaattctttcccttgaagcttttggaaatggaaacactcctatctacactacagctatgccttcagtgaagtccttttcattctctcctgaattatgagaacattctatttactaatatyctcctatcttcaatcatacttccctcgaatcaattatctttcaacttgagtgatctttctcaaatrcaaaactgatgctaccattatttgtttaaaatagttgacgtcatggtcatggcatggatgaatggaagtttgaaggaatttgtaaaccaaaatatggggaagatgataacatagatatgaaaatcctcaagaattatgactcaagagtttattggagaaacaagcagatcccgtgccagactaggccctctctgaggaaagtagctacttcttttatctctgaatccaggccctgacatgtactaagcacagaaagaaacytttatttaaatacataaacattaagtgagataaattaaagtacttctgaaataatgaagtcactaaagaattaagtggagtttttatggatacttgtaaaatatttttctttgatttagcctgagttcactaatgtctgcttctggtatttcccagcaaggcttaaacatattccaaaaggttttgaaagagatcaagaactccgaaaggtaaaggtttttttttctttttaatttttagtgtgtggtatttttaattctaattttaatattgacttttaatgggtctatttagtttggttagtggattggtggtcatatgattccaagctactggtttaataattatatggggctcactgagaactcaacccattagtcattttgaaattaatccattcattggttacatattgaaaaaatatttcaatgcctaatatgcaatcagctgaaattcatacgctttggttaatttattcattagttaatatttcccaggtataccagtaggagttgaaagttaaaaaatgaatagacagaatccttgtcctcagttggcttgaaaagttagtgggagagaataaaaaatataaataactacaattccaaagaaaaatagaagagatacttaaataaatgttatcaattttaaaatatttatcataaattatctgagcaagaatctgagagatattttataatagttccattaacaatactgaaaagaattaaaatgaatgtcatacaatgagaatatttcatctttatcttcataattaaagtggacattatcaccactatatgccatttatccatatatttatttttatttwttattttttgagaaagtctctctctgtcgccgaggctggagtgcagtggcgtgatctcggctcactgcaacctccacctcccgggttcactccattctcctgcctcagcctcatgagtagctgggactacaggcacccaccaacatgcctggctaattttttgtatcttttagtagagactgggtttcactgtgttagccaggatggtctcaatctcctgaccttgtgatccaccygccttggcctcccaaaccgctgggattatgggcatgagccaccatgcctggccctatccatatatttaatatgagcttttgcctaaacttaatcatgtatcataatatttattttataatattaccacccctttctgaattatgctgatagttcaaccacgtattttacataatttgagttgccctaaagtaagttgaacaaaaattgtctgacattaatgtttaaggccttcaactttttctatcatcattagtaaatttcactgggcttgtaacagaaaatgtagttttctgttttccttcttgcttttcacagtagtcttatttaagtatgttatggtttgaggcaaggactaagtgaagctcttattttttttttctaagcatataaatgtcaccttccatgagggtagctaccaccaactgagttagtcagaaacaagaaggcttctagaggtacacccaaaccactcaacctcttagagttctacacatgttcctgactggagggcaagccaagactattaaacaatttcccacagtattgcagataataaaaaatacccaatatagtattgttatattgaataaaatattaattagagaaggacacgaaataaaaatcctgactattgaatgaaagaattgaattgtatgtgtgtgtgtgtgtgtgtatatatatgagattgtattgtgtgtgtatatatatawaattgtttgtgtgtatatatttacatatgcgtaaatatatatatataaatgtatatttgcttctgcactgccatcagacagtcttataggaaagttaaatatggatagcatttgtagcatttaaaggtaaattgtttgcagaaatagaccatgaataagtgcagattgagtagttatagaacgccatctttggcttttctgagtgttcstgtcactttgccctgtaacagtagccaaagttgytttaatgtgctctaacgccacctgcatgatgccattttaggagctgaacaagatacttaaacagagcttgtctctgtgaaatttacaaagaaactatatttgctgcaaaatagtgaccttgtagaaaaactcaagatatacaataatgaatgattcaaataatgcaaataatactaaaacatgatactatttttccattctctatttcattttatctctttcccaggtacgtctatttgaatcgccatataaatacaaggaaatggcacatgcctttctttaatgcagtctagcaaatttatattactttatgsttggtaattgtaaatcatggggtaatgagagctgcaatatgaatatagaatttgctgcttttttgtactaagctacttcttaaaaattatccctgatggtcttaaattgcctacaatttacttgaagctaatgatagttatgtagccatctggaataaggaagaatakttacttgtaaaacttctttataataatatttacacttacacacagattgctccaaagattaaagcacagatgatgatggaaggcacaatcatgataagctaccagccatgtggagacaaagtaaatattttgcgaatggtttttttctaatcctgcctcaagacagaaagatgttgactatcttattgatgaaattgaaaggcttgggaaggatttatgatacttcaatgtgaacttgaatatcccatgtaaacatcaacttaattctattcctaaggataataagaaaggaatattgaaactgttataaaaatgttatgaataagaacttttaatttttattctatgctatgtaagatgaaaggtaagatgaaaggtaatccagcttatacacacgtacacacacacagtttgtttaaatacttagcatctgttaaatgttaggtacgttcttagtgtgcttaggatacataagagacaaaaaatttctcctcttgtgaagagaaattccattgtggacatttaataccttaacatgtattttatgtctttgaattaactgaataaagacttcctgtattgaaatcagtttcagtatcctcttgtagtatttcatctctgtcaagaataaaatatataacatgtttctcttttttaaacaattacgatgtataaatctgtatattttggagcagagagagggaagggaatagctgggctgacatatttgccttttgatccttgcatatttatttggaagtgaccatagcttgtatcaagctcctaatttaactcatttttttccgcaacatcattttaatgtccctaaagatcaactgtagtgacacccttttgtaattatccaaaaatacacaaaccgtagctaacattacatgaacacttctcgtgtatcacatggtttgctaccttgctaacctaacttgcgtggtctcatttaattcttgattgacattatgatttaaatgatttattgtctccatttcatgaatgtgaagattaaggcttaaagtttaaataatgtgtctaacgtcatgctgttgatgagtaatacaatcaaaatctgaagctagctaggtttcttctcaactgtggatagcaaaaaatctgccaaatgctttgctgaaattcatggacagctttgctcaataaattctagcggatcctttataaaactacaggtcctttaatggcaatgaatatttttgctattttcactttgatgaaaatgaataattgggttttaaaccttctaagtttaaactgctggtaagcttcattatgaaactcctacttaaatgtttgttgataatctgattaacagccattttccagttcaaaattaccttgacataattcattttattttagctgattatttttctaaagaatacatagtcacaattccatgctcatgggtaggaagaatcaatatcatgaaaatggcaatactgcccaaggtaatttatagattcaatgccatccccatcaagcaaccaatgactcttttcacagaatcagaaaaaactattttaaagttcatatggaaccaaaaaagagcccacattgccaagtcaatcctaagccaaaagaacaaagctggaggcatcatgctacctgactgacttcaaactatactaactacaaggctacagtaaccaaaacagcatggtactggtaccaaaacagagatatagaccaatggaacagaacagagccctcagaaataatgccacacatctgcaaccatctgatctttgacaaatctgacaaaaacaagaaatgaggaaacgattccctatttaataaatggtgctgggtaaactggctagccatatgtagaaagctgaaactggatcccttccttacatcttatacaaaaattaattcaagatggattaaagacttaaatgttagacctaaaaccataaaaaccctagaagaaaacctaggcattaccattcaggacataggcatggacaaggacttcatgtctaaaacaccaaaagcaatggcaacaaaagccaaaattgacaaatgggatctaattaaactaaagagcttctgcacagcaaaaaaaaaaaaaaaaaaactaccatcagagtgaacaggcaacctacagaatgggagaaaattttcgcaacctactcatctgacaaagggctaatatccagaatctacaatgaactcaaacaaatttacaagaaaaaaacaaacaaccccatcaacaagtgggcgaaggctatgaacagacacttcttaaaagaaggcatttatacagccaaaaaacacatgaaaaaatgctcatcatcacatgctatcagagaaatgcaaatcaaaaccacaatgagataccatctcacaccagttagaatggcaatcattaaaaagtctggaaacaactagtgctggagaggatgtggagaaataggaacatttttacactgttggtgggactgtaaactagttcaatcattgtggaagtcagtgtggcgattcctcagggatctagaactagaaataccatttgacccagccatcccattactgggtatatacccaaaggattataaaacatgctgctataaagacacatccacacgtatgtttattgcatcactattcacaatagcaaagacttggaaccaacccaaatgtccaacaatgatagactggattaagaaaatgtggcacatatacaccatggaatactatgcagccataaaaaatgatgagttcatgtcctttgtagggacatggatgaagctggaaaccatcattctgagcaaactatggcaaggacaaaaaaccaaacacctcatgttctcactcataggtgggaattgaacaatgagaacacatggacacaggaaggggaacatcacacaccagggcctgttgtggggtgggaggagggagggatagcattaggagatatacctaatattaaatgaagagttaatgggtgcagcacaccagcatggcacatgtatacatatgtaacaaacctgcacgttgtgcacatgtaccctaaaacttaaagtataataaaaaagtgaagatgtacacaaaaatacaaaaaagacaaaaaaatataacaaagaggttaagaacacaaattctggaatcagccttcctgggaatgaatcctagctttgctccttactaagaatttctctctgtattcactttccccatcactataatgaacaataatggcacttcttcacaggttgtatgagaattcagtgaattggttgatatattttaagctcttaaaacagtgtctggcatgtagtaagcccacagtacatgttggcattattaatatcgcaacttgacaaactgtgaacacacactttaaatgtggtttttgttttgttttcggtggtacggttttgaattcactgttctctgtttcaaagctcatgtgctttctagtttgtctttctgcttttctgagggcaaacacttgtgttcgaggcacagtggagaacaaagagacagcagctgggcctggaaggatggttagacatttgtttggtgacaatgtcaagaaacgtaagatctgcagctctttaaacaaacaaaatgtaaagatattatgaatttgtcacttgaatgaaacatatttaaaataattcaacaaaactcaaaaaagagacattttaaaattatactttggttctataattttgtttctaaagtgtaaagaatgtcagttctctgataaaatgatcagagtttatcagaaaatgtgatattaatctaggaggaagagacatatttttgtcaagtaaagaaattttataagaattttagccatgaattatttttgattcacagtcaagttgcctgcctgcattaacatatcctgtaaactcagtgtctacgtttctaacagaaaaaataaaggtcatttttttgtgcatcctactccctgtatttaccaatataaagatatatttggagaaatctgtgagagactggaagattttggagacagcaagaaatacatttggatcaaaacaatggatgttacatttgctgagctgggtcctgtgttcccaggcagaccaaatcaacttggctgcagcagagagctcacaatacaaacagtaattgaactgttagctttgaaatttcctcctggcaaccctgaaattctgtttggggccatgtcaccactgctgtgccttggtagcattttatgacacgttcaatctttcacagatagtacactcagcagttccaagtctcagttctcttattctcgtccctcaaatcatttagaggtaaatagaaatggaagtagaactgtatccaaattatcctttgctttagtcaagagctggggggacatagtgcagactttatgttaatttctttgcccagatcacacatctcagggaaaaattgacataattaamagtgcaataacctcattcaacatcgttaaccttagcacatgcagtccacttcagtgatttatggataactttgaaaatcaacatgattcagcccctttcaaatcctgtggattgattattgcacaattacagcaagtacattcaataactgtgttataaattaaattttcctttaaacagatgatttactgtgatagttcaacagtgctgaatttttgttacaataattctgtattgaacagttaaatgctaccaagaaataagatgaaaatgtgtgaaaatgccaattatagaaggatattttatagctttattaaatatggcctatacttcttcttgatttccaaaatgatttatagttctgtgattttgtccctcataaaagaggcacaattttgcatcattttgcttttgattttatgcttacctttcaccctcttaactccaaagccgtgaaaggtctttagactcctcattgagcaaggaaggactcaggctaggacctagaatacagcagggaacaagtgaagctgtattacttgttgatcgattcacacatttacaagacctcacaaaaatgcacacaaataaatgtgatcatgtctaagtaagagtagctttaagggacctggctaaatgttattacttacttggtacatttagaacttactataaaaatcacagaaatttaagctgtttctccttctttggaagagtacatgtgttatagacttaggtaatctaaaattggcacaggaaaactctatgtcaaagtattgcaggcatcataaccaaaagaactaatgtttatttattgttttcttaatcccctcataattctttgtataatattgtcttaattcaaacagaggcttgggattcagacctaacaaaggcaatacttgttcaaataaagactaaagacttaaaagtatttaaaagcaatacaaaatcaaaatacaaaaatcaattttatgtctaaacactcgtagttagcaatcagaaagtgaaattaagaattgtttttctatttacgatagcaccaaaacaataaaattaattgcaataaatttaacaaaagaagttcaaaacaggcacacaataaactgcaagccgtcactgagagaaattaaagacctaaagaaacagaaataaatccatgttcattatcagaagacaaatttcttgaaaattctgtactccccaagttaatctacagacaaaacaagagtttccataaaaatcccagctacattttttaggtaaaatttgacgaggatttgaaagtcatttgaccaaacatttctccaaagaagatacacaagataagcacaggaaaagatgatcaatatcattaccgttaaggaaatgtaaatcaaaaccacaatgagatatcacttcacacgcattaggataactaaaataaaaagacaaacagtaccaagtgtttatgataatgtagaagaaactggaaccctcctatatttggggcagataaatacaatggtgcaatgactttgaaaaatcagttggcatttcatcaaaatgttaaacatagttgccatatgacccagaaattccactcttaggtattccacttccaaaataaaaacttaggtccacatgaaaacatggacatgaatgtttatatgagcattattcataatagccaaacagtggaaaaaaacaaatttccgtcaactgatgaaagaataagcaaaatgtggtacagtaatgtggattatacttggcaacagaaaggaatagaat

SEQ ID NO: 95615 - DNA, 33187 bp, Homo sapiens
ggcgcggtggctcacacctgtaatcccagcactttgggaggccaaggtggacagatcacctgaggtcaggagttcaagaccagcctgaccaacatggagaaaccctgactctactaaaaaaaaaatacaaaattagccaggtgtggtggcgtatgcctgcaatcccagctactcgggaggctgaagcagcagaatcgcttgaacccgggaggcggaggttgtggtgagccagattgcgccattgcactccagcctgggcaataagagcgaaactcgttctcaaaaaaaaaaaaaaatttaatgtaattcaatgtaatctgaggcattacagtgttgtttctttcttcattactttagcttctttttttttgagacggagtctctctctgtagcccaggctggagtacagtggcgctatctcggctcactgcaagctccgcctcccggggtcccgccattctcctgcctcagcctcccaagtagctgggactacaggagcccgccaccgcgcccggctaatttttttgtattttttagtagagacggggtttcaccgtgttagccaggatgatctcgatctcctgacctcgtgatccgcccgcctcggcctcccaaagtgctgggattacaggcgtgagccaccgcgcccagcccattactttagcttctatttcttctgtattttgcagtaacagtactgtatctttacatggtgttttacagtttcttttttttttttttcttttttggacacagagtttcactcttgttgcccaggctggagtgcaatggtgtgatctcagctcaccccaacctccgcctaccagattcaagctattctcctgcctcagcctcccgagaagctgggattataggcgtgctccaccacgctcggctgactttgtatttttagcagagacgggggttctcctttttgttcaggctggtctcaaactcccgacctcaggtgatccaccagtcttggcctcccaaagtgctgggattacaggcgtgagccaccacacctggcctacagtttctaaaacatttttctcacttataatctctgaagtcccacaacagccttgggcagtaaaacttgcattgacattagagaaaatcatgttttctttttctttcttcttttttaaatagagatggggggtctcgctatgttacccaggctggtcttgaactcctgggcttaaagcaatcctcccgcctcagcctcccaaagggatgggattacaggcattagccactgtgcctggccaagaaaaccatgtttttaacaccatcaatgtgacagatttgtgaaaccagaggcatgctggtaaacgtttaacaaccggtaagtgtttaacaatcacccagctgagggtatggagaaccctgattgtagtttgccaatttcactgatgtaaatgctcacaacatggctgctttcaaaccaccactgtgatgtcaactgactccccaaatttctgagagtgtaacgattagttctcagaaacagtaggaagccagttccagcacactacttggtcactttaaattgaatctaaggccaggtgtggtggctcacacttgtaatgccagcactctgggaggttgaggtgggcagatcatcagtccaggagttcaagaccagcctggggaacatggtgaaatctggtcgctactaaaaatacaaaaattagccaggcatggtggcacttgcctgtagtcccagctacgtgggaggctgaggtgggaggatcacttgagcccggggaagttgaggcaacagtgagttaagatggagccactgcaccccagcctgggtgacagagtgagaccctgcctcaaaacaaaaacaataacaaaacaaaaacaacaaaaaaagtttccatatcttgtttttataaggaaagtggtttttgttcctttctttttttcctcttcttccaggctagactgtggacagattaagccagcttcaataatgagaataaagactttactctatggtcaaaatgggttagaaggaacctggttccctgaatgatctcatggaacagagctgcctactcaccctagactacctgtctacctctgtactgttatgtgagagagaaataaaccttaatctttgagttattgtatttggggatctctttgctatagtagcttagtgacttctcagaagaggcaacatttaagctaagatctaaatgacaagaatgaataagccataccaagagggagagaaagagcatttcagataaatgaaaatgacctaaagggagacaggtcagtacggatggagtacagaaagtgaatggtagagatgaggttggaggataattaattcaggaccaaatcaaataagggtttgaaggccagggtaagaaattttgatttcaattgtaatgggaaacccctggagaattttaataagtgtcataattgggcttattttttaaaaacatcattccatcttgggctatggagacatttaaaaaattaaaacaaaaaaaatcactctagctgctctgtgttaaaccaagtgaggtggcaaagtgaagacaaacactactatagttagaaagctactgcaatagttcaggggagctaattttgtgctctgaactagggtggtggtagaaatgaagacagagagaacaaattcttgaaatgttttagaaatatcaacaaggctaatgatgagttggatgtaggacaatgcaggaaagagtggaatcattgatgattttgagtttaagcaactgctgtataacgaggtgatttgttgtgtaaagggtggaccataaagaggtaagaagagataagagtggagacaaagaggtcagtggaaagcttgagttgaagacagctgagtttttgtaatttgttttgcttttgtggggaggaggcagattttgctgtgaaaagtaacagctcttttctaataatgttagcttctatatgcttgttaggcattcaagtagtcaggcaagtgtctcaaaggtttgaaattcaagggagatgtctgggttggagatataaatttgaaagtcattaatactatgggcaggtcataaagccatggactggatgaggtaggtcacctagggagaaaatgtatgtagaaaagaggacacaggcatagccaagagcactgcagcattgggaagaaaatttccaaggaaaaccaaaaaagagagatgtcacgaaagcctggagacttttttctagaaggaaggcatagttaattgtgtcagaagccattgaaagattgagtaaatggggattgagaccattcactggtctcaatggctttggcaaccactggctttggcaaaaagtgggccttgagaattgccatttcagtcaagtgctaggaataaatacccatttggagaatttgaaggagagatgaggaggtagggaccacacatacagacatgtctttacatcttttagggagttttgctgttaagggaagcagagaaattcggtgataactgaaggtagaagtggggtcaagtaaggatttttttaaaatttgagtaagatcttaataggaatgattactaaagagaataaagggaagatgtacaatcagaggtatcttaagaaggcctagtgaatgggagtcctttaagtgttttatgtgcaaagtgctatagccaatgaggcatttttaaaaaactggaaatctgggggaaagatggtcactcttgatagaaatggggctgagaagggaaatcattttagaaataatggtaaatgtattttggacatattgagttcaggaaaatatttaagcaaagattaaccaacttagtacaagggatttttatttttattatttctatgatctgaagagaaaccagagtatacaaggaattttgagcttcaagataacaagaaaaatgatatattttacaaaggaccaatccagttggtagactatttaaattatcctatatcaaattaataaggatttactttgccaagattcttggcacttttatattaacttaaattgcactgggaaaaaagcataatagtagttgagaagcaactaattataagcaattataagccaaattatgtttataccacaattagtgtttgaggtggtttagtaggcagattcttcagtaagaaccatcaaataattgaacagcttgtaaaacacagaaatacttcttttatctttattccaagtagagtaaccacattcttttatcattataaaataagcaacatttattatcttttgtcccaatccgcagtttgagttggatgcttataaaacatggcaagagggctgggtgcggtggcctcccagcactttgggaggccgaagtgggcagatcacctgaggtcaggagttcaagacaagcctggcaaacatggtgaaacctcgtctctactaaaatacaaaaattggccgggtgtgttggcatgcacctgtaatcccagctactcgggaggctgaggcaggagaatcgcttgaacccaggaggcagaggttgcagtgagccgagatcacgccactgaactccagcctgggcaacagagcgagactccgtctcagacaaacaaaacaaagcaagagtagtttatgtacctagctcacaacatagcttctttcaacaggtttcacggagacacgtgaaccacgttcttgtaagacaagagctattctacagggtatctagagtgcaaaccsaaaccatgtctttttcagtggatttttcatgttgacatcatcttatttcactttggggaaagtttttttctaaggatgatagcgaaaagtccttttgtcttgtgacaatagcaatttttatgtcagcttgggtttttttcctcccatattcccaagtaaaagtaataactttgttaccagttttgccatctgaggttaaactgtttgaccatggcttgacgactattttatacttaacacttataaaatattagactgatagttatttaagttaccaccagtgatagctctggaatccctgttttattaatttccaggtaaatccttcttaagcacatgggaagatagcactgtaaattttggggggtaaggagaacctccatcaattaatacatcagcttgataaaattcaaagaaaaacatgatcaaataagttcagattatatttaacacattcagtttctagaagtagttttgctgaataaattcccaccagttgagctaatggagcaacggagctgccagtgcttcccggaggctgctgtgctcagccaattcggaggcatggcgagccacacggtgggaggtgggtaaagccggggccctccaaggctgggcgccacgttgcttttctcttctgaaataggaagacaatgcttctggctattgtataaaccagccgaggactgctttcattcgcacatcagccaaggcgtgagcagaattaaagcgccttctaattcgacccctggcaacgtgcgcgtcacggacaaatgtttagttttaacgcctggctgcgttcgccttgggaaaacacacttttaagaatggccaagtacctcagcagtcgcggtgaactgcacaagatcaaaaccaccacgccaacccagcgctggccaccgtccccgctgaaccccgccaacacccctaaggacccacccatgttttctgctaatcattttttttttctaaacagctctgcacagcctttcctcattccgttcccgctctccccacccactctgcattcgatccgaggtttctagtccccagctggacatcacagcaccaactcccactcaggagccggccagagcccgagccgcagcgcagtgggcagctccccgcgctctccgccaggccctcggccagccagccgccactcggccgcgagtgattgacaggcggcagcagctataggccgtggaggtgggacgatgcgtcacttcctggtcttttggggggagccgggatatataagggcggtgctcacgcagcgctctcgcttacacagtatggccggcgacattagctagcgctcgctctactctctctaacgggaaagcagcggaatacaagagactgaactgtatctgcctctatttccaaaagactcacgttcaactttcgctcacacaaagccgggaaaattttattagtcctttttttaaaaaaagttaatataaaattatagcaaaaaaaaaaaggaacctgaactttagtaacacagctggaacaatccgcagcggcggcggcagcggcgggagaagaggtttaatttagttgattttctgtggttgttggttgttcgctagtctcacggtgatggaagctgcacattttttcgaagggaccgagaagctgctggaggtttggttctcccggcagcagcccgacgcaaaccaaggatctggggatcttcgcactatcccaaggtgggtccccggggcgctcgctgacatccgggcctgggggctgtcgccgccgccgaggcaccagccacgggtggagcccgagttccctcagctttcagttgggggcaagtctgcggcctggggtcgcttcggcggccttggaaggtgcgcggtttgggggagagcggccatgtccacgcgggccggagccggcttctcccgccgtggttgccgcgcctggcattgccctgggggaggggaggaggccggcgcggccgcgtgctcaggtaacgtcccgcgctgggcggcgggcggcgcggcccggggtggttttgcggcccgcgcctcccgacatttccctccgtagtagttggcggcaggggccccaggtgggggtcgggggcgcctgcgcgggttgcctccggcaggtgtggctcggcgggcttagtcaggcgctaattcgggcgtgccsgcttcggggaatggagggcgggagcggcgcttgttcttgcctcgggcgcggataggaggggccctcccggccttgtctgaggggctggcgaagaggcctcccacccgcggcggccgcgggcagcatgtggcgttcgggcggcggggattgggcgggagcagttatgtcgcagtggcggggccccaccgctcccctaacatgctctgcgccagagccttttcggggcggctgggcagacggcgcagtccccggggccgccctcgacacggccgctgaggccgctgggggctgctccccaatctcttgaccttgggttgtgtaacctgctacggagccggcggagcggggcgggagaggtgcgggtggagggaggcccgcctgccccaggacataatgcctctaatgccttaagcttgagcaaaggaatctggggcccactcccactgcgggccgtcacgcgagagatacttgggctgmccgcgccgaagaggcgttttagttggtattgctgtggaaatccatgcttatataaaagcccagagatcccgtggatgcttaggccttgttcctggcggcggtcgcaccggtggccaccaatggccttcctaggccctgccaccggatccctggctcctctgcgcacgagtgcggctagggtggcggtgcagcggagtaactggcgtggccagcttcattgagaggcggcgaccaatgggctcctgggccgcactcagagcctggccccagggtgtggaccaatgggcgttttaggagtgttagctgttcttggagctgtcccttgacaaaaagcaactggaaaagggaatccaggcagacacgtgctaccgagactttaaggcacgacgggaaacccggtttctagcagtgtatcttgaacgattccattgtagaaaaaaatactagtcatagctaaaatgtcacacgtctcatttttttcaagcttcgtgtgacacttaaaatgtctatagcgcttactacgtgccaggctcacgtgagattataggaagcggactttggtcatggagaagcttagtatttccttcatttcacagatgagaaagatggtatttgtgatagacgtttggtaaaacgattgtgatcaggataattaacctagaaaatcttggcaagaacctagaaaatcttgggtaagaacagtcctagaaaacgaataacagaagttgtcactttggctttttaaatgtttgagcccttaaataatagtaagtacatgttcttaataaagggaagaagattttgttctccccaagttcttggcggtttggctgtttagagcttcctgagtcaaagtggagagaggaggaagaggctttttacaaagcagcctgctttctttaaatgtttaagaaccctttttactttgtactttaatcagcccaaattgttttactgctccagtgtggcttttaaaatcatggccaaagttaaactttgaaggacaaaatattcccttgtgtagatgatttagtgccatccattttgtggacatgtaacattcattgaacaactattggtagtacactgccacattgtaactgttgtagataaagcaagttaagcaagaactgaaaaatatgttgatttaactaaggtcccgtgataaccttcgttggaacatttttcagtgaccactcaagtggttaggttatttaccaggatgtttaaaaaagcctgaaatagtaggtgttccttgaatcacctaaaatcaacagcctagcaaagagagtatcatggacggagtccggtcggtggggacatggggccagccccagagaccccagggaaggataatcggtcatctagaagaataaagcgtgacatgttttactcaaatgacgtgattaagtgcatagcctctggaataacaagatttgaattcaaacagcatttaatagctgtgtgagctgtttcctcatctgtaaaatggagacaataatggtacatagctcatggaagttgtgaagaataaataagttaatatgttatatgtagtacgtaaactgttatctttaacactttaaagacaggatccctctatagcccaggctggagtgcagtggcaggatcatggctcactgcagccttgacctcctgggctctattaagatgtgaataaactaraagtaggttaaaagatgaacagatggaattaaacaaatctgtttataaagcataataaacatagggacataaaaacgattaagagaatgaaaggcttaaatgtccaaagagagcattagtattgatgctaaagacaaggataacaagataaggatatgagggagaaaaaaatcctggaaaaatagctttccaaaactaatgcaagaagaaatggagaacccaaaacagtcctagaacacctaaataacttgaatcagtcaatcatctaggcccagatgatttcactggagtgttctgtataattcaagggagaaaatatccaacttttttcacgcattcttctgggaaacaacatacttccctcggttttctcatcccaaagtctgaaatatttttttctcctacacgatatttacctttcatatttagatctgcaatccatctggaattgattttgtgtgtggtgtgagggaatacactttaaacaaacttggctcatcagtccaagctttaatgcttggaatcttttctgaatgtacacctttttactaaacactgcttccctcttgtagaccatttaagatattttatcttaagtgaacaaattatgtaatactgagaaatttaacaaagaaaaatcttttatgatatagcttgggttaaacaatactgttggagaaaagcagcagtccaggtatatccagatgaataaaggacaattaagggagaggcggtttcttaggggtaacctgcagttttctctgatttttcagattttacggatgttgaataaaaatcagtgaccatttaaaaaatggtttagttgttggatcaaagtgctgtaacaaacaaaagctttttataagacatggcagctttagggagggtgagagtagtaagaaggaaatctgttagaaaatagaaaattttgctgagaaaagaatgatttttcaggactggaaatcctattactgtgctttactcagattttataaactaaaacataatttttagtaaaggattggggcagttgtaaagatagtcatacctcagcttaactttccccaaactcatgacttatttgactacatcattatgcagcattattgcaatatcaataatttacattgaaggaatttacaacccgttgccaaaaaaccttttagtgtaatgtttcagagtagaaatgcttcctrctaaagaataaagcttctcgttacattcctcccagcagtttcaaaaaggtttcatggctgggcttggtggctcatgtctaatcccagcactctgagagaccaaggagtttgagagcccagtctgggcaacatagtgaaatcctgactctacaaaaaaaattgaaaaattatctgtgcgtgctggtccatcctggtgcgtgtctgcatcccagccactcgggaagctgaggtgggaggatttttttgagccattgggggatcgaggctgcagcgaaatgagattgcaccagtgcgctccatctggtggcagagtgaaaccctctcaacaacaacgaaaatatttcaactgttgtttacaaaccatgtatctttaagaagcacatgttgaaagtagcagaaaactgagaggagtatcccgatttggggtaaaaatttgagatagagaaacaataatgtgatgataataggttcatatctttgaacaaaagggaggaggcttatttctcaggttatctgaattcactgcygcaggaaggcaccctcagaatctaacttctggtcagtctagctttactcaagaatgatctggttttaggatgccttttacctaaagactgcttactacctggggtagaggcaccctgatgaatgtactgtaatgagagcctctaaaacagacctaaaaatatgaggtaagagcagaattgagaagctgcagtgactttggataaattacctgaactctgaaaccagctggttttacattaggaagtaatgagtaatctaatgacctggaagcttttcaaataaaaatttgcaggcatcatcctcagaaagtgtctgacctaactgggtatgggaatagcatctatgtattgagttttcaggtgattagagcataaccctgcactaatgggatccttctgtatttaagttcttggtcttttttttttttggacagtctcagtcacccaggttcgagtgcagtggtgccatctcagctcactgcaacctcygcctcccaggttcaaatgattctcctgcctcagcctccctaatagtgggtactacaggtatgcaccacgatgcctggctaatttttgtatttttagtaaaagacagggtttcgccatgttggctaggctggtcttgaactcctgacttcaagtgattgagccatcgcccctggtccctttgtscattttttaatcactttttgttgagttgtgtgtaggtgtgtcttttrctttggatattgaccccttatgaggtgacttgcaagtattttattctgtaggttgtcttttcactcgtttcttttgatgtatagaaatgtttacattttaggttttcaagttccatttgtctgtttttgattttattgtatgtcatatccaagaaatcattgccaaatgtaatgccctgaagcatttaccctatgtattcttctaggagttttattcgctgttaatgtttaggttgttgatccattttgagttaatttttgtttatgatgtaaggtaaaagtccaacttaattttgtttgcatgtggacatccattttttcccagcactatttgtggaagcgatgtttttccctgttatgtaggcttgggactcttgttcaagatagttgagctcagtcatttacttctttttttgagacacgcttgtcttgctctgtctcccaggctgaagtgcagtggtgtgatttttggtgcactgtagcctccgcctcctgggttcaagtgattctcctgcctcagcctcacgagtagctgggactacaagcctgcgccaccacacctggctaattttggtatttttactagaggcgggtttcgctatgttggtcaggctggtcttgaactcctgacctcaagtgatccgcctgcctcgggctcccaaaatgcatttaatcaggcgacatagagaagtcttgttataatataattatcttgtccctgtagacatttctaaattctatttttattagacctcagcctctaagaaaatgttttaaatataaaatgtggcatgccactaaagtgttgtttttcagacatacaatttgtgtgctgttattaatatagaacatctatttttctttgggatcatttatcatgatctctgattatatttaatattttagtatctagtctttaagtgaaattagggtatctcaacctcagcattcttgacattttgattcagataattcactgttgtcaatgactatcctgttaattataccgtgtgtagcagtgtccctggcctctatccactgcatgctggcaacaccaccaccaccccagttgtgataaaaaatgtctccaaatgttgccacatgtcttctgggtggcaaaattactacaagttgagaaccactgagttagatcagagaggtggcatttaagatgagaaaaaggaattcaaatcaggaaatactcaatctacatatttctttgtgttttataaccacctaagaattgtgtgcttcgggccaggcatggtggtgcatgcctgtaatcccaaatcccagcactttgggaggccgaggcgggtggattgcttgaggtcaggagttcgagaccagcctggccagcatggtgaaacaccttctctactaaaaatacaaaaaaaaaattagcctgacatggtggcagatgcctgtaatcagtcccaactactcgggaggctggggcaggagacttgcttgaacctgggaggcggagtttgcagtgagctgatagcataccactgcactccagcctaggtgacagaacaagactgcatctcaaaaaaaaaaaaaattgtgtgcttgaatagctttataataatttctaatgactagatcagtattacgtgagctgtaatgtgaacaaatcccaaaatcatcttgctatcttgcttctcttgattctgctttatatccatcaatttgatttattgactctttaaatagcaaggattgccaaatagatcagttttataaatagtttataatagactagtgcttcaaagtctcagtttgtagtgtacttgggagtgaagcagagacaagaccactatcactactgagcctgataaaacattctagcttaatactatcttttctatttttgacacacagtctcactctgtcgcccaggctggtgtgcagtggcacgatcttggctcactgcaacctrattttaaaaatggctctgtcgactgtataaagcactttgtcttttccatcattaatttgatcagaaagcagaccactgaaaacctttcctccaaaacaagagtcagcaaastttctgtaaaggactagggagtaaattttaaattttgcaaggcagacagtctgttgcaattactcagctctgcccttatagggagaaaataaccatagtcaatgtataaatgaatgggtgtggctaggttccagtagagctttatttacaaaagcaggccattttttcccacagaaatgtgatagaaataatttgtgctgaaattttcagctgttgcagagtttttcacctcttttatgtacatgtatagcattgtattgactacttttttctttcgtctattttgccctctgatttatttttcttgagcttagtagctctggtaaatgcctttatcatcactaggttgatagacagtttaactgtttgtcctaggttgcttaaagtaattgctttcttttgatactatgattgaaaaattctgattaccggagcattactattagttgaggaaaggtttgaatggagaattttattaactgatgatgagtgagtataagagcattttgaagccartgggttggcacgtgcctataatcctagcactttgggaagctgagatgggaggatctcattagcccaggagtttgagaccaacctgggcaacatagggagacctcatctctacaaaacaattaaaaatatattagtaaggtgtagtgatacatgccctgtggtcccagctacttgggaggctgaggtgggaggatctctttgagcatgggaggccaaggctgcagtgagctgtgattgtgccattgttctccagcctgggtgacagtgagactggctcagaaaacaaaaggttatttctctgccattacagaagaagcatgstacactgtcttctcttattaaaatgcaattaataaaccctggacagaatgcattgttgagcagctatccaaggactctgagaagtaaattttagcaggtgaaatggagaagaaagccagaactttaaattccactgaaccagcagtgaatttcctgttttttttcccctgtggtatctcctcgctgatttctcctgggcttgccagaaacccagaactgaaaagtaggggcaggcaaaaatagttccaagaaaggctctctagttctcctctgcaaagaaagaatgagaggcccctttgaatcagagtggaagaaatctcttttttgcttttgttttgttctattctgccccaatcctcttgtaggcctttagcagctgtggcagttaggcagatgtctaaaacaacgagagaagggaatcattttttgtttgttgtttgtttttgagacagagtcttgctctgtagccagggctggagtgcagtgacacgatctcggctcactgcaagctccgccttccgggttcatgccattctcccgccgcagccwcccaagtagctgggactacaggtgcccgccaccaygcccagctaattttttttttttttatttttagtagagacggggtttcaccttgttagccaggatggtcttgatctcctgaccttgtgatcctcctgcctcccagagtgctgggattacaggcgtgagccactgcgcccggccaaagccctrtttttataggtagtggatgaagaagagtccttcccctatcccctatgtgagtcaggcattgtcagagagattatggaaggttgaagaaagtaaacctataaagttttatatgaacactccttagccattttgcatggatctgaccctaaacagcacatcagaggctttgaaaactagaatacacaatagactgcctctccagggccagcctggccattgggtggcaaataagtggggcagatgcaaatarcatagcaaaggagttcataacaaacctgacactggaaccataacacaacctasaaacattgagtaaaaacttgaagcctaaaccaaaccagattgtctgctgaaagtttttaaaaatcaagacctagaatgatgtaacatgtcaaaatatccaggatgccatcctaaattagtcaacatactcaaaaccaggaaaatcttaacatctcaaaggaaaagacagcagacaccaacctcaaggtgacatggaccaagactttaaagtatctgtgctacaagttgtaagggtgaatactttgttttaagagagggtcttgctctgttaccctggctggagtgtagcggtgtgatcatggttcactgcaccctccatctcctgggctcaagcaaacttcccacatcagcctaccgagtagctgggactacagacctgcaccaccactcccagctgccttttttctttttaagagactggctattgctatgttgcccaggctggtcttgaacttctggtctcgtgatccttccttcttggcctctgaaccacagtgcctggccacaacagcctttaaaaaaagagaaaacaaaaataagaaaggaaaagactgttacactgtttagttcagccatggaacgtgtttaaaagtcttaatagaaatggtgaatataactgagaaagggagggtgggatttgttagtgcgtccagtgggtaaaaaggagtatgtgcaagaataagttatagtgggaagtcagtaggtgatgacttaagcaggtagcattattgatggacctgaattagataagctctttaaaaatctgaaattgtaatgtttctaatacttaaatcatagtggatatttttatttaccttcatattcaggaatgggagtcttaatagtagataatttttgcaaggattttgtaaatttatcttagtcaagtgaagcaggatttcattcccacgagtagtttgtttatttttttgagatggagattcacttttgtcgcccaggctggaatgcagtggtgcgatctcggctcactgcaatctccatctcccgcattcagtctcctgcctcagcctccagagtagctgggattatagacgcccaccactacgcccagctaattttttgtgtttttagtagagatggggtttcaccatgttggccaggctggtctcaaactcctgacctcaggtgatccatgcgcctcggctgcccaaagtggtgggattacaggcatgagccattgtgcctggccaagtttttgttgttgtttttgttttgtttgtttgtttttgagacggagtctccctctgttgcccaggctggtatgcagtggcaagatctcagctcactgcaacctccaccttcagggttcaagtgattcttctgtctcagcctcccgagtagctgggattacaggcgtgtgccaccacacaagccaggggtaatttcaagggttgtcacagtatatatcccacatatgtattmtttccatatatgaacaaattgttagcaccctttttaaagaaccttaaaactttttagtagctcttttaaaaaagttgcttagtcatgttatagtctaatacaggaactcagctctgtaatcattagcaagcctttcacattaaagatttttggatgggtattggtacgcagatgggtcagtaacagtttcttgtagcaaaatggtgagacaggcacaaaattctaccaggcatgtttggtgttgtgtttgctttttaatacaaacgaataaaaacattttgctgttggatttcgctcaaaaggtcttatctggttaacaaaagatttgccggctgggcacggtggctcatgcctgtaatcccagcactttgggaggccgaggcaggcggatcacctgaggtcagtagtatgagaccagcctggccaacatggtgaaaccctgtcgccactaaaaatacaaaaattagccaggtgtggtggcacgtgcctgtaatcccagctgcttgggaggtggaggttgcagtgagcagagatcatgccactggactccagcctgggtgacagagcaagactcagtctcaaaaaaaaaaaaaaaaagatttgccatttttatgagtgtagagcaatggcctgtcagatatcataaggcttaaaaatttttcttctttttttaaagaccagggtattactctatcgcccagcctggtctcaaactcctgagcttaagccatcccaatcccaaagtgctaggattacaggcgattctcctgcctcagcctcagcctcctgagtagctgagattataagcacctgccaccacgcccggctaatttttgtatttttagtagaaacagggtttcaccatgttggtcaggctggtctcaaactcctgacctcaagtgatccaccgccttggcctcccaaagtgctgggattacaggcgtgaaccaccacgcctgacctaaaaaatatttctggcaaacagctgggcatggtggcacatgcctgtggttctagctacctgagagactaaggcaagagaattgcttgagcctgggaggtcaaggccgaagtgagctgtgattgcaccactgcactycaacctgggcgacagagtgagaccctgtctcaaaaaataatatctgtcatgttaagctgttccatggaattacattgtctttttataatgggcacactaatgaaagaatgaacactttcctaattctattctcaggcaaattaagactagtttcttcatgtccatatgaccttcattgctatggttgcttgtactgcacatttcctgttaaacgggctttctcattgcatttggagagctgcgtagtattcccaaaatcttctaggtatgcttgtaattggcagtcattccagttttttgtgagtgctataagagtaacatcactcactgtgtcccgacagacaggcttttaaatttctatgccaattagattggtaaaattatgctcttctttttttttaagtgtttcttaaggttaaaaatctgcacattttatagacaaagtatcccattgaatttctgtaatcattgattagttaatggtttaccttggtttatggacctttgaacatttttttgcctatttttctttaagtaatttgtaaatacatagtataatgaccaatttttgtttcatatatagcataatatacctatcatttatctgggtrtgtcaatatagattattttgaaagaaactaaaagttggtgtacaatattaattaaaaatgtggtcttcatgagaaaaagtgtgagctttgtaatttttatgagtaggtgggtactattgtggattaatcgtaacttttttgttaaatgatagatctgagtgggacatacttttgaaggatgtgcaatgttcaatcataagtgtgacaaaaactgacaagcaggaagcttatgtactcaggtaagtcctgtaaaacaagtgttaggtagctaatttcagtcctaatcataatgtgaaacagttaagttcctctcagttgtagttctgggggtttttttgttttgttttgtttttttgagacggagtttcagtcacccaggctggagtgcaatggcgccatgtcagctcactgcaacctccgcctccttggttcaagcaattctccggcctaagcctcctgaggagctgggattacaggcaccttccatcatgcccggctaatttttgtatttttagtagagacggggtttcaccrtgttggccaggctggtcttgaactcctgacctcaggtgatccatccacctcggcctcccaaagtgctgggattatacacgtgagccaccgcgcccagccttttttttacattattcttaaaaatatggtataaaaggaaacatttagtgtaacgtggatgtttctaggacataggttttgaagcctcaccggacagttcaaggtgtttgccgtcttttcctcccaattggtaaagaaggacctcttaattagaagttcaggcaaagggaaagttagcttctctatacaaatacagttgtctaattggtatataaaagctcatcaccttttttgtagttgcagagttaatttattccataaatacttttaatgcttatagtatatattgtgatgggccttgctgggggatactggactaaacagcccctccccccctttttttttctgaggcggagtctcagtctgtccaggctggagtgcattggcgcaatctcctctcactgcaacctctgccgcccaggttcaagcgattttcttgcctcagcctcccaagtagctggtattacaggcgcctgccactgtgcccggctaatttttgtatttttagtagagacggggtttcatcatcttggccaggctggtcttgaactcctgacgtggtgatccacctcggccgcctaaagtgctgggattacaggtgtgagccactgtgcctggcctctctcttttttttttttaaactaagtttatattatgaatatacgaatgtttatcaaaatgcttaccatgtgccaagccctggggatgttttgtatactagaaaaggaaaagaataatgtgttacttgcttccttgagatcctaatatttaaaagtactagccaaaattgtaaatgataattaaattggttgattgcaccctcagtagtacattagtattgttataatattgtgacttttttcaactgcagtgagagtagcatgtttgtctccaagagacgtttcattttgaagacatgtggtaccaccctcttgctgaaagcactggttcccctgttgaagcttgctagggattacagtgggtttgactcaattcaagtaagtaagcaaacatttaaatatttttcaggcataaatgttagcgttcttatcctgtaatatgsgaagtaaataaatttatatacttactgcctttgttacaatgcatgcaaacacgtggtaaggtgttcataccttaggaagagatctgattctcaagaacagcagaaaataggaagcagagaatgagttaggatgaaattcaaatgggagaaagaaatgaagaagccagayacttccagtagttaatttcttaacatggctacttataataatagagaaatggtaagaaaagaaggaaaagcaagaaaaatgtcgttactgaaattgtccagtctttataatgaagagttaggatgaagagcaacagtcagtattgagttaaattcttatacttttcaagaactaaggtgtttttacctagggtataattttctgattagcagttgttacattttatttattttytatttttttgagatggagtttcgctcttgtttcccaggctggaatgcaatagcacgatctcagctcactgcaatctgcacctcccaggttcaagtgattctcctgcctcagcctcccaagtagctgggatcacaggtgcccaccaccatgcctggctaattttttttgtatttttagtagagacggtgtttcaccatgttggccaggctggtctcttaactcctgacctcaggtgwtccacccacctcagtctcctaaagtgctgggattgcaggcgtgagccactgcacccggcctgaattttaatctttaacttcataaggaaaggatggattgtcattagtactcaatacagtttttgttgttatgaattgatccttgtaagaaatctaaagcaatgtgtgcttaaccgatgcttaaaactaatatgttattccccccaaatttttgcttatatgactattaataagctcagtttagaaactactgttctagaaaggaatatacttggtgttaatagttgttatgacccatcatcactagactgggctttttaaaaaaragagagagagagagagatggggcctcrgtatgttgcccaggctggactcctgggccaagtgatcctcctgcctcctaatagcgagactacaggcatatgctaccatgccaagctaaaatatttgagttttgattttgccgagtttttgatatgtggacaatagttgattagcttcgaaaagtgatagaattctacatctaaagtcatctttttttttctttcttttcttttttaataaagagcttcttttattctcgtaagaatttcatgaagccttctcaccaagggtacccacacyrgaatttccaggaagaaatagagtttcttaatgcaattttcccaagtaagtttaaataaaatataaacctgttgtcttcttaaagatagaaagtgcaacctcagagatctttctatatgagagcatacttatgcatatatagcattctacacacactaatacttgcttttcttgtgggttttttggtttgttttagacaggggtctcattctgtcacccatgctggtgcagtggtgtgatcacagctcactgcagcctcaacatcccaggcttaagtgatcctcccaccttagcctcccaagtagctggggctacagatgtttgccaccccacctggctaatttttttttaatttttagtaaagacaaggttttgccatattgcccaggccggtcttgaacgcctgggctcaagggatccacctgccttggcctcccaaagtgctaggattacaagtgtragttactgcacctggtccatatttactttgacttagatgttttgggagtacagtagtgatctttatatagcttgtaattcaaaatatgcagaatttataaagaacattaaaatatcagataaaatatttttagttaagattaatagcttattgcaaattatgtatacacatgtaaaaataattgtgtatcataaatcagtgctgtttaaatgatggaattttaaaatgtagaattgatcacctgccacctctgatttttcatacagcatagagagagttcatcttcatctggccattcactctactttgtgtctcactcagtggttctttttgcgtttttgtttgagacaagtttcactttgtctcccaggctggagagcagtggcatcattatagctcactgcattgtcaaactcttgagttcaagcacccagctaatttttattttatttttagtagagatggaatcttgctgtgttgcccaggctggtcttgaactcctgccctctagcagtcctccagcctcagtggttcttaacatacagatcataatgtcctttgacaatatgaagaaggatatgattcccttcagaaaaatgcctagtgctctgctccagcattttatataataattgacctggctttttaaaattgcacagtgtaaattagtgtttcttgaatgaaattcgtaagggtttctttcatccatttactaagcttttatttatagaggtcagggaacaaaggttatctgataacatccttacttcctagataaggctgaaaacctaagataatttagtaactttgcacaaagtcgctcataagcatgaaaattgaacttagcacatctactaatatgaaaccaaaccaggctaatcagagtgttgggtatttactgcaaatacccgccaagtcagtcgatcctgcttatctgggaatttacctactgtttccattcctttcactgatgacatttcttttttcttgagatggcgtctcgctttgtcacccaggctggagtggagtggcgtgatcttggctcactgcaacctccgcctcccgggttcaagcagttctcctgcctcagcctcccaagtagctgggattataggcatgtgccaacacgcccagctactttttgtatttttagtagcgatggggtttcatcatgttggccaggctcgaactcttgacctcaagcccacctctgcctccctgccaaaaggggtgggattatagrcatgagctactatgcccagtccactgatggatgacatttctaataagtggcaaatagtatcattctgcttattgtggaagggtagtaacaaaccatcctattaaatggatgtgttatatttattttgcgttctcttccctcaacagatggagcagcatattgtatgggacgtatgaattctgactgttggtatgtttaatgcaattttgtggatttttgttgtcctatgtaagatttaaactgccaattgtcatttttaggaactatttttaatttttatttaggtacttatatactctggatttcccagagagtcgggtaatcagtcagccagatcaaaccytggaaattctgatgagtgagcttgacccagcagttatggaccagttctacatgaaagatggtgttactgcaaaggatgtcactcgtgtaagcatttttagtaataattgttgctggactcttctgcgtggggactaaattttatttttcattctgtaacttttaagttcagggtaacaagtgctagtttgttacataggtaaacttgtgtcatgggggtttgtcrtacacagtatttcgtcacccaggtgttaagcctagtacccattagttatttttcctggkcctctcccttctcccaccctgggactaaattttggactcaattgaagtttatttgtcaaacccttgttaaactcggtcttttycccccccccaggagagtggaattcgtgacctgataccaggttctgtcattgatgccacaatgttcaatccttgtgggtattcgatgaatggaatgaaatcggatgtgagtagttatatattgcttcaataattatttaaatgtgaatagtctttccattcttaacactgtgaactttttctctcagggaacttattggactattcacatcactccagaaccagaattttcttatgttagctttgaaacaaacttaagtcagacctcctatgatgacctgatcaggaaagttgtagaagtcttcaagccaggaaaatttgtgaccaccttgtttgttaatcaggtaattttatattttattattaatcaggttatttgatttttaaaatcttaaaggaaatgagacagtgaggcctaagatgtattctgagatagcacatataccagccactcagatatccagaagtaatattgtttgaggttactggtagctgagaagctttgtttcattakacctgtgtcagtccttgttttctgtctagccaaactgatgggttcctcctgtcttgctattgacaggcctctggtgggaggaaccataagatgccctggcccctccagcacataagaaggcagctaaaataactcagatgtcttagtttcattaagataaaagtctgtcacttaactgttttggttgaaaatacttctctggattgcaaacactaacrgttatttaattttttcccccagagttctaaatgtcgcacagtgcttgcttcgccccagaagattgaaggttttaagcgtcttgattgccagagtgctatgttcaatgattacaattttgtttttaccagttttgctaagaagcagcaacaacagcagagttgattaagaaaaatgaagaaaaaacgcaaaaagagaacacatgtagaaggtggtggatgcttyctagatgtcgatgctgggggcagtgctttccataaccaccactgtgtagttgcagaaagccctagatgtaatgatagtgtaatcattttgaattgtatgcattattatatcaaggagttagatatcttgcatgaatgctctcttctgtgtttaggtattctctgccactcttgctgtgaaattgaagtgcatgtagaaaaaaccttttactatatgaaactttacaacacttgtgaaagcaactcaatttggtttatgcacagtgtaatatttctccaagtatcatccaaaattccccacagacaaggctttcgtcctcattaggtgttggcctcagcctaaccctctaggactgttctattaaaytgctgccagaattttacatccagttacctccactttctagaacatattctttactaatgttattgaaaccaatttctacttcatactgatgtttttggaaacagcaattaaagtttttcttcyatgagttgagtccttaagaaaatgattccagttactcattttgcatatttgctattttaacattattggaccctgcatttatagtcctttgatttcttccctctccctggtgtctcccccaagaccccaaataaagcaatacactgttaacactgtgggtttatatactaattctataccccagatggggaatgggggagatggtccctgggcttaatattctttaaagggcatgggaatttagcctctcttttattgtaatgtgctcttttggaaaatagttggttagcagggaagacccagagttgtagattgagattagggtgtactggctgaactgtggaaaacatacaattctgtgttcctcagtaaatgagattagcgtctaatgagtagcacccctttactaacttagtagtagtataaaatcatttttatttagttaattaccagagagatttagcataattttgttctggattcagtaaatcaagtcagcttggatcattcaccttaacttttcctttagcagccatttccactagtttccattaagtagtgttctataaactttgatccaaagcagaatcaatgtcttttccatctcgtgacttaaagttctgtgactgtgatgcatgtgagtgttccgacttcatctgttcctcttaactacggtgtttcccttaccatggcattcataggatgaaatgaatgactgcccagaatgagaatttgtccagattattcagataaacatcataaagcagaatacattataaataagtagaatatgaataaatagaataataaaattccaaaatactcaatgggaaatgactagtwatataggctttcaagagttggtaccttttagctatatttgcagattctctgggattttaaggaactgagaaaacagcaaagttgactaaattttatatttcttgtcctctaaatattttgataatttctggattgatgcagtgatgtttttgttccttccgtatttataaatgaaacacctttttttagtgtttctaaacctaaaatctacttggtttgaaatcaagtggttggaacactgtttgacttttatttgaagcatgttgttgattgaaaatttcattgaggaagttttcaatcagtgtgatcagtttgattctgtaatgagcacagcacctaatattttgaggagctctgttttgaggaccaatgcttaaggtggactttgttcgtaaacaatatcccaatagatttgttgacttgaggtctggtttggttttgtttttgttttgttttgttttgttttgtttccaatagaattaagaattctaatgttgaaaaactgcmcaaatttttatgggacaaagcctagaaaagagaaatgtagtttgaatcataatctaaatcatcgtatgatagaagagggaaagttttggtgccataatttctcctttcactggtgttggacttaaatcagttgaaatgtatttctgtaccacaatttacgcttcaataaaagtttaattgtctagtgacattcagaaacttttctgttgccctgttttttaagtagcctacttgaccaaatactacatgtctgaagtttaaaatcaatacaacaatgtgtatttatgagtttggagttagacagaagtttaaaagtgttaggtcccaacctttattatagactagactcttaaaacattggttgaggatgatcaaactcaaataagtttccttatttcattcatggttatttctattaagtagaaaaaaatttataaccttgatcattttctttattttttttaatttaggatcttgttctgttgtctaggctggagtgccgtggctgttaacaggtgcgatcatagcatactgcttccttgaactcctaggctcaagcagtcttgctgcagcttcccaagtagctgggaatgcagggttctgccatcacacttggctttgtcattttctttatttggcaacattttagttccacagtcaaatatgtaataagctgaaaaatcttatgaaaatgtatattctgatctttctcagaatatgcttccgttagaaaatatttcctcaattttcattaaaaacagatggtgttcctagaaaagcaaaatattacatatctgtgcaatatgtaattcacaagattcatttgccaaaaacaggtgagtgaatttgggggttcattagtaagcagtcaccaagtttctgtcacagacacataactggaaatgtgattttattctcctggatggacaattgtgatggattttttgggttccgggcttcaggctttgcaatctcatcttctttgcccttcctcttgtcataatggaagaggtgctgctaatttgggttccatcctttcctgctttcagagactgtcctgtgatttcctaaaacatttccattagtttgtttgaattttctgattttcttcccttagggccctccacaggcctctgtgctagtgccttgaatgatggcaagtgtacaaaaaaaattttttttctttttaagacgtttttgttctgtcacccaggctggagtgcaatggcgtgatctcggctcactgcaacctccacctcccaggttcaagtgattctcatgcctcagtcacccaagtaactgggactacagggatgtgccaccacacccggctaatttttgtatttttagtagagacaaagtttcaccatgttggccaggctggtcttgaacttctgtcctcaagcaatacgcccacctttgcctcccagcatgttggaattacaggcatgagccactgcacctggtcaagtgtccaaattcttactccaaaactgaactttgggctgggcgccatggctcacacctgtaatctcaaaagtttgggagtctgaggtgggaggattgcttgagcctaggagtttgaggccagtctgagcaacatagtgagaccctgtctctacaataaataaaaggaaattgaggctgtaatgagctgtgattgtaccactgtactctagcccgagcaaaagtgaaaccctgtctcaaaaacaaaaatcttgacttgtgcaatagccacagttttcctggattctcaatagaaccctatggtgacatttgaaacacaaagctagaggtatgtgacttcaagatggtaagaaaaccatgaaacagacttgtcaagggatgtctgataaattgttggatatctggcctaggggcccagacaatagattttagatttgtaaacatcttaatatggagggttttgtgtgtgtgtgtatgtttgagacggagtctcgctgtgtcaccaggctggagtgcagaggcgccatcttggctcactgtaacctctacctcctgggttcaagtgattctcctgcgtcaacctcctaagtagctgggataacaggcacgcaccaccacgcctggatgattttttgtaattttagtaaagatggggtttcatcatgttggccaggctagtctggaactcctgacctcagatgatccgcccacctcggcctcccacagtgtagggattacaggcatgagtcactgcgcccagttttaacatggagaattttcaaacttacaaagtaaacaaaatggtacactaaacctttatatacagtttcaacaacaccattctagttaggcatatctgtctactaactacatgccctttttagataaaatttatttaaattgaaatatgtaaatccagctgggcacagtggctcacgcctgtgatcccagcactttgggaggccaaggtgggtggattacctgaggtcaggagttcaagaccagcctggccaacatggtgaaaccctgtctctgctaaaaatacaaaaattagttgggagtggtggcgcatgcctgtagtcccagctactcagaaggctgaggcagaagaatcacttgaacccgggaggctgaggttgcggtgagtcgagattgccactgcactccagcttaggcgacagagtgagacttcatctcaaaaaaaaaaaaaaaaaagatatatatatatatatatacacacacacatctaagttataattttggtaagtggttctcctttgcccacaccttaccaggacaaaaggagcttactctacccaggcaattaagcaatctcccaccaccaccaagctcaaatgttttcatcatagactagggttcatttttatttccttccctggagctttgtaattctttcagcgtaaacattgttgaggttcaacagtccttattgctgagtaggactcgattgtatgaatatactataatttgttaatctgttttcctgttagtgaacattttattggtttctagtttttggcaagtgtgagtaaagctgctatgaacatttgcacacaaatattgtgacttctgggcatgtagtggtatcttgtggtttcagtctgcatttctctgactaatgaacacgttctcgtgtttattggccattaatatgtctttgagtgtgtatttttaaattaggttcgtttttattaccaagttataggaactctatgtattttgaataaaattccttgtcagttattttgcaaatattttccccattgtgtgtcttgactcttgattttttttatagtgttttgagcagaagtttccactggagtcttaatttatcaatttttaaatggactttttctaaataaatctgcctacctccagattgttatggtggtattgttttctcataaaatgtttaagcttttatgtttttaggtctattatcaatctcaagtaagtttttgtagtgatgtagggtagggcttgaggttcatttttctccccccgtcaagttattctaacactgtgggaaggattcttttctccatctatttctggagtatattctcgcttttttttttttttttttttttttttgagacagaatcttgctctgttgcccaggctggagtgcagtgatgcgatcttggctcactgcaacttctgcctgccaggttcaagcaatcctgcctcagcctcccaagtagctggggctacgggcgtacgccaccatgcccgactaatttttgtatttttattagagacggagtttggccatgatggccaggctggtcttgaacttttggcctcatgtgatccgcttacctcagcttctcaaagtgctgggattacaggcgagagccactttgggtgtgtccagaaggcacctggccttctggagtgtattctttttcattgatccacttttatctgtccatgtgcccatacaatactgattgctgagctttaaagtcttgaagtcaagtggtctacttttgttaacgtttgtagattactttgtcctttagacgctgatataaatacgacaataaacctgtcagtttcaattttttttaaaagcctgatgggattatttaagttgaattgttttgttctgttttgttttgttatatacagttttgctcttgtggcccaggctggagcacaaaggcgcgatctcggctcactgcaacctccaattccccgggttcaagcgattctcctgcctcagcttcccaaatagctgggattacaggcatctgccgccatgcccggctaattttttttatttttagtagagatgaggtttcaccatgttggccaggctggtcttgaactgacaggtgatccacccaactcggcctcccaaagtgctgggattacaagtgtgagcccccgtgcccggctagttttttgttaattcctgagcatttttggtttctggatgctagtctaaatggaattggtttctttttccaactggtactagtttatagaaaggcaactttaaaaatgttgacttatgagactttgccaatagtgggtggttggttggttcctcccttattccactggttaggacttccatggtgagaagaggtaagagcagactgtgactaaagtgaggtatgtaataaaatgtaaggaggcaccgtcagggcagtggaagcgtagagtgggcatctgagtgggagtacatccttgtacttgctccctcccttgcacttgtaccttacttgcttggtctcatgtgctgttcctgtattaagggcttacctccttgccctgttcccagtttgaggaagaaagcattgaatattccatcaagagtgtttgctagtaggtgtttttgttttgctttgtggagacagtgtcttgctgtgtcacccaggctcaagtgcagtggtgcattcacggctcactgcagcctcaacctctcaagttcaagtgatctcatctaagcatcccgagtagctgggactataggcgcacaccaccacacctggctaatttttgtgttttagtagagacagggttttgccatattgcccaggctggtccccacctcctgggctcaagtcttagcctcccaaggtgctaggattacaggagtgagccacctcacctggcctctactggttttatgtagatgtctagatcaatgccttttattagattgagatagttcccttctagttagctgggttcttatgaatggaagatatcacatccctacccccctccttttttcccctccattgagataatcatggtttgtatgcttttttagatactgtttctgtcctcagaatgaaaggagttaagtagtggaacgtgatgactgaaacaggccctctaccattggagacaagaagggaagtgtatggagtagccattcttttattcgtttactttcttaacaaacttgctttcacttaaaaaaaaaagtgtaaaggcacctgggtagttctctggtttaaagtaactttgtggccaggtgtggtggctcaagcctataatcccagcactttgggaggctgaggtgggcggatcacgaggtcagaagttcaagatcagcctggccaacatggtgaaacccccatctctactaaaaatacaaatttagccaggcatggtggcaggggcctgtagtcccagctactcaggaggctgaggcaggaggatcgcttgaacccgggagccagaggttgccgttagccgagatcatgccactgcactccagcctgggcaacagagggagactccgtcttaaaaaataaaagtaactgcccaaggttagagaaactagaaatgatagagcccagattcaaactctggcaggctagagcttgttgtttcagtcactgttatctctcagctaaatcttttaatctccttaaagcttcggaattcaatgatttcatctcctattttatttaccgtttaagaattcctcatctttggtagcatgtttggttctgttgacttcagcctcacctttagcattttattttatttgtttatttaaagacagactgttgctctgtcactcaggctggaatgcagtagtgcgatcttggctcactgcagcctccgtctcctgggttcaagtgattctcctgcctcagcctcccgaatagctgggattacaggcccctgccaccatgcctggttaatttttgtaattttagtagagacggggtttcaccatattggcctggctggtctcgagctcctggcctcaagtgatctgcctgcctcagactcccaaagtgctgggttatcagatgtgagccaccgtgcccggccacctttagcattttagatgtaagagatactcctcgtattttaattcctgtgtttatctcactgcaaactgatatagtctgtgcgtggtggctcatgcctgtaatcccaacactttgggaggcagagacaggcggatcacttgaggtcagga

SEQ ID NO: 95616 - DNA, 31657 bp, Homo sapiens
ccacgggcagtgaaaactctctcacacaccaatcaaatgacacagactccagtcatgaccctcaagaggagaaagcagtgagtgggaaaggtaatcgaactgtgggttcccgccacgttcagaatggcttggactcaagtgtaaatgtacagggttcagttttgtaatattttttcagcaaatttttatacagtgtcatttaatttgggagaggatactgtccagaaaattaatgcatacttttgtcacaatttgcctttttgtgggtgtacgttttggtttttttttgttgttttttttctttgttttttttttcttttctttttttttttttttttttttttttgcttcaatacttctgccgctttggaaattgtaacagttaattactttgaatgttgctaaaaggacattttgtgtagggtcaagttatttttatatgagttaatgtgaaattgtaaatggaaatttttccttaaaatacaacacaatgatgtctgtataaatctgtctgtttaraatctgtgctgtgtaagggcattcgtactcatgctgttactgtacttatgcaccattcagacttgttagagtagatgtgggtttatgactgccaagtttgcccagtacagtagttttttatcactaaaagttggactcattgatggagtcctgtagtagtttcagtgttagatacagttttttccaccatacatctgtgcattttctctttaggtgactgtttaagaaatttgtgtgcatagttactcagtttttatgaactgttgtatcctgttaatgcatattgctctgtgactccagtatatcttacctgtactgaccaaacctaaataaagatttttattgtaactccttaattagcttttttgttttgttttgggtgtatgtttagcatttgtcattttcattgagtcattgaatttctactcattatccttcaagtaccacaacagtcaaacttaagaccaagcatcgattacgattttgcacacaatttttaatttatgccttattttgcaaaacggagctggagtttagggctacacttaaaattttttcttgacttataattgttacaaaatattttaaaatacagaaaagtataaagaaaatagtcatctatttcttaggctttttttttttttttttttttttaattgagacagggtcttgctttgtcacttaggctcaagtgcagtggtgcagtcatggctcactgcagcctcaaagtcctcgactcaagtgatcctcccacttcaggcttccgagtacctgagactataggcatatactaccacacccagctacatttattttaattttagtagagacaaggcctcgctatgttgcacaggctggcctcaaactcctggccccaagggatccttctgccttggcttcccaacgtgttgggattgcaggagtgagctacagctcctggccctttttgagttttaattgaaaagcagcgttggttttttgtgacctgatttcaagtagagtatctttgtagtcagtgatgtttgttttaaaacgctggccagcactactgatttttactaacaacatatctggtaatattatatgagtaaggggtgttagaatgtaggtaggagaaaatgtttttaaggtggaagaatgtcaaaatttgctccattttctcagaggtaattaagtataaaagtatgatattgaatggccttcaaatgtgtagctttcatatatggttgaaatgaaattccatttctgttaaaagcaaagtattgttttagacataacttgtaatacaatcaaggaaccttgggagtggagttataatactcgaaaactgaggtacaacttatttgaaagtaattgctgcttttgcttgtttagctgatacaggtatatccggtcttcagcagtatgttaaatactgcactgtctcttgattaaccttttcttttttttctttttctcttttttttttttgccgagagtctcgctctgccacccaggctggagtgcagtggcaccatcgtggctcactgcaacctccacctcccggattcaagtaattctcctgcctcagactcctgagtagctgggattacaggcgtgcgccaccatgcccggcttatttttgtatttttagaagagatgaggtttcactgtgttggccaggctggtctcgaactcctgaccttgtgatccacccacctcggcctcccaaagtgctgggattacaggtgtgagccaccgcgcccaaccttgattaaccttttctacagtctgctcaagtgagtaaaaaatcctatacgatttttaatttgcatgtgattaaacattttggtgtttgatatatcagatactgtgtttggcttttgttatgtacatccttcaacttgaccaatttaaacaaaaatgtaatttctctgtcctgttggtgtaatgtaatcaagagtttgtgataggaaattaatttttcaaccagtgatacaattttatgactgaatttaatatggacctgttaatgtgacattttcatgtttctgttgagtctgccttgatgaataactcagagcacttattctgtggtacacagagtcagtatttctcatttctggaattggatgctttattttctggtatgcctgtgataagagaggtgatagagtggcttctgcatctaattggtttgaatcctggtattacacttaactgatttgggcaaatgtatcctcgaggctcgatattttgttttgtttttctcccctgtaagagcactcactgctgtcttagcttgggctgctgtgaaaaaaaaaaaaaaccacagactgggtggctttacacgcgcattcctcactgtttttggaggctgggaagtctaaagatcacagtgccccctgattggtgccccagtttggttcctggtagtcctcatacagagagcgcaatagatgtcagtttccttggctcctcaggtgtattggatacaactgactactccagtttttgagacacttttgcaaaacaatgtaaagccattccttctgacaactttctttctcagatgttccctctttcatgagtagttatgccctgtactcaaatcattgcctgctgctctacgtcactgtcttgggagttcacctatccctgtggttatagtgaacactttcataatcccaggtaatgtcattaactgatctggacccatcatggggtggctgtgctgagggagtgttgagctagcccctagtggtaaggagtacactgctgaccttcatcctatggcaattccactttggtgattcactgttcccctcatggagaccaaggaggaatttgctgcatggtaggttggtgaatccagcctgtagcaaagacctggcttggactcctgcaactctttatgaaacttaaccaagaatgattgcatcttccagcgggggaagatgctgagaaggccccttcaggataaactggctccatagcactgctgtaatgatggctcctcatgagtaagcacttggagatttttgtggcttcctgcccactcaccctgctcaccagtccaggtagtttatgatttgagatctagatgtaattttattttatttctttttttttttttgagatggagtttcgctcttgttgcccaggctggagtacaatggtgcaatctcggcccaccacaacctccgcctcccaggttcaagcaattctcctgcctcagcctccctagtagctgggatttacaggcatgtggcaccacgcccagctaattttgtatttttagtagagacagagtttctgcatgttggtcaggcaggtcttgaactcccgacctcaggtgatctgcccgcctcggcctcccaaagtgctgggattacaggcatgagccaccgcggccggccaagacataattttaaaaattatcttccagctggccgggcgcggtggctcacgcctgtaatcccagcactttgggaggccgaggtgggcggatcacaaggtcaggagttcgagatcagcctgactaacatggtgaaaccccgtctttactaaaaatataaaaattagctgggcatgatggcacgggcctgtaatcccagctactcaggactctgaggcagaagaatcgcttgaacccgggaggtggaggttgtggtgagccgagatagcgccactgcactccagcctgggtgacagagcgagctccgtctcaaaaaaaaaaaaaaaattcctcttctttccttcattcattattcttagtctctgtctgtctcatatgagtagataatcatatgagtagctataatgaggactcctcaggggacagattctgtttggccactcagcagaagcatgcaattaccttctcaagattggctcctaaacttactctagatagagccttcaggcaggaaactctatatcccttggctccagaagaatatattcatactcattcaaatgtgctaggcactggccataaagaatattggtgttcattcataactgcctataatgtgctaggagctgtgcataaagcagtgtaacaggatcatcttggaaagcttatgtagtcagtagaggagacagataaactaggaattacatggtaagttgaaagaggaagttaggggtaagatgctgcaccaaatgcaggagattggaaggtttttctggaagaagtgatgtttagggggagtttcagaggtaaatttctggtttggttaacagaagatagtttcactgctcactgagattacagaagaaacaggctggaagagtttggtttcaatatgtcaaatttgatgtgcttataggaaattttatttatttgagacagtttctctctgtcgctcaggctggagtgcagtggtgtgatctcggctcactgaaacctctgcctcctaggttcaagcgattttcccatgtcagcctccccagtagctgggattacaggcgcacggcaccacgcccggctaatttttctattttatggtagaaacgggatatcaccatgttggccaggctggtgtcaaactgctgacctcaaatgatccgccctcctcggcctcccaaagtgctgggattacaggtgtgagccaaggtgcccgacctgatgtgcttgtaagaatttaaatgaagagggtcagtcagcttaggagacgaggttagatgtaaggatttcagacttgtcagtatacaggtggtgattgatgccgtaggaatgactggtattacccagggagctggtgcaaagtaggagccttggggaacatgttaaggggatgtgagagtaagcccacaaagactcagaagtggccagggagtaaggggaaaatgggatagaatagagcaaaagccacgggaggcattccttgaattccttggactcagatatgttaggggacaggaaacacattgaagacaactgaagagacttcagtgtgctgctgagttcttagcagagtagacagctgatttcaccactattccagaccctaaagatttctcctgaaattgcactgttatgcaatttttttccttctctattgccccacctctggggcctacactctttaccttctctgatttatctgacccatccgcatatctctgcaaagtcttaatgtaggtttccaggatttaatgattctttcaatcaactttaaagttcttcaggaagattctccaggtccgtcaacagttttccccttcatgactttgtgacaaagctttcttgttccactatccaggtgttcccaacaagttgctgtaacggtggcccctcataagcttgcctggaaaccctagaaagctcagaaaaattatgaactttgcccagtaagaggctgggaagtcagaaagggttttaaacaaaactgaccccacttgttacatgctcctttcactgtccaaacgtcaaccaaaggaacttttgtgacgctaagacgctcccggcgtcctcacccgttcacagccagagttgatcttagaaggcagggggctcgcaccgagacgctcctagcaagcccctcacgcgagcgaatgactggcgccaggagaaacgcataggacctcccgaagccgccgagagcaaaaggacccatcagagctgtgctgagacccgcygcgggccgggctcgcactcgagattctcgcccgtgggattccagtcctgagctgaacgagagataagtctttgtcaccccccagtctttactgtttcgagaaaccctaagattttttaaaaaaaagcccaaracgtcaagtcggggaactccaacattggggtgtccagaaacactggggtttcaggcgctctgtaaatgcgtccgaggtccgcggttctgcccgcargcccagaccccggcctcacttccgccccgcgccccgcgccccggcctcacttccgccccgcgccccgcgccccgcgccccgcgcgcctccgcccgcccctgctccggccttgcgcctgcgcacagtgggatgcgcggggaggtggtgcgcggggaggtggagggcgaggggcggggctacctcaggtcccgcccgcggcaggcctgtgggctgcgaggaggagctttgcctagcttgcaggcagcgcagggcagacggcggcaggagaagcaagatgaatgcaggctcagatcctgtggtcatcgtctcggcggcgcggaccatcataggtgagtggccggcgggagccgcgcagagtccgaggcgcctgctgcttcggcaggagcgccgagggccggacttgtgtaggagaggggcgtatgtggaggaagccggtcaggccaagccgcgaggagccgcgggatccctggaaccctgcgsctcccgcgttccctgacctggtgctacagccccaccctctcctctcccgatgtgcgyactccgtccctcgtgcttggattggctcccggggtagagccatcgcgtggcctgcctctcccattggktggcgtagggaggtgttctcctscggggcccctgattggccggctccgggaggcgccatcggtaatgcctgcrgcaggggcggaactgctaggtggtctgagcccggctttgggctggggtcgggctgtcacacaatggctagaagtcgtgacttcgtctccttcgtgccgcatggttttcaacgcccttgacccgccggttccttttgtttgggaagcatggggtcgcatccagtccttcggatttggggaaatagaagggctacagcggcgtccctaggccgttctggaggtcgcctgtccagccctcggctgctgcgagttgtggcacccaccttgacctttgctcagaccagcaggtgtaggaacgtgtgggaggagagggcactgcctcctcgcgtggccttgccaaacagggtcatgaggctcccctgctcgtaggtggttcccgtattacccgcaggcttgtgatgtccacgctctccgcctttctattgtaggttccttcaatggtgccttagctgctgttcctgtccaggacctgggctccactgtcatcaaagaagtcttgaagagggccactgtggctccggaagatgtgtctgaggtcatctttggacatgtcttggcagcaggtaagtctcagtgattccaggagaagtcaggcttattagaaacagcccataaacacacacacacacacacwctctcacacactcacacactctctcactcactcaagttcttgcctccttgcttttgctcagagttccctctgttatgattcctcctgttggcccccttcttccagccctgtcagtagcttctatccagcttgagactcagcttcttggccaggcagggtggctcccgcctgtaatcccagcactttgggaggcggaggaggaaggatcacttgagtccagaagtttgagactagcctgggcaacaaagcaagaccccgtctctacaaaaaataaaatagccaggtatgatggcctgtgcctcccagctactggagaggctgaggtgggaggatcacttgagcccaggagtttgagactgcagtgattgtgtcactgcactccgtcatgggtgacagagtgagaccccttctctaaacaaacaaaaagacttagcttcattaatatgctttttgtgaatgaacttagaccactgacctacaccacctacactgccttttcttttccttttttttttttttttttttttttttttgagacggagtctctctctgtggcccaggctggagtgcagtggcgtgatctcggctcactgcaagctccgtctcccggtttcacgccattctcctgcctcagcctcccgagtagctgggactacaggcggcccactgccttttcattcttacgaagcagggccggccgggcccggtggctcacgcctgtaatcccagcactctgggaggccgaggtgggcggatcatgaggtcaggagatcaagaccatcctggctgacacggtgaaaccccgtttctactaaaaatacaaaaaattagccgggtgtggtggcgggcgcctgtattcccagctacttgggaggctgagacaggagaatggcgtgaacccgggaggcggagcttgcagtgagctgagattgtgccactgcactccattcagcctgggcaacagagtgagactccttttaaaaagaagaagaagaagcagcagcagggccagcctgacgcataggaaagtatgcctgctcctccttactacctcaaagtgtcactcattcaacaaaaatgtattcagttcctcctatgtgccccatactgtgcttagtgctgggagtatggttccaacaatacaggtaagttccctgccctcttagggctcagttctgagcttggaaaataggtgccacatcatgccccttgcaaatgggrcatatcactccccagaggaatatagctgagtcctgagagtgcccccatcttctgattctttgggtttgaacactcgtaattaattaattaattattattattattatttaaagagacagggtctcactctgttgtccaggctggaatgcagtggtgtaatcaatcgtagcccactataacctcaaactcctgggctccacggtatcctcccacctcagcctctggagtagctgggattacaggagcaggccaccacacctggctaattttttaaatttttttgtagaagtggagtctgtctgttgcctgggcgtgagtgcaatggctgttcacaggcacaatcatggtgcaccatgcccttgaacttctgagctagctgggactaccggtgcatgtctactaagtttaaggcttttaaagcactgtgctaaatgctttcctttcattacctcatttaatcttcctcacaagtctgttatatcctattatcttcattttacaaatgaataaatgagagtttaagaggttaaatgacttaccagggtcacagtttgaagtggagctagcacttgaacttagatctgtcctattccttgagccagataccttctacaatcatgtaacaaatgtttattgagcacctactttgtgccaggcactattttagcagctggagataagcaatgttcatatcagatagaaattctcattctcatgaagctcgtagtatgctaaatgctagcattattaattgtgttagcacctcatttctttctttttctttttttgagatggagtcccactctgttgcccaggctggagtgcagtgacgcaatcttggctcactgcaacctctgcctcccgggttccagtgattcttctgcctcagcctcccaagtgactgggattacaggtgcctgccactgtgcccagctaatttttgtatttttagtagagatggggtttcaacatgttggccaggctggtctcgaacttctgacctcaagttatccacccgcctcggcctcccaaagtgctgggattacaggcatgagccaccatgcccagccctgtacctcatttcttctttttcttttttttgagatggagtctcactctgtcgcccaggctggtggagtgcagccgtacaatctcggctcactgcaacctctgtctcaggttcaagcaattctcctgcctcaacctcctgagtagctgggattacaggcgtgcaccaccatgcccagctaatttttgtatttttagtasagagrgggggtttcaccatattgtccaggctggtctcaaactcctgacctcaagtaatgcgcccccccccccggcctcccaaagtgctgggattacaggtgtgagccactgctcacagcctgaggcaccgcactgggcctgtctttttaatatgtatatgatcctgcatatgttttcagtctcaagtaaccttacccgtttttagtttccagcctaatcccagaytgataacattgtgatgaatataatctctaagtttttatcagcgacttmtttgctagttcttccccacaaactctccaaggaagggtggtaggtttgagtatatctgaaactgggaatagagtaaccactttataaacatttaccattgactctgataacagacaatggcgattgagaatatttgaaacttttaactccattctcttctgtgctactttaagtaaattatgtatttcttcccaactaaaggaagtcccatagttgaattatgaaaagatatttgtgtttcagtactcagaatgagaaaaaaaggtatttgtgaattctgagtttgtatatattttgttatataaccatttaagcatagtgtaatgaatactaagcaagaacagaactgcttattatcaaaggttttcctttttaagtaaccctttttcttctcaagtgtcttaagccatgatcttgggagcaaatggccctagttagaaacactgataatgcctaggttatatcctgtgtttattagacataggtttgataatgcttatttaagcacccccccgcacttttttttttttgagacggagtttcgcccttgttgcccaggctggagtgtaatggtgtgatctcagctcaccgcaacctccgcttcccaggttcaagcaattctcctgcctcagcctccctagtaactaggattacactcatgcgccaccacgcctagctaattttgtatttttagtacagacagagtttctccatgttggtcaggctggtctcaaactcccgacctcaggtgatctgccctccttggcctcccaaagtgctgggattacaggcatgagccaccgcgcccaactatttaagccatatcaaaagatgaggatgacacttctttcttaatgtattaatgacttatttatggaggagaaagcttatatctatgaaatacctacagagcagcacaaggcagtatatattcaagggctagactgtgacaggtggagagtgtatacaggcctttttgcctccagtgggcacttacttgacctgtaggctttcagaagtggcaggtaacccaactggcaattttccacacactttcactgtgacattttgtctttctccttgattgctaagagtcctctgtgttcctctttctaggctgtgggcagaatcctgttagacaagccagtgtgggtgcaggaattccctactctgttccagcatggagctgccagatgatctgtgggtcaggcctaaaagctgtgtgccttgcagtccagtcaatagggataggagactccagcattgtggttgcaggaggcatggaaaatatgagcaaggtaaggcctctctgatgaggtggctttcactgacctcacactgagaaactcatgtctatgccagaacagagtaaacagatgcatagcagagctggaaccaaacagtgaacaaataaacagaaatgacaaccttgatccctacttgaatgtgaagtattcttcagtttgggtgggaaatccgggttgataagaagtttatcaaccagtgtgattggaaccgaatatactttttctaaactattaatgaagcatgtaatattttctgaattaaattcatattagttgcttgatgtccttggttttaaatttctttcccattgtgagtaaaaggcaaaaaacagatgttgccacttaccttcctgcacatgacaaggagatcctggggaccagactttttgaccttttcagggtatagaacatgtaaaagaggaccaccaagtggtgcccttctccagtaggtttgccaggcatgatttgtttcaccaagttccatacctcaaactggcatagtggttgaaagaaaaactataccccctgcttcctactgatgcagctcaggggctgaggtgcagattccctagatagaagctgattcagcccagccattgctgaggttcaggaggaggcaggctaaaggtaacaaaaataatcggagtgattttgatgggatgacactgacatctgtgtagtactttaccaggtgcttttgtacatgtgttcacaacagccccatatagggtagatgataccattcccagtttacaggtaaggaaactgaggaccagagccagcattcaaatacaactcttccgactctaagtccaatcaatgactctttccattctaatatacctgctgttgagttggtgagagttaagactggccgctactcagaaatccctccccatcatttagttagcctgattattctcactgtagacattatgtcatccattgaaataggtaacacattgttagctttacttaagcccttagaggatttcttcatttaacagataattaattgcctcgatggaaagaataaatggaattcttaaggaaacaggacacagaatgggtaggtttgagggagaattgaaaatgggtaggtaggagagtaatcgttcccaacaataggaaagatgaagtctgctaattccaggggtctttagaccttggcctggctgaggacctagaactggggagaagggctgcaaaggggcctagatgaagacttaggaaatactagatagttttgagttgtattctggggagaagactaattgcaactaagcctaaatccatttttatttctgacttctaggctcctcacttggcttacttgagaacaggagtaaagataggtgagatgccactgactgacagtatactctgtgatggtcttacagatgcatttcacaactgtcatatgggtattacaggtaaggcagacatggctgaaactgtattagctttaaaaaggttaaaaagacmatatactaatctgcttcttaggtgctttcgtccttatggccagagactgtcttaaggatttttatatctcttctttgattaactgaagtgaagtaagtattctcttctttgtgaactcttgattatcagagaatgttagaagtgggaagtacctcagagttcttctggatcaacccctcattttaccaaatgaagaaacagggcccacaaatagtgcttctgtggcagaggtagtgacagagataaaccagttgtttttttggtacctagctgtactttttgtactacacaattgggttattggtcattcatgctgaagggtcctgtggtctaagtttaatggcaaagcaactgggaaatcaaaagcactcttgtctttagtatacatgtaaaacttaagaaacagaatagacattttagagttaaagaatcaaaccctgagaagttaagcaccttgctcaaatgcatgcagcaatggctctggttttatgtaacacataaatatgtgaaaaaggtaatggggaaaagtacaagattccaagagggaactgtgtgcatgaatgctaggaaggaaggaagggcttagggatatgggaagcaatgagaagctcaaggcatcttgaccacttctcgacttacagccacaacagagaaggctataaaaacacaggcagacaatggaagacactgtgtgaccaactgcctcaaccataactagaggtggtcattaaaaattcagatcccgagccctttccaaggtgtactgtggattgaatggtactcttccagcctccagaactgtaagaaaataaattgctcttctttagaaaaaaagaaaagaaaaaaggctcaggtcatgatggagtaattgacaaagattagatttcctactataaacaagcataaaacttgtgaaaatatataaagccactgttttatgtatgtcaggttttgactaatactcatgtaagactgagatccttgagagaagggaaaaccccactgtcactgtctctacccagggcacttcccaaactgtgttatggagaggcagagcctaagctggaaacagtggtctcagtgatctgaagaagcagagaatttggggcttctgagatggctggagtttgtggggcagaataagggggagaagaaaaaaagagctccagaaatctgcaaaaggttccccttaagtctttgatcaaatactaagcttgtagataacagcttacaaggcctagtagaaaagagctgcaaaggagaggtgaactggagattttatagattactaggagataaaagttctggacaagcgagtggaaaccttactgaactccttggacactccattgacatctcagaaagaccacagtttaggggtagggccaaagccatagagtaaaagctactctagacccaaactaataagcttaaaaacaagcctcaaaaggatcaaggtgatttgccagtattttgactgcttgtggaaacaaaactcaatatattctctaaagataataaaatctctatgtccagttatgtagcaactataatgttcagcatgcaatgagaactttctagatacacaaagaattaggaaaatatagcttacaaccagggtggaaaaaaaccacaacagtcaacagaccctgcaatactagaattatcagatgaggatcttaaaggctctattttacatatgtttaaagatacaaaggaaaatataatcttcatagaggaatagatgtggacatctcaggagtaaaaggaaaaaatataaacaagaaccaaatagaaattctagaacttgcaaagtacacaatctgaaattaagaattcactgggatggggccgggcatggtggctcgcacctgtaatcccagcaccttgggaggctgaggtgggaggatcacttgaggctgggggtttgagactaggctgagcaacatagttagacctcatctctaaaaaaaaagaaaaaaaaattctgaatggccttaacagcatcttggagacagaagaaaaagggtcaggaagtttgaagatagatcatatacacgacctgaagaacacagagaaaaataatgaagaataaatgaacaggccaggcacggtagctcacgcttgtaatcccagcactttgggaggccaagccgggtagatcatctgaggtcaggagttcaagaccagcctggccaacatggggaaaccctgtctctactaaaaatacaaaaatgagctggatgtggtggcccatgcctgtaatcccaactacttgggaggctgaggcagaagaatagcttgaacccaggaggtggaggttgcagcaagctgagatcacaccattgcgctccagcctgggtaacaaacaaaactctgtctcaaaaaattaaattaaattaaattaaattaaaaaataggccaggtgtggtggctcatgcctgtaatcccagcactttgggaggtcaaygcaggcagatcacctgaggtcgggagtttgagacccacatgaccaacatggagaaactccatctctactaaaaatacaaaattagccaggctggtggcgcatgcctgtaatcccagctactcgggaggctgaggcaggagaatcgcttgaacctgggaggcggaggttgcgttgagctgagatcacgccattgcactccagcctgagcaacaagaatgaaactccgtctcaaaaaaataaaatataaatgaacagagccttggtggtctgcaggacaaaataaataggactagcatgcatggaataggaatctcatacataaggaagagagagaatggggcagaaaaaaactgaagaaaatttccacatttggtgtgaaaagaagttcaaagaccaagatagacaagggaaaaattacaccttagcaaattgtagcaaaaagttaaaaaaagatcatgccactgcactccagtctgggcaacagagtgagactctgtctcaaaaaaaaaaaaaacaagagtgaaagtgaagagccatttttagatgaaggaaaatgaattgcctgcacacctacactacaagaaatactaaaggagccaggcatggtggtatgtgcctgtagtcccacctactcaagagctgaggcaagagattgcttgagtccaagagtttgagtctagcctgggcaatgctatcatagtctactatgattgcacctgtgagtatctactgcattccagtctggttaacatagtgacacaacaacaacaacaacaacaaaagaatagcttccagccgggcgcggtggctcacgcctgtaatcctagcactttgggaggccgaggcgggcggatcatgaggtcaggagattgagaccatcctggctaacacggtgaaaccccatctctactaaaactacaaaaaattagccaggtgttgcagcaggtgcctgtagtcccagctactctggaggccaagggaggagacttgcttgaacctaagaggcggaggttgcagtaagctgagatattgcaccattgcactccagcctgggcaacaagaatgaaactccatctctaaataaataaataaatagtgtaaataaatactgtataaaatgcaaagcactcagaatagccaaaacaattttgaagtcagaaaatagcacttacatgctctgattttaacattacctataaagctgttgtaaacaagacaatgtggttttggcataaggacagagaaagagaacagagttcagaaatagacccagacttatgctcgttttcaacaaaggcatcaatggaatgaaatggagaaattaaagtcttttcaacaaatggtgctggaataacagattactcacatgggaaagatgaacctagatccctacctcacaccctatataaaagctaatttgagataaatcatggatttaaaaataaaagcaaaaaatgtaaagcttctagaagtatatataagagaatagcttttacagggtgcagtggcaggtgcctatagtcccagctacyagggaggctgtggtgggaggatcacttgaggccagcagtttgaggttgtatagtatactatggttgattttgcctgttagtagctgctgcactccagcctggtcaacatagtgagacatcatccaacaaaaaaaaaaaaaaagaaagaaaaacagcttgataagtaaagacaagacatagaaagcaaagcaataacttttttgtgtgtgtgtgtggagacgggtctcactctggcacccagattggagtgcagtggctcaatcttggctcactgcaacccccacctcagcctcctgagtagctgggaccacaggtactcaccaccatgcctggctaattttttgtattttttgtagaaatggggtttcaccatgttgcccaggctggcctcaaactcctgagctcaagggatcctcccacctcagcctcccaaagtgctgggattacaggtgtgacccaccaaacctggccaattctcacatttgtagaagagagttacaaatacggaaagggagaagaatgtagcttgtggtgttaggttgcattttggagaactcaaaatgcagtatgaactcaaggtgttaccatgagtgtgtgtgtatatgtaaaattataaataatacatatggaagtttctactgaacagacctagaaacaatgacaaaccagtaacaacaagcagtcctgacacccagatcttctaaatacatttatccactaaaaggaactaaggttgtttggagaaatggccctttccaaggctagggaaaaaatgctaaaaaattaaggacatgctcagggacatgttgaaagcacacaggaggcagcctacggggcttccactttcctgtagtggaattttgaacaatttgagcatcagagtcagtaatgatagtaatgggttgtaactgcccaaattttgaacaatttcagcgtgcaaataagttatgatagtaatgggttgtaactgcctaaattttgaacaatttcagcgtgcaaataagtaatgatagtaatgggttataactgcccaagtattgaaaaatttcagcatcaaagtaagtaatgaragtaatgagttataacttattcaataaaatgaaaatgtatgagtccatcctgatataaataactgaataaatgggagaaaaggaaaaggttttctttrtggtaaaatgccaattaatatcttaccaatagaaggaatgttggagttagaaagtcatgaatgaatgctaaaactagtgggtgaaaatatgatggggaagaagatatttggataatccaaaaagaacctctgataaattattgattacttataaatgaaaaaatggtacctttaaaagctagaaacctggtgaataccaaaccattttaaccaagtgatcaaagataacatcacctgggataaactgattgtcatttgtgtcctaataagactcactgagaaaaatcatactatcattcagtggtatacctgccttttggcagaatcttaatctaattctgaggaaacatcagacaaatcaaaattgatgacccttaacaaaagaactcgcccatgttcttcaaaaatatcaagcttaagaagcatagtctgaagaactgttacagacaaaagcaaactagagagattgatagttgtacaatgcatgcttctttattggctcaaataaaggagctagaaggacattactgaaatataggtgaartttgaatgtggaccaaggattagataatagtgtttgattcatgttaaatttcctgatttttgttttgttttgtgagacagggtcacccaggctggagtgcagaggcacaatcatggctcactgcagccttgaactcytaggctcaagtgatccttctgcctcagcctcccaagcagctaggactactagctacatggcacacacaccatgcccggctaaatttatttttaatggagacagggtctcgctgtgcccaggctggtctcaaactcctgggctcaagtgatcctcccacctcggcctcccaaaatgctgggattacaggtgtgagccgccacacttggcccaatttcttgagttttataactgtgcttatgtaagaaagtggccttgttttggggaagtatacactgaaattaaaatttaagagtaagaaggcattgtatctccaactttctctcagatggttcagaaagaaaatattaaagcaaatggagggaaaatataaatggtgactctgggtgaaggaaatttctgtaagtttacaattatatagaaagggaaggagagaagtatgactcctgagagtcactgcaacatttccaaaccaactgccagtggcaggcagggccaccccacacagagcattgcacaggccaccatgagcctgctagcatatgtggtcagtcagtgcttggtcaaatgtggacgacttgagctatcaaatgccagttcatgaaaatgttagttttttgctgtttttctcctttcccagctgaaaatgtagccaaaaaatggcaagtgagtagagaagatcaggacaaggttgcagttctgtcccagaacaggacagagaatgcacagaaagctggccattttgacaaagagattgtaccagttttggtgtcaactagaaraggtgagtatatcatagtggtttaaacatcaacctatttataggtaagagtaacatctaaaagagtaatacataggaatctttagaaattatatcttagttatgtttttcaggttgcaartatatgtcctggatacatgaatgtggggagggggtatgctgggtttacrggacacggtaacatgggacctatgtcagcactcaagcactcttggttccagagcgtccatgaccactgtgcacacacagcaggtttcatgagaagctggagcactggctcatggttgttaggaggcaccagctgacctgtttcctgtataggctcaacctcctcagaagtggacacccattacttctcgctgtttctgtgtgatctccatttcacatttctaaagggtggatcttttggggtcactcgctattttctaatacagaatgctcccgtcaagctcccttattgataactgatatctcttatgtcmtgccagcagtgcacgattggctytgagactgcctgatccactcactcgtaaccagccaagtactatgacccaaactatagcagaatttggcacaaacaggtccctggtagctactttcctcaggaaggcctatggatttggaaaacacaggtgtctcataaggacatactcataaattgttttcatgtacaataattcttgtgtgtactttcctcctgttgtcatcaaagtggtcacatattaaaacttttctgctaaatatgaatcctcatgtttaatggcagagaacccaccattcccagcacacttacttctgtctctggactaatcttgagtaattggttttcctttgcttaggtcttattgaagttaaaacagatgagtttcctcgccatgggagcaacatagaagccatgtccaagctaaagccttactttcttactgatggaacgggaacagtcaccccagccaatgcttcaggttagattttctgaaggacatctgggggaatactatgttctataatgtctaccgagtgaatatttttctctttatttatatacaaaagtactattttttgggacagggactcactctgccagccaggttcgtgtgcagcaatatgatcattgctcacttgcagcctcaaactcctgggctcaagtgagccccctgccttaacctcccaagtagctgggggactacaggcatgagccaccacacccaactcaatatttatgtacaaaattatycttaaaacagttkaaggaaacatgtcatttctctgtatttgatcattgacttaacctatactgaaagaattaatttggtttcttgacatcccaactagacatacaaatgaagaagtaaattagggaacttcagtttatctacctttgtatttttccagtaccagaaactcccaatacctccttgtgaagcccaggcttattcttccatttcctgtcagagatctcccctccccaactgctgtaatcctttttttttctttttgagacggagcctcactctgtcgcccaggctggagtgcagtggtgcratcttggctcactgcaatctccgcctcccaggttcaagcaattctcctgtctcagcctcctgagtggctgggactacaggcgcacaccaccacaccggctgatttttctattttaagtagagatggctttcaccctattggtcaggctggtctcaaactcctgacctcaggtgattcaccctcctccacctcccaaagtgctgggattacaggcgtgagccaccacgcccagccccgactactgtaatcctaccactttctctagttggaaagttttgtggtcaatatattgccaaacataatttctatgtaaagtctgttgaattatagtaaatgccttagccaacaggtaaaatcatttaactcatgtcttcaggtggtaaagaagccacagatatgtaactgaggttaataagcatggtagaaattaagtcactcatattttacaggaataaatgatggtgctgcagctgtygttcttatgaagaagtcagaagctgataaacgtggrcttacacctttagcacggatagtttcctggtcccaagtgggtgtggagccttccattatgggaataggaccaattccagccataaagcaagctgtgagtataaccytattcccttttatgaaatttgtcttcctgttagccttaagtgagcttattcatgtagttagctctagtctttccctaccagaagagtaaccaagagcatttatttctatttttgagataaggtcttgctctgttgtccaggctggagtgcagtggcaccatcatagctcactgcagcctcaaaactcctaggctcaaatattcctcctgccttagcctcccattacctcgaactacaggtgcaccamgccttcttcatttcgtagagacaaggtctatgtcgcccaggctggttttgaactcctgagttcaattgatcctcttgccttaggctccccaagtgttgagatttcaggtgtgagccactacccccagccactgagagcatttggatcacatgctttctaggggaactgattctgttacattagccttaggtacacrtaacagatgctactggttcaaaattttaagacaatttagaatttctaagggatcttttagatcacacccttaaccttttggatggaatggatgtcactaaggcaaaaatgtgtgagaatgtcactgtattaacctaagaacaaaccaaastagcagttaccagtatcatgcagcatatatttatgttgacaaagaatggtttaactttagcctttccacccaagtttagacctcttttctatgaatctttcctctaggttacaaaagcaggttggtcactggaagatgttgacatatttgaaatcaatgaagcctttgcagctgtctctgctgcaatagttaaagaacttggattaaacccagagaaggtaaagatgcacaagtaaccctgagagcttaccagtgaatttcacaatccaattttaagatagtatcttctaggtgttggccatgtgggtaatagttaaagaaatactagttactaggactgagttcattacttcccaaggtaaaaaaaaaaaaaaaaaaaaaaagacattggcttacttggcataaaaggaacgaggtaagataggcagggatgaattttcacaaaggtgtaaatttattcctaagcagttaaaatgaaaatttgagtttgaaagggtagcatgctgatacattaagaggaaaaagacaagtttaagattttaaactgtgtccacagaagaataaacaatctaaatcttttctcccccgytaggtcaatattgaaggaggggctatagccttgggccaccctcttggagcatctggctgtcgaattcttgtgaccctgttacacacactggagagaatgggcagaartcgtggtgttgcagccctgtgcattgggggtgggatgggaatagcaatgtgtgttcagagagaatgaattgcttaaactttgaacaacctcaatttctttttaaactaataaagtactaggttgcaatatgtgaaatcagaggaccaaagtacagatggaaaccatttcctacatcacaaaaacccaagtttacagcttgtactttactttaatgtgtaatactcaactcamggtacaagacaattgcatytaacattgttataaataaaaggaacatcagatcaatcawwaagggctccagagtgaacagcatcttcataacttccatgtttatcatctttactttctggatgtaatttaataagatcatcaattcgaagaatggkgattgcagcttctgttgcaaatttcaaactcttaactttaactatggttggttcaaacacccctgcttgtttgttgtctcgaggtttaccattgctcaaatcaagaccaatcctgcaattaagaaagaattatttaacggccgcttacaatttcattaggtggcctattaactccagcatttcattcaagtattaaggttgatttttaaatcagactagagatcttgtaggtagtctttctaccaaaagaagcagggagagattagcaatcacagttaacgaagacacaccagtgctaataattagtcattatcccttgaattacagtgactgaacaacaaatgcttgctgtgaagtttttcatgttaagtatttgacaagtctgttacttatgtttgctgacatgtaattgactactatcctttttaatgcaacctgttctgcagaggttaacaaagagcgggaaaccatgcttaccattttagatttttacgttctgggttaacctgggcctcattatgaaaagctcttaattttgcaaccagatctgtggagtcctgggcagcattaactgctagtgtattgggaataacaagaagtgatcttgcaaactctgcaatcgcaagctgttcccgagacccctaggaaaagaagaaaattaggtgacttcacaaaagggaaaaaaaaaattgaagtccacagctactgctctcaggcctctaagacaagaaatgactgttcttaccatgctggttgcatagttttcaaggtatatggaaagggctgcttctacagcacccccaccgggaaccacagattttgactccaaaactctcttcactacacaaagtgcatcatgtaaagagcgctccatctcatcacacatgaaatcatttgccccacgtaagataatcgatgcagacgtacgagccttagtactgttcaaaacaaaagtacaattcttgtaatagcatttttaaaaatttttttttgccaagaccatcaatttctcaaaaaaaatggcattttaataaaataagtctacataaagttcccttaagtcctgcctacacaggatatttagatatactatacagaaacaatgtctagtccmtgcagaagagatgaaaatggttacttcatctcaatttacagtggcccaatgttattttatcccatgcgtataactgctcgtatcactgtgagactacaagcagcaaataaatgggaagaaaacctacttttacttaacaaaatcggtataactttacaattttagaaagtggctcttactttttgattaagatcagctcatcatcacaaattctctcctgtaccacttcttctgcctgtcccaacattgcagcttcaaaagtttcttcaccttccaaattggccagggttgacagaatagttgctaataagagagttacaaaggatctgtgaatattgctctttcatgattttaatatccttggactcagtagcatttgtgrtaaaagtgctatattacaagtttagaatttagttaggcagcacacggtaactccttttatcctaagatggaactgtcattttagaaatgaacaaattcagttcacaaatttccaacaaaatttctccagttacatgaaaaatggctctataaatgtgttggtagcacaaagcattaagagaatataaatgtttttgagctgttttctgtcaatattcyaatgtaaaaagacctttgataggatcagggataataaaagtattttatgtgacagccagcacaagacatacctccagaagctttggcaatgcgtttaaggtccctttttaaaactcttctaactgccatagcaccagcctccacaaaatacttcagacacatatcatcaattccaccagtggttagaataacattggcaccagttgccaggatcttctgaattctctccttggtgatatctgattctctgcaaagtatttttgtaacctgagttaccttctgtgatttttaaaaataatttaacttccattaagtatttatcacaagataatcatagatcaaattgtattatcctttgttatctctgaccagaatttaaattagtccaattcatggaaaatttgaaggaattaaaaattaccacttagctctccccaacccaaatttgaattactaattgagaactatggttaaacagggaacacaggtcctgccttcaaggatctagtggggagagggattaccaatcacactccagggcaagtgtcactaaagtggtatgcagagattacaagcacataaaagacataaatttagcctaggaggtggacaatgaagatgagtccaggccaagtgcagtggctcacgcctgtaatcccagcactttgggaggctgaggcgggcagatcacctgaggtcaggagttcgagaccaacctggccaacacggtgaaaccgcctctactaaaaatacaaaaaattagttgggcctggtggtgggcgcctgtaatcccagatactcaggagactgaggcaggagtatcacttaaacccggaaggcggaggtcgcagtgagccgagaccgtgccactgcactccagcctgggcaacaagagcaaaactccgtctcaaaaacaaacaaacaaacaaaaacaggagtccagagttgaaagcacaaaagaaggcagaaccagaaaagtgaaaaaccttgcaggttacaccaaacaatctagatactaagcttaatatctctaagcaagactagtatatcatctgtgttttcaaaaggattccctgattatcaatgtggaaactgcactgaatggctgaagacaagaagataataacatgagatataagctgaaagacaacctaaacagaaaagtcaaattttatggcttgggtgactcctggagtaaaataaataacaagagttttgggggcaggatgggaaatgagagtttagttgaggacaagattaagtttgaagtctctgctgttactcaggtgaagctcccaggaggcagtcacttacatcatggaaaccataaactatgggagatccagatttgaagagtcaatatgagtgaagccatgtgaatagatcattcgaagaatttttaaagtaaaatgaattacagatcaacctcaaaagcagcttgtctactaaacaagtactgtgtgctacacactgttatataaactcatggtaaaaactgtaataagccccaggaagaaaaaatacaggaagttacaacagaatataatttagattgaagaagaaagaaaagcttctctaagagactagcttgggtgtgtttctacaacagtctaggcaagaaaatgaaaagtaggtaaatttaatttggaggtagaaatcaagcggtcttggtgacagattaggagaaaaagtgttggtaaaaaggaggagttaaggacatttcctagttttctgcctgtgtgaaggactccccatcactaaaatggtcaaaagcagatttgcggtattatcacaagttcagttttagacatgttcactttgagatgcttgaaaagcattctactagatagaggtatgtgtgtttggagcttagagaaacagctgaaagagtctctggcatagagagataatacatgaagtcatgggaacaaagrggctatcctggagagtattatgacatggtccagacaaagcagcatcacaaagccttccatccccgaaagcatttcaagaaggacataatcaaagggttgctaaaggtcaagtaagaggaaggctgaaaatgtcttccgaatttcacgctagagaccttaacatgcagtccctcaaatggagaacagggctgaaaagggatgagaagaaaagcaccagagaagttttgtgtagtaaaccactcatgacatctgcctgtaaagatgtacgatagggagtacctatagcacaaggatgtacgaagaagcttgaaggacaaaagagccacaggaagaatccaggaaagagcataattagttgaagatgcaagtatgaaacaagaatcaaagaaaaggctctagagcagaaggaaacagactctagaacacttactgtagagggactggctttgatggaagaaaggacactttgttgtatgaggaaggaaggaaaaaagaatacccgtgcagactgatttaaaagatgacagcacatttcttactcttggcaaagctttcttgtaggtctggtttaactactgtttaaactattttttttttttttttttttttgagacagggtctcgctgtcacccaggttggagtgcagtggtacaatcacagctcactgcagcctcaacctcctgggcttcagattcttgccacctcagcctctcaaagtgttgcgattacaggcatgagccactgtgcccagcctaaacaatttattgttttaagtgactgtcaggcagtcaaatctatagcaatggtcacactacctccaccattagctcttctggcatgccaaccactaatatcacctgcacctccagtatctagcaaacagtaggttacagtcaatactatactgctgagttctgtactgctttgaggaaattagattcctgtcttttacatctttaatattaatagactcatacaatcaaaattccacaaaaaggccgattttcatataggttgtataaccccaaatccctctaaaaacaccaccaggctaatttttctggaagtaaaatagtttgacttggctaaaaatgttaaagtcctccaagacactcacacttaaaaggccaaaaataatctctcaacatacctctgtctaatttggtccagtttttcagggtctgtaatgaccacctgtacaccaagcttcatttttgttttttgcaggctgaagtcaaggcaagcaatttttgcatttacgattctcttgggcatgcctacaattgaacataagattaagttaatacgtctatccttaaaagcataataaagagtacctataatcgattgtatgtaaacacacaaatttagactaattcattgcattttatcttagaaaaattttatggcattaaatgcacgtaatttcttttaattcacattccttctaccatgttgtatgtgctttaaattacaaaaagatgtactgcacataatccacaaaaaaacattttttatttttttttttttttgagacggagtctcactctgtagcccaggctggagtgcagtggtgtgatcttggctcactgcaatctccgcctcccaggttccagtgattctccttcctcagcctcccaagtagctgggactacaggcaggtgccaccatgcccagctaatttttgtattttttagtagagatgaggtttcaccatattggacaggctgctctcaaactcctgccctcgtgatccacctgactcagcctcccaaagtgctgggattacaggcatgagccaccgcgcccagccaaaagaaaagctagttttaatctgtagcaatctcattctataaaccaaatcccaaaccttaccctgggatcccaccacacagttgagtgcatagccactgatgagcatactctccatttgacttctcccatgggctttcaaaatattaacagagttgactggatagcgtggctggcctcttatgtctgtgtatttaatagcaagtacagcatctactaccatgttagcaaagaaatcaccatttctacgccaaaagttaaggacagtaacaggtttggaatggacaaagggtacacacgtgaaaaatcaagggtaatttcaagggacttccttttagtaatctaatctattaaagcagcaagcattacttgtcaccaaaatgttacaacattatcactatctgcaattcatatcacttttagacatgctttttattaccttttcaccctaaaaaagcagggaaggcaacaggtaatttcaatacagcattactcctctctattgatatcaatttgcataaaattggttattcaaaattttattgcacaaaattgatactgctgctactacgcacgcgtgcgcgcaacacatgcgcacacacgcacccactcccgagacagggtcttgctatgttgcccacattggactggcactcctgggttcaattaatactcctacctcagcctccttagtagctgggactacaggcacataccaccatgcccatctcaaagtcttatgctttaaaaagtctaaattttatctgacaaccacaaggatacattccaatgattttggaagacatggatgtcttagcagcattaatcaggcaatctcttcccagttcatctgtgttaacaattaggttttcattgatataacgcactgcttccctgtttaaaagtgtgggggagaaaaacgcttataaagtcactactcaaactctttgcattcatcatgcttaacacagagccaaaatgtcgtaagtaataatacccgttcagccatttcatataggaggaggacatgaaaaaaccctccctcttcagatcatggcaagtttaatctatcccataagcayagccactaaaatctattattaggagaaaatgtggtagtcaaatgagaaaaaagatactggtccaagtttttaacttcaaatattactacttaaatgctaaaacatttaaattgaaggttttcaaattaaaatttagttattaatcaaaacgttaagacaacacagtttacaactattacatcaaaaaaaatttctctgaatgcaaacaatcttacttgcaagcaagtcgatagccactaataactgatgtgggatgaattttctgtttgactaattcatctgcattttttaggagttctgctgcaataataacctgttgagaaaacattcaccggtctgagtgtgccggatattcaacatgtgcaatacatatggaatgacactaaaatggccatatattattaaccaaaatggtagtgatgaaatgaattaactggttattagaaacctgggcgtgaagggagaagaacgctacaaaacactccaagtcctccacgttactcataaattcttggaaactgccactttaagcaaaacaatggacagcaatttctcaaatacagttgtttattgtaacgctgatggggggaggaaaacttgtttttttatacatcatctttcctcttaaagtcagtttccatgaagccactgtggatgttcagtgaggtcttattgtattataaatgcaaatggccaaaactgggtaggagccagaaaaatgttctaagaaactagttcagcaataagaaactagttcatcaatacaaccgtaaaagacaacacatctattacctttagaaaaaatgctcaacagaagctaaaccgagtgtgactattcatatgacctatattaggctattattttatttaaaaaagatagttcttcaagttgataaaacactaagaaatatttttaaagcaaaaagactgtcagcttcttatggaaggaaaactacatttgttaaatcacattatcgtaagttagacaaagatcatattcatattttaggagtagattccattctttcatggctaaagtttaatctagaaatacattttccccacaaactatctagtttctccagaattaacatctttctcaccaaacaatagtgtttctactataccagcatgctggatgatctatgaagagtttatactgtgtatcacatttactgactcggtaagatcacactgtcatatcatgatgtatttattaatttctcacactcccattttgaattcctgagattacctgtcaggatttaaaaaatagaacaggctgagtgcagctcatgcgtgtaatcccagcactacagaggccgagaagggaggatcacttgaggccaggagttcaagaccagcctgggcaacatagcgagaccctgtctcttaaaaaaaaaaaaaagagk

SEQ ID NO: 95617 - DNA, 25895 bp, Homo sapiens
gaggctacaaagcaaatgccatctaaggggcagatggaccaaggtcagggcatagaagcaatgtcaagctttaggtccaagagtgatgaccagagtcgtgtaagagatgggacagcaggccaatcaggatttgaggagatagggataagttgggaagttgtgtagggacagaaggaggaagaaagtttcaaatcttgggctccaattagataaggctgggcccaattcttttgggtgtgaaaaatgtgggagagggagtggcagctgtttaaaggcacggagctacacaggtttaacagcaatacacttgacccttgaacaacatgggtttgaactgcatgggtccacttctatgtagattttcttctgcctccacccccgccccccaccccccagacagcaagatcaacctctcttcctcagcctactcaccataaagatgaggaggatgaagacctttatgatgatccacttctgcttaatgaatagtaaatataatttctcttccttgattttcttatttttttcttttctctagcttactttaagaacacaatattcataaaaaatatgtgctaatcaactttgttattgtcttctctgtgatgtacaaactttatgttattgccggtcaacagcaggctattagtggttaagtttttggggagtcaaaagttacagtcagatttcttttcttgtttttttttttttctaaatgttttattggatttttttttttttttgagacaaggtctcactctgttacccaggcaggagtgcagtggcgcgatctcagctcactgcaacctttgcctcccaggctcaagcgattctcctgcctcagtctcctgagtaactgggactgcaggtgcttgccaccatgcctggctaattttttgtttgttttgagatggagtctcgctctgttccccagactggagtgcagagtgcagtggcaggatctcagctcactgcagtctccacctcctgggttcaagtgttttttttgttttgttttttgtttgtttgtttgtttgtttgtttttgacactgagtcccactctgtcgcccaggctggagtgcagtggcgagatctcagctcactgcagcctccgcctcccgggttcaagcgattcttctgcctcagcctcccaagtagctgggactacaggtgcgtgccaccacgcctagctaatttttgtatttttagtaaagacagagtttcaccatattggccaggctggtctccaattcctgacctcatgatccacctgcctcagcctcccaaagtcctgggattataggcgtgagccactgggccctgccaatttttgtatttttagtagagatggggtttcaccatgttggccaggctgatctcgatttcccgacctcagatgatccgcccacctcggcctcccaaagtgttgggattacaggcgtgagccatggtgctgggcatatacgcagatttctgactgtgaagggaccagcacccctgacactgcatcattcaggggtcaactgtacattcatatcccccttactacctactagctctatgtgtgaccttggtcaagtcactgtctttgcttacagcaggaataaagcatttgacttagtagctagcaacatggaggatctgctcaatgatgccgactccctttgccctttatggacgtaatcaactcatgattacctgcgacacatgcccactttatccctttgtttaacagaacacttttgttctgaaccaagctcctcctttcctttccagtagttaatgtgttctttgaggatgcaatctaatcgtaattttgcccgaagtggggaaaaaaattaagctcacattgaaaccttaatatagctctataatcattttctcttttagcctagatcacttcattttggcaatttaagtactacttttggtcctattaacaataccactcttgcaaaggacaggttacaaccaattctcagattcctgcctggataagatttgtgaccccaaattttaaaaaagcagaaaaaaaccccacaaaccacaggcaggaagaaagaaaaacaagagaatgtagctaaggtaattccattaatgatcagtttatgtcaaagcatgtggaaataatgccttataggaggatatttagcaacaacaatttttttaaactcattttctcctgtaggtacagaattgcaagttttttctgacttcaaatgtgtatagctgactgcgtgtgtgtgtgtgtgtgtgtgtgtgtgtgtgtgtgtgtgtgtgtgtgtcagggtctccttctcttgcccagactggagtaaggtgacataatcatagctcattgcagccatgaactcttgggctcaagtgatcctcctgccttcagcctcctggcgtagctaggactgcaggcacatgctaccacacccagctactgttttttggtagagacagagtcttgctatgttgcctaagctggtctcaaactcctggcctcaagcaatcttcccacctcagcctctcaaagagctgggattacaagcatgaaccactgcacctggccccatacctgactacatttctcagcttcctttgtggctaggctgtgctaggtagccttgtacctaaattttgaccagtgagcagcaagtggaatttgttggatgaatctaccacaaaggatccttacaatggagatagtggggccaggcatggtggctcatgcctgtaatcccagcactttgggaggctgaggcaggcagatcacttcagtctaggagttcgagaccagcctggccaacatggtgaaaccccatctccactaaaaatacaaaaattagccaggcatggtggcacgcacctgtaatcccagctactcaggaggctaaggcaggagaatcacttgaactcaggaggtggaggttgcagtgagccgagatcgcaccactgcactccagcccagcaacaaagcaagactcttgattcggaaagaaaaaataaaaaaaggttgggggagacagtgggagcccagacttttgtccttccccttgcctagaagggagatgaggttgctggtgctgtggaagctattatggaccatgaggcagctttgaagacagaaagcctgcatccttgatgactcaatggaatttcatcccaacccaggactgactgccccagatctttgttacatgagggaatacactcttctgtgtttaagaaactgtggttggatctgttactggaatatgaatgcagttaataactggctcaaaatgacttcatctcaacccacattggttgcttcttccaaacaatatataggtctgtactgtggtgggtctcaggatggctgtgatgtagccttaggaagtttatctatgggaaatccatattcatggtgtcctgatgttgcagaggacatcctgagctggctggagtaacttgggacacaggtcaatcgactgtaatctaacttctgaggccattcagtaccctctacagtggccacctaaaaaaaaggcagccaggtgtggtggctcaagcctatatagatcccagaactttggaaggctgaggtgggaggatcacttgagccaaggagtttgaggccagcctgggcaacatgaagaaactctgtttctacaaaaaataaaaaaaattagccaggcatggtggtatgcacctgtagttccagcttcttgggaggctgaggtggaagaatgacatgagcccagcaagtcgctgcaatcagccgtgatcacgccgctgcactccagcctgggcgacaaaaagaaaaagaaaacggagcctgttcactgggtgtggtagacaaggtaaacttttctttacctcccatatcccacaaccttggatgtgctcacagtcatggtagtgttttgtaatgatgtagctgatgacaggtgtgatgttggagattcttctacctgactgctgctatcagtcctaccagcccccaacgtttggtgcttgttctaaagggcatgtcctaggagtcgctttaaactctcaaagtatcactctctatacaaacaagaagtgcaagtaagtagcctgagctcagcctcccaataggaatatttcattatcactagatcaagtctttccattacaatgactgatctgtctctgaatcctgtggattcatccttcaaaatgcccttttcttccagttctcatagctagtgccctaaaagtgacctgcagtacctcctgctgagacgaatgtaccagcttcctaactagcctgcactcccttcatccccccaagtcagtgccagaccaccttgcctgaaaaaccactttcagtgtgtctcacctcagcagaaatgtttctcagcttccaattaacaatcacatcaaacccctgctcttgtctgcgttttaagggtatctataggccgggcgccgtggctcctacctgtaatcccagcactttggaaggccgaggcgggcagatcacttgaggtcaggcgttcgagaccatcctgaccaacatagtgaaaccccgtctctaccaaaaatacaaaaaaaaaaaaaaatagtggggcgtggaggtgcacgcctgtaattccagctactcgggaggctgaggcaggagaatcgcttgaacccgggaggcagaggttccagtgagccgacatcgcgacacagtactccagcctgagcgacagagcgaggctgtgtctcaaaaataaataaataataaattaaaaaaataagagtatctataacctggtcccagcctgaatttcctttttcaccccaacacgtagccctagttacattcttctgacgtctgtaaacaagcccagcccttcctgttgtgaagccaagttcaggtggttcctcttcgcctgactgttttcccattccacttaccggaagcctagtcatccttcggagggctgtacgggggttgcaagaagcaacggaaacggttcagcacctgctaccttccatcatattcttttcaataaaggggcaactcccgccaatggcagtgtagatttcctaacctctacacatggaagattcacaccattcaggattgttgtttaactgttgagagagcacttgatacttaacagcttactaggctacaagacagcgcaggaaagaatcctctgttgtccttttatgttatcctgaacagttggttcacagagttactgtaaacacacaaaacatgactgccagggcttagtagtgaggaaggtgggaactagtcctgactcagttaactgtgcccaggagaagctgcttaacctcaaaggatttcactattactagaatcaataataccaaccctaggggtaaaaataaagataaatgtgtgcaaatcctgcctgcagtctcgggcacgtcgtgggtgtccaagaactgttcttaggcagccggtggggacaaagtctgtgtgcctcctgtcctggaataggtcccaaggtcggcttacttgcaaagcaagggtacggcgcaagagtactgaatacgggttggaagggcgctggctctaccctcagctcataggccggctgggcggcgctgaccagcagctaggccccgtcttccctaggaacggccacgggggccctgggagggtatgaatgtctttttgcagtgaggcctctggaccccgcggccccccggcagcgcaaccaaaactcaggggcaggcgccgcagccgcctagtgcagccagatccccgccggcaccctcaggggcggagccggaggcagggccttcgggccgtaccaactccacgggggcaggggccgcctcccttcggccgcgcgccactcaagtacggcagacaggcagcgaggttgccgaggccgaggctagcctgcagcctcctttctcccgtgccctgggcgcggggtgtacggcaagcgcgggcgggcgggacaggcacgcagggcacccccggggttgggcgcggcgggcgcggggcggggcccgcggggggggggggcggggcggcggtgcccttgcggcgcagctggggtcgcggccctgctccccgcgctttcttaaggcccgcgggcggcgcaggagcggcactcgtggctgtggtggcttcggcagcggcttcagcagatcggcggcatcagcggtagcaccagcactagcagcatgttgagccgggcagtgtgcgggtgagaagraaggggacccggtcacgsscccaagggcgaaggggctcgcggcgggcagggcctccgcggcaatggcgacagtggccgcaccgggcctggcgggaccggggcacctgcaggcggttctcccgggagtgcccggcgcggcggctggagcggggatccgcagggaggggacgcggggactcgggggacgccgcgcgctgccgttcctcggcagcccagcctgcgtagacggtcccgcggcgctgactgaccgggctgtgctttctcgtcttcagcaccagcaggcagctggctccggytttggggtatctgggctccaggcagaagcacagcctccccgacctgccctacgactacggcgccctggaacctcacatcaacgckcagatcatgcagctgcaccacagcaagcaccacgcggcctacgtgaacaacctgaacgtcaccgaggagaagtaccaggaggcgttggccaagrgtaggttccaggctgagcggcgggaggcagtccccggcagaggcgaccccagggagccaggccccatacggacgggcctctccgtggaggagaactcgcttcgtatttgtaccggttccgagttttccaggcacgatagtctctcttttaaacacatggtctacctcattgtagaaggagtgcctcgatgggtttgaacacacttctgtcatctcagggaacttggggtcctgcgaaggagcttgccttactgttgtgagccacattccgttacacatattgccagcactggtgaattgtagggcctgaaaagaaagctctactgtgtcactcgttttttttgcaaattgaaattgttcttgttgtataatrygctttggggaaatgtttggtctctcaggtaggtgtgccagccgtttgcaggagggctgagagcgcctgtccactggtggccagacatcatcgggtccgcaggtgtctctgagtgtcagggtcacctcctgatagaagtgggagtggtgtcttactgccaggtcacactgaaggtgggagacaggaggacactactccgtgctaggaaccatggtccttgtcatcttcctgagagcaaacggggtcgggactccagcctaggacttggagactccctgcatccccagctaccctgcaggtgaaacttcactgagcccacttgacttcaggtgggagaggaggaggcacaccrttgtggtgtgcgttaccaaaaaagcagtaacctaactgtggaacagttcaggatctttagacttgatacttttcttgatttcccttaggggtcaaagttcacaaggaaaatagccctttagtgggaaactgaaacaggcttgtttttatttactatttactcatatttgtaatgcaattaaaatatatgttgttaactttttttttttttctcaagagctcggttgataaaaccaggggtatgtggactttttgagtctkkgccttttgggggtgtgtatgggaatgttatgttttaacrttttttacaaaatagtattgtctttttaatttattcgttagtggtttgcacaaggaagataatcgatagtcatgttttttagackctctgtattgcttggtaagctacgtagtaaaaaatgtttacttttccttaaatgttttgaatttcggggttatgaaatttgttgagtaatttttagacagtcacatcttgttgactggaggcatctagtggaaaaatgcagtatttcagcctgattgtgtttgaagtaaatgattaaaagaggaggaagttaccacattctggaagatttacttgagacagacgaaccttgaattacgggaaaaggccccgtgatttaggaaataacaaatttgggaaacatgtaatggggagagactggggaataccccagttgtgaaagtacttcctgtaaggcaacatctgacaccaggaacctttctcttcagtattttaaaaacaacttaatttcagtcctttacttgtggaatcagagccttacttatgtaatacaacccactggaaaaaagctttttattgtattgtactatattgtttataagtgattgagtacctgcagagctttcttttacttaaacatattttaaaaattattaaaaagattttcatgtttgaaaacttggggaaaaaarataaaacaatgtcataatctcatcacatttaactgactaatatgaatatttttcaacaaaaagcatttgacttttattattatttgaggcaaaaactaaactgaaaccaaataaaatgttgaatttcagaaaagtgttcttaaaagcagatattaagccctcaatttttattaattttaaaatgagtaagcaaactgtaagatgttaagattattaaattatctctcattaagcatgtatctttcccattttaaaaattcagttactattgatttattaaaaaacaatagaaaagttacatctatttttagagtgactctcaagaaaatttaataagggaaacacagatctataaaaaaactgtttgtaaacctaacaaaggaaaaaaaaagttggtgtctttaaaaaaccctttgagattagctgtgtattcagatatcagttggttctctcctttctgaatcgctaaacaactggagcttgtttcagaaagcagcattgtctacgtatgttccttttaaaaattttttttttaattctrtctaaaaaaaacagacggggtcacactatgttgcccaggctgctcttgaattcctgggctcccctatccacgcacctcggccttccagagtgctgggattacaggtgtgagccaccgtgcctagtcagacatacttttttttttttttttttttttgacggaatctcagtctgtcccgcaggttggagtgcagtgatgtgatctcggctcactacaacctccgtctcctgggttcaagyaattctcctgcctcagcctcctgagtagctgggattacaggcgtacgccaccacgcctggctactttttgtgggttttttagtagagacagggtttttccatgtcgtccaggctggtctggaactcctgacctcaagtgatccgcccatctcggcctccyaaagtgctgggattacaggcgtgagccacctcacctggccttgtatgtatgtttttttctttytctttctttttttttttctgtgacggagtattgccctgtcgcccaggctggastgcagtggcgtgttcttggttcactgcaacctctgcctcctgggttcaagccattctcctgcctcatgctcctgagtagctgggattataggcacgcgccaccatacctggctaatttctgtatttttagtgaagacagggtttcaccatgttggccaggccggtcttgaaatcctgacctgaagagagctgcccgcctcggcttcccaaagtgctgagattacaggcgtgagccaccgcacccggcccagacatatgttcttaacgtacactttcagaacagcagttgagaactttttccaaaatgtaagctccttgagagcaaagctctcagtgggtctctgtgtcctttactttgcttctcttggtatcttgtggataatatgcacaaaatatttattaaacaagaggatttccatttttttctaatattaatagttcatttagtctgtagcttcttgaaggcatagaaaagactattttattttgcctacttatttggcraggtacccatgcagtatgccaggagttacagggcctattgagaaggagtaaagggtctgggaggggtggcagggagttgctaattcatgtatggtggctagagaaggcttcactgatggggttgatgtttcagtggagacttgaaggaggaacaggaacgcagcatgagactgtcttggggaagagtgttcagcagaggcagcagtgctcagctagccttgaggggaacatccaagttggtcatgtgagtgcaaaaaggccagtgaggctgcagctgcgtgagcacgtgctcaatgacggggtcaagtgcagcrcctcttggtagtaagagtagctgagtgtaaacacctagggttcgctccagtgagaaggggagcctttggagggggcaaggcccacccccaccccccaaaactgaggggatagtggcaccagtgcagtgagaaatactggtcctctgtcccaatgaggtggcagtagagttagggagaagggattaggttctgcttgtgttttatttttttcttttatttttctctgtgtgcttttatatagattggatgtattttaaaggtagagctggctttgctaatggatatgctggtggattggatgtggggtgaagggagaggagtcaaaaatgacatcaggttcccaaggatgtcctgagggacagagctggcatttactgagacgtggaggacaataggaggagtaagtttggggtagaacatcaggagttcaattttgagtatgttgagtttcttgttaatgtgacttggagatatttcccaatgaatcgtcgtctgtcttgaaagtgagagttgaaggttttctgtacagtctgtatgttgagccatacattttagcattctattattttgattgtcctctttggtgtttcatttcctaaaatctcttctatctaagagatccctgagcctagcagccaggagtgaattttctagcttttccacctctgctaggtccttcatcagttgttcagcatgtctgggacaaataattttggggcgggggggtgctgaattttaggacaaacggatgttatagataagctggtcccattatctaatagcttacaaagaaaaaaatataatgtatacagtggttgaaaaagtaggagtyacaaaaaaatgtgtttgcattttaacttttcaggagatgttacagcccagatagctcttcagcctgcactgaagttcaatggtggtggtcatatcaatcatagcattttctggacaaacctcagccctaacggtggtggagaacccaaaggttggtatatattggtgcacccttatctacattttgtgcacagtaggaatcgattgttgatttactgaagttaccttatacttgttttttgttttttttgttgttgwttttttgagacaagagttttgctcttgttgcccaggctggagtacagtggcgcagtcttggctcactgcaacctccgcttcctgggttcaagtgattctcctgcctcagcctcccaagtagctgggattacaggcgcccgccaccacgcctggctaatttttgcatttttagtagagatgaggtttcattcaccatgttggccaggctggtcttgaactcctgacctcatgatctgcccaccttggcctcccaaagtgctgggattacaggcatgagccaccgtgcctggcctaagttaccttattcttaccagaggtatcatagtggcatatttttcataacaacgagtatgataaaagttgtaactttcaaaaggacacaagtaggaatggagaatgctttcatggggttatgtcataagattttatgttcacgccaacatagaatatcacatcaactccaccttctggtttctggatggtacttcatattagggaaagactgagagacttcattttatgaactttttttttttgagacggagtcttacagtcgcccaggctggagcgcagtggtgcaatgtcggctcattgcaacctccgcctttcaggttcatgcaattctcgtgtctcagccacccaagtagctgggattacaggcatgtggcatcactcccggctaatttttatatttttggtagagacagggtttcaccatgttggcggggctggtctcgaactcctggcctcaagtgatccacccaccttggcctcccaaagtgctgtggtatggatgtgagccaccgcgccagtctagaaaagatgaactttctgtctactagtttctagggcctggattagatagttaaccgtctgtaccttttttcatctatgtgatacagggataacaatggtgttgttttgagaattaaattatagtgtcatttgctatttttcactctttcctaactgataaaaagtcagttgttccaggaaattaggttttctgggtatttttaaaaagtgttcagggaatgaggagagtacagggctagatggtcttgttcgctatcactgtttccttgacttcctgtgtagcttgtggaggcccagatgactttaattatcttcttcacccagggagggcatgaggcgtaaatgtagttcttgtctcttgtttctgggctccggatatgcaccctaagtttctgtggttttattgttcatttttaatcagtgttatggaaggcagcctatcttatgcacttgaaataagcaatttcattttaaggtaatgatgaatgaggagagtaagcttgggaaactgggcaactttttctttatttttgtttttatttattattattttggagatggagtttagctctttcgcccaggctacagtgaagtggcttgatcttggctcactgcagcctctgcccatcccgggttcaagtgattctctgcctcagcctcccgagtagctgggattataggtgcctgccaccatgcccggctaatttttttgtatttttagtagagaggagtttctccatgttggtcaggctggttttgaactcctgacctcaggtgatccacctgtcttggcctcccaaagtactaagattacaggtgtgagccaccgtgcctggccaacttattttttttctgagttcagtcttctagactatcggttaatacttttgaagttttgtcagttaccagaatatcagatatattcatatgcaaccagtggttttggtatgctgccatttttgtytaatctgtaccacattccatcatttgtgcttataaagatgattacttttaaacccgtagaataagagaagtgagattttgacccagttgatttagttgatgtgactaatctagaattatattctgtattactacagaataaaaggattacagctcttaaagtatacccttagttcagtcrtagagaaaactgcccatcaagacaggaagagctgggctgccttggagaagaacaatgactttattcccaaatggaggcgtagaagaaggagggtagaagtcaaaggaaaattttctattcagggaaaagaaaaagctaacagaaagtagtatttctttcctaacaaagatagtacagtgagtggggaaatccctctaacacgattcattaaaaaatgtgaactacgcagctggaggccattatcctaagcgaattaacccaggaacagaaaaccaaataccacatgtctcacttgcaagtggaagctaaacatggagtacttatggatataaaaatggcagcaacagacactgaggacagagcagggagggagaaagaagggggggggtgaaaactgttgtatactaagctcgctacctgggtgatggcatcaattgcaccccagacctcagcatcatatgatacccgtgtaacaaacctgtgcgtgtaccctctgaatttaaaataaaatttgaaccgggcacggtggctcacgcctgtattcccagcactttgggaggccaaggcgggtggatcacctgaggttgggagtttgagaccagcctgaccaacatggagaaacccgtctctactaaaaacacaaaattagccgggcgtgatggcacgtgcctgtaatcgcagctgctcgggaggctaaggcaggagaattgcttgaacctgggaggcagaggttgcagtgacccgagatcatggcattgcactccagcctgggcaacaagagtgaaactccgtctcaaaaggtaaaaaatgaaaaaaaaaaaaaaaaaaaaaaaaagttgaagttataaaaawcaaaaacgtgaattaaaattgtgaaacttagatccaggtgtcgcattctgatgttgtctaatttcttgggccctatgacaaaaatattttaatacatgtaatataacatkttactgtaattattgaaatctgttcatttgtgggtgkttttggattttttttttaataggggagttgctggaagccatcaaacgtgactttggttcctttgacaagtttaaggagaagctgacggctgcatctgttggtgtccaaggctcaggttggggttggcttggtttcaataaggaacggggacacttacaaattgctgcttgtccaaatcaggatccactgcaaggaacaacaggttagatttaaaaattgtgatttcatttgggagagatgctctactgtaaagcattcaactagaaataaggaaaactaacagtgttttaagaacatgtaataatttgcaaatcttaacagataacacccagagtcttgtgtaagtaaaaatgttttagaagtcctgatatttcataaaattaagtacacgtaattttataggtacattaacaaacatgttttatttttatttattttttttgagacagatctcactgttgcccaggctggagtgcagtggtgcgatctcggttcactgcaacctccgcctcctgggttcaagtgattctcctgcctcagcctcccaaatagctgggattacaggcacataccaccatgcccagctaatttttgtgtttttagtacagacagggtttcaccatgttggccaggctggtcttraactcctgacctcaggtatctgcctgcctcggcctcctgaagtgctgggattacaggcatgagccaccatgcccagccaaatgttttacttattaaccctgcttcattctacagagaattaatatcagcttagataattatatgtactaaaataaaaaaaaaattagctatagaacaagagtgaggaaaagaaatacaagcagagactgatttcagagcttgtactgttacctcctctgctgagcatttgaggttaaactgggactagatctcaggtttccagaccttctgcctttctggggctctttggtagagtatatgaaaatattcggcttggaagtgccaggctgggctcaccaaatactttgctgttgakcctaattggatttaaaaaatgtcactgaagagtatgggaaatagagccatgagttgtctggcagagggttgggactttgaacttaaagtgataccttcacatcaacaacagtcattctctgccccttcttctacccctgacattggaatactcttgatctgtggctcacttcacaggatagacccagattttggcagaatctgaacagctcttttgggacagtgamatggcrtaacaatttgtaaaagccacaaaaaatttgtaagcaccgatctgtagagtcaggttatttgtagagctgcatgaccagaaaggctgatatttgtaagtgagtcccagctacactccttcctctccctgtggaaagcacattagaaggaaaatgagggaatgtcatggccttttgtttataaaaatcattaataaattttgctacttgaaattattaataataaattactagtgacctccctcacaactgatcaagacatactggttaagaattgtttttgtagagagagctataatttattttgagtgtttttgtgtgtgcgtgatggagtctcactctgttgcccaggctggagtgcagtggcgcaatcttggctcactacaacttccgcctcccaggttcaagcaattctcctgcgtcagcttcctgagtagctgggattacaggcgcctgccacctcgccaggctaattttttgtatttttagtagaggcggggtttcaccatgttggccaggctggtctcgaacgcctgacctcaagagatctgcctgcctcggcctcccaaagtgctgggattacaggcctgagccactgcgcccagaccaaaagtttttttaaatggatgttttacagatagaactaaattcttcatttacctcacttaatttctgaaaacactgtgtcctccaactgctctgtattcccaaagattaaaattagccttggggagcagagctggttcctcgtaaacccctgtgagtgcccagaccctttggaggaggttctcagtgggcttttgcctgctcccacagatgtaacccacccttcctgctgctcctaagaccaccatgaggaaggctgggaattggctcttgaattaatttgttggtatttttaagaatagctattaaagtactgttgttaattttcccaagtctattttattgttagtatttgtcacattttctttgtaaacagtgaattaaaaatattttataggaatattcattcttatctagatttcctacttatataaaaaaacaagtgaatgagattgttacaaagggtaattttgtgtgagtagaataataaaagttgaaattgagaagatgcaatgttttagactgaaactgatggttggtttgttttccccttctttctaacaggccttattccactgctggggattgatgtgtgggagcacgcttactaccttcagtataaaaatgtcaggcctgattatctaaaagctatttggaatgtaatcaactgggagaatgtaactgaaagatacatggcttgcaaaaagtaaaccacgatcgttatgctgagtatgttaagctctttatgactgtttttgtagtggtatagagtactgcagaatacagtaagctgctctattgtagcatttcttgatgytgcttagtcacttatttcataaacaacttaatgttctgaataatttcttactaaacattttgttattgggcaagtgattgaaaatagtaaatgctttgtgtgattgaatctgattggacattttcttcagagagctaaattacaattgtcatttataaaaccatcaaaaatattccatccatatactttsgggacttgtagggatgcctttctagtcctattctattgcagttatagaaaatctagtcttttgccccagttacttaaaaataaaatattaacactttcccaagggaaacactcggctttctatagaaaattgcactttttgtcgagtaatcctctgcagtgatacttctggtagatgtcacccagtggtttttgttaggtcaaatgttcctgtatagtttttgcaaatagagctgtatactgtttaaatgtagcaggtgaactgaactggggtttgctcacctgcacagtaaaggcaaacttcaacagcaaaactgcaaaaaggtggtttttgcagtaggagaaaggaggatgtttatttgcagggcgccaagcaaggagaattgggcagctcatgcttgagacccaatctccatgatgacctacaagctagagtatttaaaggcagtggtaaatttcaggaaagcagaagttaaaggcaaaattgtaaatcagtcgagatcgggtgccttcagggtggtatggctgtataccaaaattgtaaatcactacatgaagcttatatattggtttggcctgaaaggtgaagtggggtaggcagggggcgggcttacaggttatggtggattcaaagactccctgatttgtgattggttaaggaagcaaagctttgtctaaaaacttggggtccgcagaaaggaacattaaggtctggccaggcccctcaggaagaaactgagagcaaagaatggaggtcagagtttagtccctggtgttcccccttatctgacgtctgtgtgaatccatttggtgggggtctgggtttctgaaaagtagctcaggggcacgtgttaaggatgtctctaggtgactctaacttccctggctattgtttgaaactgttatgaccttcttgcttatcagcttgctggtttccttctcggggcgagctgggtgcctggagttttcggtgaaggaaactcaagattctcctttatttctgtgcttgtgggaatccccctggcacaccccaaagaggggtccctgctccgtctcacagggatctttttgtatatttggcttagcatcatacatttgccatgttgtttcatcatctgcctaatttactgtttttgaatatttcatttgtttctaattgttactacagataatgctggggtgagcaactctgtgtacataggtttatctcctattggaatattttctttatataggcgttttttttttttctttttttttggagacagagtcttgctctgttgcccaggctggagtgcagtggcgygacyggagctcactgcaacctccacttcccgggttcaagtgattgtcccacctcagcctcctgaatagctgggattayaggtgcatgctaccatgcctggctactttttgtatttttagcagagacagggtttcaccatgttggccagggtggtctcgaactcctgacctcaagtgatccgtctggctcagcctcccaaagtgctgggattacaggtgtgagccactgcacctggcctatataggcttttttcttaaacctatttagtaatgttttcccaagtttattttttatttttaattttttccccaagtttatttttctatttttttttcatggaaaaatggggtaacttagcagtttcaatattgaagactgaagtttaaaaaamatttaaattcaaggtacttttaaaattcagttagaaaagtaggctttaaaaattattagagacaagagtaccaaagcggtgtgtgtatgtgtgtgtgtgtatgcatgcttgtggattggaaaaactttggagactgattacttttcattatatatgtgtcacagtgaaacagcttttatgtgtcatgtaagattaytgcttgcctctctaaggaaggtcgtgactgtttaaatagacgggcaaggtggaaccttttgaaagatgagcttttgaatataagttgtctgctagatcatggtttgtattgaactaacaaggtttgcagatctgctgacttatataaagctttttgattcctactaagctttaagatttaaaaaatgttcaatgttgaaatttctgtggggctctatttttgctttggctttctggtgagagagtgaggaagcattctttccttcactaagtttgtctttcttgtcttctggatagattgattttaagagactaagggaatttacaaactaaagattttagtcatctggtggaaaaggagactttaagattgtttagggctgggcggggtgactcacatctgtaatcccagcactttgggaggccaaggcaggcagaacacttgaaggagttcaagaccagcgtggccaacgtggtgaaaccctgtctctactaaaaatacaaaaattgtttagctctgtttttcataatagaaatagaaaaggtaaaattgcttttcttctgaaaagaacaagtattgttcatccaagaagggtttttgtgactgaatcagcagtgcctgccctagtcatagctgtgcttcaaaaacctcagcatgattagtgttggagcaaaacaaggaagcaaagcaaatacwgtttttgaaattctatctgttgcttgaactattttgtaataattaaactttgatgttgagaaatcacaactttattgtacacttcattgcaacttgaaattcatggtcttaaagtgagatttgaatttctattgagcgcctttaaaaaagtaataccaaaccataaagttaaaatctatgtatattgagtcatatctaaaaccacgtataaacataaattgtatttcctgttttaattccaggggaagtactgtttgggaaagctattattaggtaaatgttttacaaattactgtttctcactttcagtcataccctaatgatcccagcaagataatgtcctgtcttctaagatgtgcatcaagcctggtacatactgaaaaccctataaggtcctggataatttttktttgattattcattgaagaaacatttattttccaattgtgtgaagtttttgactgttaataaaagaatctgtcaaccatcaaagaggtctgcattatgcttgcatgtcaaaaacattaaaaatcctataatcttctgtcattttcactgagtttccatgggaaaggaatagtaaataatgggtagttgaaatattactcttaagaccaagacctgtatctccagtcatatctgtaataacatcatctgataacctaaaagcatagtattagggatatacgacaaaaccaaagtgtttttgctgttgtcacataccactcaatacttttacaccaggttgtccagtggacaccagctggatgtcctataattcaattctgacactgtctacctggaattggagtcagatcccacaggtggagggctcagcccacaagactgcccccactccagataccaatcgcaagtccctatacttctgactggctataaagtggggttcccgtgaccctttccttggttttgatttatttgctagagcagctcccagaacacagagaaacactctacttatgtttacccatttttaattttattactttattaaaactacatattggttacaatactaatttattgtaaaggatatttcatttatttatttttttatttagagatggagtctcactgtgtcacccaggctggagtgcggtggcacagtctcaactcactgcaacctccacctcctgagttcaagcgattctcatgcctcagcctcccaagtagctgggattacaagtgtgcaccaccatgcccagctaatttttgtatttttagtagagatggggtttcactctgttggccaggctggtctcaaactcctgacctcaagtcatccacccacctcagcctcccaaagtgctgagattacaggtgtgagccattgcctctggcttgtaaaggatatttcaaagaatacagatgaacagccagatggaagagatgcacagggcaaggcatgtgggaaggggtatggagctttcatgctctctccacgtcatcagctacccagaagctcatctggaccccgaccctttggggttttacggaggcttcattatgtcagcattaccattggcaattggcgattaactcaaccttcagcctctctcccctttctggaggttgggggttgaggctgggagtccaaaccctccaatcttgccttggtctttctggtaagcagccccccgtcctgaagctacctagaggctcccagccaccaatcatttcattggcaaaccaaagatacttcaaggggtttaggagccaagagaccaagcaaggattgagacaatatatatatttcttataaataacatgatcacaaatagtattttatatatttctcataatagctggttgtggttactcacacctatcatcccagctactaagaagctaaggcaggaggatcacaggcccaggagtttgcagctgtagtgagctatgattgtgctactgcactccagcctgggtgacagtgtgagaccctgtctcttaaagttcttgtaacatcttagaacattaaccaaccacagattattgccttaactctgaaaaataaagtaatcatacttttacaagatgtattttacataaagttctggtgatattttactctggtcattggaatataggagcttaccacctggtaccactcttcctaaagtggtatactatttggtatagtactggcatactatttggaaagggatgtgaagttggcatgacctgtctagggtgaagtcatgctgtctgctattcattgtgggctttacagtaatgagagtgcttctgttgtcaagatgcttctgggacacgttaaaaaaaatttaagatttctcagtttgtgaaaaggaaggagcacgaatgctttcaagttcctatgacatgctagtcatctttcagtgtgtcccattgttgcacccagtagtctcgatgcccagygtcacggtgattccaagtttgcctctctgcccactataatttgtgctccatgaagtcccaggacatgaggttcttgttcatttgtgcgtctgggcccatatccaaatattaaacaatgtgacttaatgtatttatcatattgtaaatatgggtatccccaaggctcagaagttaacacagcatatccacagagaggtttgacagcatggctgtggtgactgggaaggccttatgcttgctcctccttctgctgcttgcctttgtgtgggcatggaaagaacattgaattaggtactggaagacctgggtcctggtcttggagattttaccagagcacctgtgggatattggtcaagatgcctggttttagtcctgctcctttgctgtgaaagaggatcttaaggtgccaactctggcattttattttttatttatttatttttaaattatactttaagttctagggtacatgtgtacaacatgcaggtttgttacatgtatacatgtgccatgttggtgtgctgcacctattaactcgtcatttacattaggtatatctcctaatgctatccctcccccttctccccacccctcgacaggccccggtgtgtgatgttccccttcctgtgtccaagtgttctcattgttcaattcccatctatgagtgagaacatgcggtgtttgtttttttgtccttggaatagtttgctgagaaggatggtttccagcttcatccatgtccctataaaggacatgaactcttccttttttatggctgcatagtattccatggtgtatatgtgccacatcttcttaaaccaatctatcattgatggacatttgggttggttccaagtctttgctattgtgaacagtgccacaataaatatacgtgtgcatgtgtctttatagcagcatgatttataatcctttgggtatatacccagtaatgggatggctgggtcaaatggtatttctagttctagatccctgaggaatcgccacactgtcttccacaatggttgaactagtttacagtcccaccaccagtgtaaaagtgttcctatttctccacatcctctccagcacctgttgtttcctgactttttaatgattgacattctaactggtgtgagatggtatctcattgtggttttgatttgcatttctctgatggcccatgatgatgagcatttttttcatgtgtctgttggatgcatggatgtcttcttttgagaagtgtctcttcatatccttcacctactttttgatggggtttgtttttttcttgtaagtttgtttgagttccttgtagattctggatattagccctttgtcagatgagtagattgcaaaaattttctcccattttgtaggttgcctgttcactctgatggtagtttcttttgctgtgcagaagctcttgagtttaatgagatcccatttgtcaattttggcttctgttgccattgcttttggtgttttagacatgaagtccttgcccatgcctgtgtcctgaatggtactgcctaggttttcttctagggtttttatggttttaggtctaacatttaagtctttaatccatcttgaattaatttttgtataaggtgtaaggaagggatccagtttcagctttctacatgtggctagccagttttcccagcaccatttattaaatagggaatcctttccccatttcttgtttttgtcaggtttctcaaagatcagatagttgtagatgtgtggtattatttctgagggctctgttctgttccattggtctatatctctgttttggtactagtaccatgctgttttggttactgcagccttgtagtatagtttgaaatcaggtagcgtgatgcctccagctttgttcttttggcttaggatcgttttggcaatgcaggctcttttttggttccacatgaactttaaagtagttttttccaattctatgaagaaagtcatgggtagcttgatggggatggcattgaatctataaattaccttgggcagtatagccattttcacgatattgattcttcctatccatgagcatggaatgttcttccatttgtttgtgtcctcttttatttccttgagcagtggtttgtagttctccttgaagaggtccttcacatcccttgtaagttggattcctaggtattttattctctttgaggcagttgtgaatgggagttcactcatgatttggctctctgtttgtctgttgttggtgtataagaatgcttgtgatttttgcacattgattttgtatcctgagattttgctgaagttgcttatcaaattaaggagattttgggctgagatgatggggttttctaaatataaaatcatgtcatctgcaaacagggacaatttgacttcctcttttccttattgaataccctttatttctttctcctgcctgatggccctggccagaacttccaacactatgttgaataggagtggtgagagagggcatccctgtcttgtgccagttttcaaagggaatgcttccagtttttgcccattcagtctgatattggctgtgggtttgtcatagatagctcttattattttgagatatgtcccatcaatacctaattcattgagagtttttagcatgaagggctgttgaattttgtccaaggccttttctgcatctgttgagataatcatgtggtttttgtctttggttctgtttatatgctggattacttttattgatttgtgtatgttgaaccagccttgcatcccagggatgaagcccacttgatcatggtggataagctttttgatatgctgctggattcagtttgccagtattttattgaggatttttgcattgattttcatcagggatattggtctaaagttctctttttttgttatgtctctgccaggctttggtatcaggatgatgctggcttcataaaatgagttagggaggattccctctttttctattgattggaatagtttcagaaggaatggtaccagctcttccttgtacctctggtagaattcggctgtgaatccatcttgtcctggactttttttggttggtaggctattaattattgcctcaatttcagagcctgttattggtctattcagggattaaacttcttcctggtttagttttgagagggtgtatgtgtccaggaatttatctatttcttctagattttctagtttatttgcatagaggtgtttatagtattctctgtgtactctgtatttctgtgggattggtggtgatatccactttatcattttttattgcatttatttgattcttctctcttttcttgtttattagtcttgctagcggtctatcaattgtgtttatcttttcaaaaaaccagctcctggattcattcattttttgaaggtttttttgtgtctctgtctccttcagttctgctctgatcttagttatttcttgtcttctgctagctgttgaatgtgtttgctcttgcttctctaatatttttaattgtgatgttagagtgtcaattttagatctttcctgctttctcttgtgggcacttagtgctgtaaatttccctctacacactgctttaaatgtgtcccagagattctggtatgttgtgtctttgttctcgttggtttcaaagaacatctttatttctgccttcattttgttatgtacccagtagtcattcaggagcaggttgttcagtttccatgtagctgagtggttttgagtgagtttcttaatcctgagttc

SEQ ID NO: 95618 - DNA, 13301 bp, Homo sapiens
tctaattccgcccccccccgctcactcttgagctctagaaattctgactcactgaaacgtttttcacagaaacaactccacagcttccagcagctcctcttcatccaaatcctctctgcacatcaccacgtggctctgtcagaaaatgtgtctgtcagtgaaagtttatacacagccacattttcccattaattttcattttcttttttttctttctttcttcctttctttttttttttttttctttttgagagcagttgctctatcggccaggctggagtgcagtgacatgatctcgcctcactgtagccgccacctcctgggctcaagtgattctcttttcagcctctcaagtaactgggattacaggcacctgccaccacacccggtaaatttttgtgtttttagtagagacgaggtttcaccatgttgggaaagctggtctcaaattccttacctcaaatgatccacctgcctcagcctcccagagtgctgggattgcaggcgtgagccaccgtgcctgggctaatttccattttcatttcaaacatgcactcctatggaaagaaaaattacatgaaggtatagtaaaaatcactctaaatttagtaacaatcataaaatttacctcttagtacatttgatattttaaaatttacaattcttgtctatgaatggaaaccatgtctatatagggtggatgtttgtatgactgggtgtatccatgaggtcagaatactaattgatggaacaatactgcgtggaaggtggtctctagtggaatgccacggagtttccaatatagtcttagaaatgagtgttgaaagataatggtatgctggtcacattcattcaagacagaaaactctggtagacagtaaaaatgtaggttgaactaaaaacaaacaaacaacaacaaaaacccaagcttcagcagtctgaaatgatggtctaagtccaataccactacttaacagtgctttataactgaagggttttgtaatttagagactttgaaatttcccgggaatttctagtgtaatccactgagcaacaacccaagtgagtctgctcttggaccacattaaaagaagttcaagaagcaagggagatgtcaatcccaatgtactcacccagaactgtggcagggtctgttggcttactgtgggagggcactggccaactcacataggtccaggtgtgagcaaacaggatgagggaaaggttaaagaaactggtgatgttcagcttaatgctgtcttcaaataattaaggattttaatatagtaaaaggaatagacttttatctccagtgtcagtacaacctgatgctggaatcgccacaccatcttccacaatggttgaaataatttatattcctgccaacagtgtaaaattgttcctatttctccacagcctcaaacagcatctgttgtttcttgactttttaataatcaccattctgattggtgtgagactgtatcgcattgtggtttggatttccatttctctaatgatcagtgttgttgaacttttttttatatgtttgttggcctcataaacatcttcttttgggaagtgtgtgttcatgtcctttgcccagtttttaatggtgttgtttgttttattcttgtaaatttgtttaagcttcttgtagattctggatattagacccttgtcagatggatagattgcaaacatgcaaacattttctcccattctgtaggttgtctcttcactctgatgatagtttcttttgttgcgcagaagctctatagtttaattagatcccagttgtcaatttttgcttttgttgcagttgcttttgatattttcaccatgatatctttgtccgtgctggtatcgcctagattttcttctagggtttgtataggtttgggttttacacttaagtctttaatccatcttgagttaatttttgtataaggtatgagaaaggggttctgtttcaattttctgcatatggctagccagttctcccagtactatttattaaatagagaatcctttccccattgcttgcttttgtcagatttgtcaaagatcagatggttgtagatgtgtggtcttatttctgagttctttattctgtttcattggtctatgcgtctgtttttgtaccagtacaatgctggtttggttactgtagccttgtggtatagtttgaagtcaggtagtgtgatgcctccagatttgttctttttgcttacagtgtcttggctatatgggcttttttggttccatatgaattgcaaagtagttttttctaattatatgaagaatgtcaatggtaatttaatgggactagcattgaatctataaatttctttgggcagtgtggccattttcatgatattgattcttcctgtccatgagcatagaatgtttttccatttgtttgtgtgctctctaatttccttgagcagtggtttgtagttctctttgaagaggtccttcgcttcccttgttagctgtattcctagttattttagtctctttatagcaattgtgaatgggagttcattcatgatttggctctctgcttgtctgttgttggtatacaggaatgcttgcaatttttgcacattgattctgtatcctgagactttgctgaagttgctgatcagcttaagaagcttttttgctgacatgatagggtttttctagatataggatcatgtcatctgcaaacagagacagtttaacctcttctcttcctattcaaatactctttatttctttttcttgcctgattgcgctggccagaacttccaatactatgttgaacaggagtggtgagacagggcatccttgtcttgtgctggttttcaagggggacattcacatttcaaacatgagaaataggaaagaagaaaagagtaacaggtcgtaagcatgttcaaaatccattagggcaaacaatactatatctcaaggcttgagaataatctttttttgattctatgtcctgctgtctggacacagtgatggttgggaggtttggaattgggccccagcactttagatagccttattctaacaactttgttgggctcagtccaccctgcagctctcacaggttggagtcttgtgtctttcactctcctatgctggtgtttcacaatggtagctctacaagtctagagtctcaggggtggccctgaccccacagctctactaggcattgtcctagtgaggactctctgtggcagcttaggccccacagttcctctggtcattgctctagtgggggctctctgtggttgttccatccctgtgacatctctgtctggtccccaaggctgtttgcgacattctttgaatctagctggtggaagccatgttgccacagctcatgcattccatgaatctgcagaactagcaccatgtggccatggccagggtttactggttcacgctctgcagctgtggcccaagccacatctgggcctgctttaccaacagcttgaattgctaaagaacactgttcctgaatgccaaaagtagagacttaaggtgaccttcggttgggaacttcaagttcctgaaggcactctaggcctctcttttgccattttacttgccccaggttttggcactctggacctgggataagagggtcagtactggtggtctctgaagtacctttggggtcatttttccattgtcctgattaatagccttggcttcattctgttcatactaatcttatcaaatggccacttggccacagccttgatttcctcacctgaaaatgctctttcattctctattaggatcaagctgagaatccttcagatctctaaattctgtttcccttttaattataaattccatctttaaatcatttctttcttctcatattttcctttatacacttaaaggaagccatgcaatattctgagtattttactgattagatatttcttctgccagacatccaaattcatcaccctctacttctgcctttcatgaagtcctaggacatgaccacaattcaaccaagttctttgccactttataacaaggatggccttttctctaattttcaataccttgttctttatttccatctgagacttcatcagaattgcctttaccattcatatttctaccaacattctgatcacatctacttagagattatctaagtaatctctaggaagtttcagactttccctacagctctcatcttttaagccctcaccagaatcattcttaatgctcattttcagcaatatagtctttttctaatctgctgctccaaattcctccagcctctgcccattatccagttccaaagctgcttctacattttcaagtgtttgttataaaaacagttccactctctataccaatttctgtcttagtccactctgtgctgctgtaacagaatacctgggactgggtaatttataatgaacagaaatttattggctcacagatttggagactggtaagtccaatatcaagatgctagcaagggccttcttgctgtttcatcacctgggggaatgcaagatggcaagggagatcaaaagggggctgaacttctcattcttttataaaaacaacaattccaccaattagtggggagccttcatggcctagtaatgtcttaaaggtttcacattttaatagtgttacaaatagtcttgtcttaaagtttccacatcttaacactgttacaaaggcaactaaattttaacaagagttttgaaaggaacaaacatttacacgacagcaacttctatcattgcctccttggtcagttgaaggaaatcctatctatgctagatactgagggttttggatattacaaacatcttccttctgatctgtcaactttgactgtaacaccattataatgtaataaattcatcaatgtttttgcctaaagattgtgtttttgagatttgatttaagaaatttgtccccagctctatgtcacaaagataatccttgatatagtttggatatttgtccccacccaaatctcatgctgaattataacctccaatgctgggggtggggcctggcaggaggtggtcaggtcatggggggcaggcccttgtggcttggtgctgtcttcgtgatggtgagttctagtgagatctggtcatgtaaaaacatgtggcacctccccccactgtctctctcacttgcttctgcttttgccatgtgatgcgcctgctccctctttaccttctcccatgattgtaagcttcctgaggcctccctagaagctgagcagatgccagcaccaagcttcctgtacagcctacagaacggtgagccaattaaacctcttttctttataaatttcccagtctcaagtttcttgatagcaatgcaagaacagcctaacataatcccctacattatcttttatgaactttagagtttaatcttgcacatttatgtatttaatccagttgaagtccacctttgagtatggtgttaagtagaaattctctcatatttttctccatgtagtaagccaattttccaaacaccatctactgaataatctacttttgttgacttgggttgccaggtttattatatacaaaatgcctatataaatacatgaatctgtctcttaacataatatattgttccaatggattatttatctgctcttggtaaaatacaaattctttaaaatcttaacactataatatgtcttcatagactggtagggcaggtcacatctatttgtgcttctatttcaaattgtacttacttttatgtggacctgtaagctttcatataaatattatggtaacatattttccttcctcaaaaaaattcaactggaatttttattgaaattgccttgaattcgtactttgatttggggaaaaccagcatcttcataatacaaatatgtcccacctgagagcatgggttgtctctccattgaactttctgtgtcactcattaatttttttttcggctctttcctcctccgattcagcagacagccgcatcttctctcacatcgccagccacatccctgagacaccatggtgaaggtgaaggtcagggtcagtggatttggtcgtattgggcgcctggtcagcagggctattttaactctggtaaagtggatattatcaccatcagtgaccccttcattgatctcaagtacatggtctacatgttcctgtatgattccacccatggcaaattccatggcaccatcaaggctgagaacgggaaacttgtcatcaatggaaatcccatcaccatcttccaggagcgagatccctccaaaatcaaatggggcactgctggtgctgagtacatcgtggagcccaccggcacctttaccaccatggagaagactggggctcacttgcagggaggagccaaaagggtcatcatctctgccccctctgctgatgcctccgtgttcataatgggtgtgaacaatgagaagtatgacaacagcctcaagatcatcagcaatgcctcctgtaccaccaactgcttagcgccccgggccaaggtcctccatgacaactttggtatcgtgaaaggactcatgaccacagtccatgccatcaccgccacccagaagactgtggatggcccctccaggaaactgtggcatgacggtggtgggactctccagaacatcatccctgcctctactggcactgccaaggctgtgggcaaggtcatccctgagctgaacgggaarctcactggcatggccttctgtgtccccactgccaatgtgtcagtcgtggacctgatctaccatctggaaaaacctaccaaatatcatggcatcaagaaggtggtgaaggaggcatcagagggctccctctagggcatcctgggctacaacaccgagcaccaggttgtctccttcgacttcaacagcgacatccattcttccacctttgatgttggggctggcattgccctcaacaaccactgtgtcaagctcatttcctggtatgagaatgaatttggctacagcaacagggtggtggacgtcatggcccacaagtcctccaaggagtaagacccctgaaccaccagccccagtgacagcacaagaggaaaagagaggccctcactgctggggagtccctgccacactcagtcccctgccacaatgagaatctcccctcctcacagtttccatgcagaccccctgaagagggagtggcctagggagccccaccttgtcttgtaccatcaacaaagtcccctgtgctcagccaaaaaaataaatamataaaatttttttctataaagtttctatggattaatgatcaattcttaaatattctagttttgactggaatttggaataatattttattattattcctagtttgtattgtcagtgtagaagatatcaagatttcttaagttgttcttatctaaaaattttgttcaattctcttactagttctaatagttggaagcttttttggacagatgattatattatctgcaaataataacagttttatctcctttcaagtcttacctctcctacttattcttttttccttatagaattggtcacaagcttacatacaaatgttaattaataggagtgatgatgggcatctttacatcatttacaatttcagagaaaatattaaaaatgcccctaatctgtgtaacgtttaacatcacttttagagtagacaactttaacaagttgaagaagttcctttctatttccagttaacaagttttattatacatatgtgttgaattgatcaagaagtttttctgcatcaattcagataatcctgcattttacactctacttagctgatataataaattctgttgatatatttatgatggtgtatcatcttgcattcatgagtcttatttaattattgtgtctttttatcatacagttggattttcttaactatatcttgtttaagatatttacatctgtgttcaaaatgaactatgcctataattgttggggtggattgaccttatctatttatagaakgaaaagtgggaacaggcacagtggctcacacctgtaatcctagtactttgggaggcagaggcgggcgaattgcttgagtccaggagtttgagaccaacctgggcaacatagtgagaccctatctctacaaaaaaatacaaaaattagccaggcatagtgtgcctgttgttccagctactcaggaggatgagagatagaaggatcacttgaacttggaaggtcgaggttgccgtgacctctgatcatatcactgcactccagcctaggtgacagaataaaaccctgtctcaaaagaaaaagtgcaggttttggtctttttttaataacttatataaagcaggaattaattatttcttaaaagtttagtagaacttattaataaaaccttctgagccttagagccttagtgaggagaaagatatttttagtattatatttatatggatgtactgggtgccaattaaaagtatggttgaaacaatttcaaagaccctggttaagggagtcaataaagcacttaatttgggcataacttgtttttagggttctatttctcttctactactcacttcccaccctcttcttcatattcccggaatgagtcacactgcctggtacatagtagatgttttctggttgaaccgattaaatttgggtacccattatcattcacctccttcctggcccggaagcctaagggagacctacctgcttcttctcattctaaatagatgccaattattctacgcaatacaaattgtcctttagcaccttaaacttcaagtattagaaataggctattgtaacaatgttagtgagtccaccacggccacggcccatgggaaattttttagccagttctgtctatcccaccttggccaggggatggaactttgcctttgggcccccatgtcttcacaagctgcctaagtgccagcctctgcccaagggtcttacctacaggtatcccatctatggagggcaaggagtccccaggtgatgtggggttgggccacccacactcaggccactgaaccactcgctggtcattgggaacagaaatcctgtaaatcaagaacacagctccctctttctctttgtggctcatttctcaaccttatatctgttgtttttgttttttcttcccctcatatcaggatgacttaatctttgaggccaaaaacctgctcagcaaccaagtttctgagtcttgacaactcacactggggttaaagagtctttgggactttgttttcagtttgatgttggctagaggggcttattaggtaccaacaaatgagaaaaaaggaagaagaaaacagaaaacagagaggctaatacttgagagatataggcctgccacacatccacattcacatgtacccacatactcaggggttaccctcctgctaagtcaatggacaaccaaatgctctgtctatgtgatagccctgctcagtctatgggatagccctgctctgtctatgtgatagccctgctcagtctatgggatagccctgctctgtggaacagccattttgccgtacactgttgctctgacaaactttcttttactgccagcttgctcttaaattcttttctaagtgaagccaagcacccacccaggctaagccccagttttggtgttcacctgccttgcatcagtactgctgggcttgccacttgtacctatggacacgtagcaggactccactggaccacaaaatgcaatgtctacctgctttggagcctgacaactaataaatacatgtgaggcagaattgagtctcagcttttttaagttataacagtgcacttggtgtcaggttatagaggtaattcatctctagctactgctgattaacaacgttactaacagaacctgaaagctgttcgctaacccatgcttcctaccaccctcccacaactgaccagaccaaggattggtgcctgaaccaaaggcagacgactacacaggggattggggccaaattacccaaagtggcccccactgaaatcttcccctgggaatataaatagcagaggtacaaaggcggtgggcaggagcagacataatgcagggagagggcaagtggtggggctcatgaggcagagcacagagaaagcgttagtgtggagtgggcggcacaggagcagacatatgtcaaggcacaattgtggcaaagtcagtggaggaagcaacctgggtctctagagccgctgggaaataaggctgcgaccagacaatcagagctcccgctggatccaaaggggcgtctcaggacttgtggggtgagcagccagcagaacagaatgtctggggtccagacagtgtggtcctggtggctgccccactgcctgacttctggtccataggtcaaaaacattaagaaatgctggtgaagacatttttaaaacctgcaaacactgacctgcattgtgaaaacaagaatgataccaactggtttgttagctaatgacataattttagcagacctccctcacttattaaataaggaagcattctttcccggaagctgtttctgtatttaagcagaacccaacaaggcctaattagagctcttatcaggatcttcatatggatgctgcatgaaataagagtcaaatgggagaaagctttaaatatcaaggttttgaaaacaggagagattggagaacatgatgatgcattaaatcaattgttgcgcaaacaygtattggctgcccctatatgaagggcattctgggtgataaaagcagtgcaccatggtctcttttctcaaacagctaaaaatgcagtagagctgacaaccttctacaaaatttccatgatgaaaagtagtgtggaatataatagaggcatgaacaaaatatttaaatgtggctagtcatgtgaatatttttatataaawctgcctttatttaaaaaaaaagtcctttcctaagctccttataattcacctttctgtcttgttttaatgagaattgctgctattgaaacttttgatcgaccaagatttcagaggggctgttggcttttcctttgtctttaccacccattagctatttgttgtgatcaatgagcagactaaagaaggttcaaactaaagttttattattaacgtgagagacaacattgatatggatggttttcagcataaatacttatcttactagtatgtactaggtaactgatatacacatgaggagtgcctaatagggtctggctctgtgttgccacccaaatctcatcttgaatggtaatctgaattgtaatccccacttgttgggggagggatctgcaggaggtgattagatagatcatgggggtggttcccccatgcttttctcatgatagtgagtgagttctcatgagatctgatgatttcataaggggctttccccacctttggttggcacttctctctcctgccaccatgtgaagaaggacatgtttgcttccccttacactgtgattataagtttcctgagatctccccagccatgcaggactgtgagtcaactaaacctttttccttataaattctccagtcttgggcagttctttatagcagcgtgagaacagactaatacagtgcctgccctgggaagaagccaacacagaggaaaatcagacacaaataacagaaccagagatggatttttttatttgagcaattgcttcttacgtccagtcatgttacaaaagccaataaacatagatcgatctgtactaatttgtatttgtgcagtccttgtactgtaatagtcttaggactatttctgttataaagcaaactattggaaagcttttcatcatatctactactctctgaaataatatatagggcacaatcattttctttacatttttgaaattatttgcataaaactacctagtattggtgcattttaaaaatttcttctatgattgattacaagtacaaagaccaggcaaggtgttttctgaagtggagcacttttgagggtaaaaatgaatgctaaccaggtggatgcgaagaaaacagatataaaacaatatactcctagacaaaccaggggatattgtgggttttggcaagaaaagggttagccgctgccctgcaacctgttctttctctcagagacccacggaagataaagaaacattgaagaaaccgcctggtcaaatctccttgtaaagatatgaatcagatttcttcatatttacttgtggaaagataatggagcatcctcaactatagaatgcttttagcaggctatccctggtctacctaggttacatatggtaagtgagcacaggatttatagatttgtattgcaatggggcccctggaaaatgttaatgtcgaatgtgtaattatcatagtgtaaaatggagatgtattcatgattgaaatcctttctttgtgaaagcaatgtccagcatgtgactagagctttacatgataaatcttggcaattaagaacttgtgatcacactggtggtcttagtattcttgcgtcaacagagtcttgtgattatctgtgccttttgaatcactagcaaagcttcataagggtacaatttatgatttttttataagtctgatttgacaatttgacataattttctaattttcttattagggagttgtgcagaatatatgcttataatttttccaatctcttctctacctttgcttatatagccatccctaatcctaacataatgtatttgagtctttcttatttccttgattgtctttgcctttagaattctgcctgccacagttgcatacataatgacacagatgtaatgccattttacccataaatacttcagtgtgcattttctaaaagcaagtatattatcttatgtaaccacagtccaattattaaaatcaagaactaaccttgatagagtactggtatctaatcaacagaccttttccaaatgttgccaggygttccactaactctctctatagggaaactaacaacaggcaggcttccagtccaggctgcagaccaggatctcatgctgtgcttggctgtcttgtttcttcagcctccattaattggaaacatctccttggtctttctttatctttcacaaccttgattttttaaagagtgtatggcctatacagtttttcaaaagacacttcttaaacaatgtgctggagttgaaggagaatttacctaggatcagtttcgttagaaccattcactcctattgaaagacagagaaggccctacaaatgacaggcacaaataaaaatgataaaagcaaaat

SEQ ID NO: 95619 - DNA, 344222 bp, Homo sapiens
  misc_feature (1)...(344222): n = A,T,C or G
ttaaaacacagtctcaaacacaattgatatatttgacttgtaaaagtttggtgaaagtgttgattatttaaacagaactcattgttgtgttctaacttgcatctgtttttaagaactgaaaactgtttcagcactctacaaatgccaatggatttctacagtgacttggtattttttaatggcaacatctttgaaatatacttctgtgtcataacacagcagtgttatataatagagttaatattcacatggttatcctaagaacttagtattgattatataatctcagcaatactttttaacaccagtatcttcatggctacatacggccattatgcagagcttattttcaggagataattaatgtttttctttttattagtgaaaatctccgcttgggttttactttaatgaagaaacacacgtttctgtcattgaagagaagccttaaaaaaaaaaaaaagaaacacacataacccctttctcagatagaatggattcttcacacctatttgaaatattgttttaaccatttgcatctcatcaaaaatattctaattaaaaactaattttatttacaatttaaaaattataacgaattctaatttaaaaattaaaaactattctgatgtttattaaataaataatgatataacctatactggtttttacttgctttaaaacataacgtgataatacaactgcaatttgttttacaattaattggttggaattaataaaaataatttaagggagtgaaggataagagactacaaattgggttcagggtatactgcttgggtaatgcgtgcaccaaaatctcacaaatcaccaccatagaacttactcatgcaacccctacctgtttcccaaaaaccaatggaaataaaaaataaataaaaacaatttaattgaaactgaagatctaggaatattagtggcagctaaagttgtttttatcatcttggtctgttttcaaggctgtcccctatgaagtattgactttcataatatttttaaaaccagaattataatggccttttattttaggtttgactataacaacactgtaagaagctatcccttactttggtcaagatgtcttaacatcaatagtaatggaaatttgtaatcagctggcattcaggtgacaggaaggccagcaattattgagtgcctattgtgtgctggccttcattaaaggctatgaatagttggagaggcagtctccctgatgtcaagctgtttaaaatggagctgtcaatgcaaattacatgcgcattaactttcttaacaagagacttaccccaacatgttgatatgtgcagataaaatacataagttccaggagtctagacaacaaagctatgatgaattggggatgagaaaaattgaaggaggtttcctggaaatacaaactaaagacttgtagtgagggactgcgggggtggggggccgggagcatgtgaataaatgcctggaagctgaactccattttaatgacaccaggtagtaaataaagtatcctattagaatggagagagtttgtgtgatatgacacatcacacctgaatgacatttacattaatttgctagctattaaatggaaaaagtctgatatgtaaaacgcacataattttattgagcttgggaacaataaacacttgcttatgatttattttgctatgcattttaaataagttacaaaaattaaaatcacggtaaagggaacgtgcattttggtagacatctgtataagtagatgagtttaacatttagttttctttgcttttatatattcataaagaaaggttattatttaaaaaaggaaacagggttttcaagaatcaatgatgtgaaatttacaactgtaagcactaatatccacagttgtaaactaaaatcagttaagacacagatttgcatatttaccaaaaagttcataaaatattaaccatgttagttacaaacctagctcttaggttattaaaatgggtgcatggctaaattatcatgaagaaatttcatactttttaaaggaaaatcctcatttcaaaatttcttaggctgtacctagacgcatgtttttaagaacataaaatccaaattaacaatcaggcaggtattgtttcctctataaataaatgtgaggcataaatactaaaagcaatacagaattaacttgatttaaaaataacaacatatagaagaatgtttggagaatttaaatatacttatggttgtataggtccactaatttaaagtttcattagcaatacaaaactcttgattattttccttggtaaaaggcacagacaagtgttttatattcttttaaaatgatggtcatcattattttggcacctggtgttaactaccctcttaatattcttttagttttttttttttctttgcaacgtgggcttggaatttcctcagctgaaagtaaggaaaattgtttattttaccaagagcactgcaacattgtgaatttctgccatcgctcttcctcttctcctaataatgacagtatgcttaagttgagctatagtataataaccttttgtcatgtaactatattgcagtctttatgggaactatcagaatgcagtgttccctccgttatgggccggtgcgtttattcacaaaaggtttggagtaacaaaagtgtagtgtcacagccctctcctccttctgatatatcagtaaagaaactcaaagggaaggaaaggaatccgcaagcagcgcgttctccaggcgcagcagccacctgagcacgggtgagtgacagaccctgtatgtctgcgcctttgtcattaaagtcttcacctaagcaaagttcatgaagaaaagaaagtggctgaatgcctctgagacttacagtaacaaacgtggacaccagtatgaaggagggagatcatgtatgaaaatttcagagctaatcagtaaactccatcctcaagttgttttcttttccgttgttatgccttgtgatttttaatttgtccaggaaaacgtcccttccagcaagcacttggagaaaaggacgaaaggtaaacaggaggttgattctgggaaagggttaatgaaaattttaaagtttgcctcctgatttaataagggctcccaggacaaatatttggggtttcccaccctgtctcctgcgcccgcaagggggcttatgggcaagttaaatgtatattttcttggaactgaaaaatagatttagtaactccaaaatgcaaataaagaaacttaaatgacaaggagaaacaattttgcgtgtaaaggaataaacaataaacacttgaggagaaactcgacttccctaaatgtgtgggcagccctcagacccttgctgcctggtccagtcgcgaaagcacaaactccggactcgcagcaaagtaaccggagtggactctgcacggctggagaagcgtcaagccgggaggctgccggcagcctggctcaaccattgcagtttttttctttgccgaaaaaattcagaaacaagggcagcgcccctaaggtaagagtcacaggaatcattttcttcttccacaaatgtagggattctgacctagtgagtgccaagtctgatgcccgttacacgcgacactcagaatctgcccggcaatcgcggagacgtctgtggactttactgggggaggggagccccagcatgtcctttgcatcccaactgctcagcttggtgcaaatacaaaagtgttattttccattggggggagtttggatgggagtcggggaaagcatcgactagtgaggaatctggagcacgcttcaaaataaacatgtgaaactggatagaaagaagaaaacgtggagggcgagaaatggccccgggacccggggcacaccgggagcccagggccctgggtcaacccagttgctgcactgtagcgcacgcctggcgcttgggtgaccgttttgcccttcgtgaaagctgagctttggcgcgtgtgctccactccggggaaggtgacctcgtccaggcagtccggacagcccgtgccaccgtggaacagcacagccaccgcccctcctcggacccagcgcgccatggtggccccgccgcgcgtgcctgcccgaacgcggacacctgtgcatctgtgtgcgctcttgcgctccaacttccccaaacttctggcggctcctagttctgagcgcccattgggcggctcatttcccttcagtggcaactgcctggattcatggctacggaagggggtgggggtgtccaagagagccgcatatggcaaggcggtctcagggtttggggcaatgatcgcacagtcttgctcatttttggccacagtttgccctttccgttctctaaccccaaccaaggcaaactgggcttgtgcacacgaagttcgttttaaagtgagtatgcgaaagggagtcctggggaggaaccgtatttcaaaccctagtttatgggaaacactgcgagttgatttaaactccaaccaaaggtccgagttggaactctctcccgggaactctgactgagcacagctgggtcggagctgctggcccgctaccaggaggattccctggctcgggcaacgggcaggccgacgtggctcgcccagcagcgcacagctggagcagctgcaggactcaggatttagaatccgaaacaccggacccagatgtgacaaggcagggcagagacgcagcggttgctctgtccgcccgccccggccccgggtgcaggcggcgcacagaggatcactcgggtgcgggagcctggcgcaggggccgagtcccgcggggcgcgctacgtgggcgcggaaggcggcggcggcggcggcggcgtggggagcgcctgctccgccagtgggcgtcttctgccgccgccgccaccaccgcctccacgggcagcggcactgcggcgcttttctccgctgctttcgagaagccgccgaggctcagccgccggagcgcgcacacaccacgccacgcctgcagggagggtctccgccgtccctagccccggcccgggaggacgccgattgtgcgcgcctgagggtagccaggcgccgtcgccggggcctggcccccaggcccgggtcctcccgcaacccaagccgagcacaatgtgaagactagactgggagggaagccgaagaccggagaggaggaccaggcagcggttcgggcggccggcaggggtgggcaggtcctgcgggggcggagcccaccgagccccggcccgccgcgcccctcccgcccgcggcctgcccctccgcggcccggggaggaaccatggccagcctcgaggagcctcttgctccccgcccccagggtcccctgccagcggccggggacgagccgggctgcggccccggcaaactccgcccggaaccccggctcagcgcggccggcggggggagcgcggcgggcccgggcccggcccccgagtggcctggccgtggccgggcggagcgcgccgcgcccccgcgcccgcccctctcctccgcaggccgccccagccccgctgggggccccggcgccctctctgcgcgcggcggcggctgcggctgggtcgcggcccgcgctcccttggcgctcgccttctcgtcccgggtcccctcctcctctccatctttcttttacttctggccgccgccccccccgccccctccctcttttctcccctcctcatctgcctttcacctccccgtgcgtctcccaggaagggagggcgcagcggcggcggcggcggcgggaggaggcggcgatgctggcggaggaggaggaggaggacaagaggcagctcccttgagcgtccccaccagcagtagtcaccgcggcggcggtggcagcggcggcgggcggcggcggctcttcctctcgcctgcgctccagggcttgctgcttccagcccgtgccggtccccggccgccgccgccgccccggctcccccttggccaggccgcccgccgcgcgggctcccccggcttccccggcgccggcccaggcggcggcggccaaactccgcggcgtccccagggcgccagcttcgccctcgccgccgcggccgcgctgctcttcggctccgacatggaagatggaccttctaataatgcgagctgcttccgaaggctgaccgagtgcttcctgagccccagtaagtggcctgctccccgttccccggaggtggggcggctcctcatcccctgggggcaggtggggggcttggactgctgggtgggaagcgggtgtcgagcgaggtgcccgtgcccgggcgtggagcgcccagggggcttctctggaggggcaggagccggtgcccctggcggagcgcgggagcgttcggccgcgcagggacgccggggtttcccaggctccgcgagcgctcgggggaagggcggctcgggrgggcggcgggagcttggacgttgcgagcgggacctgccgcctccttctccgcccctcgtgccgtttctggccacacttgtccggcgcgtatttatactcaactttgtgaccacttaggttcctccctcttgagcctgtggccacttggctggagcagatgcgcttccttccacttgggggtccagcccaccgggtccctgtagccggggtgagggaggccagggcctcagaaccccgcgcttccaactgtgatggcaccgccgttctccaggactcggagtgggcgcccggcctcccaccccgcgcagtgaccggcatccagagcatggactggcggggtggaaacggttgcacctccacccaggggacgcacccccaccccgggccgcgtcctgttggtcccgggcttctctggggtccgggstggtagagaaaagggaaggacaataggtcgctagggtggaagagaaaggcgccgccgcctccgactcgcaggatgcgcccccgggcccactgtggcgtggccactcctcctcgccacccgcgggcgcggggccgagagcgcgctgaggcagaggtggcagaaaggcatgtcacgggggtgggggacaagattgagcagaaaagtcaaggcaggggttcgctagaaggaagcaggcaggcgggagacagtgaggaaagaggaggcgcccggtgcgcagaggaggggggcgtcgcggtcgcggatggagggggagcagggtgaggacgggaagaccgcggcggggccgggtaggagcacctccgggtgcaggaggtcgcgcccatgggcccccggccgactccggcgccagtcggggcgggtgcggcttcccgcggcccagagcgcggctccggagccaccgtccaccgcgtgtgcacccgagcctttgtctgcgcctcgctcaggagccgcgtttccgcggcgccttctctgggccgacgctcttccaggattgctgtttcggtttcccgctcccaactgcggctcattcccaggctttggccgacccgggtctccagggcacccgaggttgagcccctccctgcggccgaagctgctccgggctcaccgcccgctcaggcacctttggggtgcagcccccgggctggcgagcgtattcgcgccgggatcggccgctccttgcaaccccgcttcccgggcacgggcgagtccacggcggccgcgtggtcagcggcctctcgtacacccgtgcgggctccggctagcgagtcgctgcttgcgcttgattggctagcggggcgcgggcccaatgctcccgaagtcctctgacccctaagtcctcccccccggtgtctgcctcccacccccgctgcagtctaggtggggaaggggtgtggagatgggtgtgcatggacagagcatgtggccttctctgttggccagagatgtggtcagtagaagcacttttccctactgaagtgccctttggccatgcattgaaggtggtagaggatggggccccaccagctctcccggggtgttggcatcagcctataggcctggtctaggactggggttcctcctggtcccctatctggtgggcttgtgaattctttcttaagaaaataaacatctgcttttctcagttgacctttgatttggggaaggggttgaagaacgctctatcttgcagtgacaagctgctctgggggaaaggtggtgctactgaggcacgggatcgtaggcttctggaaaaagcccgcggtcctgaaatgatggggcttctgttggtgctgctgaaactgctgttggctcgtgtgttcagggccctgctggatgttgtggaggggaagaaagatcgcagctctggatagagggtggagtcctctcgggattcgtagcaggctctccctttaggaacacaatacctggagaggagaagggtctactctgcagaaaggcccagctaggagaagctggtgcatcagagaaaccagactcatcagggaactttcaagaaaggccccctcgccccacaccttgccctgagcagtagctttggccttgaacaggagcaaaaggttagaacagtcttatttgrgacatgactgaggtagtaaacaagaagatacttttaaacaaaattatcagacccacttcactcaagcttgggaaggggatagattattaaaagagagtagccaatttctgctctgacactctttactttttgggtctttgtttctgtctgttgctgcctgasaagccactggtctgaattgctaaagtactgaagtttgacagatttttctgrtatgtatcgtttaaaaaatcagtcttttgaaaaagaatttctagattctttaaaaattttaraatggccaaatgcatacaaatgtgtctaattgttgagtgtcattccttttttttttctttcagtttgatcttctgttggtctgatatgcaagttgtcacgtaaaggctgttttgtccagttactgtttgtatgaatrctggttttatttttattaccatcgaaagcaaatcatgtgtagagggtatgatatgccagctccgcttctgtccattttagctctgcgttttggctcttcacactgaccggctggttcgctcactcatgcaccaaacaacacttagtaagagctaccgccaggacccaggacccaggccccagagacagaaagaaagaaagaagcctagtagaagctacgaagctgctgtgggagcttcccactctgccatccagtaatagagacagagtcccctagaagcasgtttgaagttaatgcccaggggtcagtggccaccatgcccagtgcccttactctgcccttatcaggccattcctgacttcacctcatctcctgccatctgcctctagttgctgatctctggcctcctcctcaggcacccagcttcatgctttcttgtgagcaaagttgccatcggagtaggaaaaactcttgtgcctagagagcccagtgtttgcttgtgcaatggagagcggagaagtcacgtgggacagaccagtgtgagtggcatttggtcttctagaaaagataacataggttgtctgcgcaggtgatcagtgtggctgccctgatgtaacacggctgcagggcgtgcagagatcaggaactctgaggcacgcctgtggataaggagaacagtcagaagccacaaatacgcccgcacctctctctgtttgtgtttccctggttagctactctgatgacataaagagatacagacaaaggaaaaccccggctggtcaaggaggatactgagaaagttagcaaaataagatgggaaaaaaaatggtgaatgcagactgcggatagcttcagactacagttgattgccamatattcaaaacaggagatgtgtatgctcccaggaattgtggagtttaaatgtgctccacactcatcagtaaccactcttactgtttcttgagacataagatactgtgtggccgacacttgaacaaactgagataaatatgatctcttttaagagcaaatgtgtttaacacgtacaaactacactagactcgccattaacttctgtttgtgggctcagggagactgaggttgtagamgaatgcgagaacaacactcagcagtggaaatgggtctaaatcagccaacagctaactcacagatacttgttgagtayctactgagtgtaaattgtttgagggagattaaaataatgataacaggtaccccaaaggacttgaaatatagctatggacacctacaaaaatgaccagcaaagcaaggcatgacttcttccggcagagccagggtgtggacgtgagtgtcacagtcctccgtggaagggtgacctattttttggtaaggaaatcagaaaggacttaaggccaaagggcagagctgtttaaactggtgggattctttaagttattaatacttaactttcaagaaattgcacttttaattttgagaaacctgcatgagaaaattcaaatgagaagcagaagaaacattagaagatggtgtcatctgctatcccaatcagtatattagtcttagatcatttctgcatgtaaaactttttccactccaatagggaaaaaactcagtgcaacagtcagtcaagcaaatattaggattttgtttactatacggcaggttaaacatagtgcggtgcacatttcaccaaygaatacattgttaatttttgtttgtttcgaaatagctgatgcaatctgagagaaaaaataattttcatgtaaaacgaatattttcccttaaaaggaaaactcttagttgtaattcaaaacattttaatttccttttaaaatgtaaattaggctcctccagctgatcatttctctaagtctgtctaaaggaaaactcyacagtgacagaggaactcataatcttgcaaggaaatcagaaggtatccagtactcttgtgttctttgtagcactcaccacttgctgaaattatcttgctcacttactggcttatcagtttattgcctgctttccctctctggaaaggaagctccatgagagcctgagggcagtgtcttttttggttgtttccctgagactgttaacagtggctgacacacatagagaaggtactcaaatacttgtgttggaaattcaaagatgaaagccaaaataaatctaaacagaacaaaacatggtgcctgtcttcaagaaacctagaaatcgatgagcactctttgaaagcttcctttgtatgagcctctgttctntggactcaggattccaaggtgtatgagacaaaatcagttatttcgaggagcacacagatcacagaagagatggacaagagttcacagacacgctcacccacagacaggctgtagggcgctctgcagacagtgagaaccagacggcctctgactgggaggtcctggaaaggtttcacaaggtgtgaagaggcagtgccttcgctttgcgagaagcctgggaaggaccttctgaggccaagggaaagggatcttctgaggttgcagggtggaaaacagcctggacaggtggtaggttggggacccgggtgataagamaggagagaggattacttaggctaagctaaggatactttacaatgacccctcagacgagtgtatagaaacagctatggaagacaggtagaaagaatcccctctgtgctggagctgggattctgtgtgactgcagggagagggctgatcttggtggcagagtcctcggcacacgagaagaggtaggagctggaccagagatggggccatgcacatgaatggtcgggagagatacaagcaggaggtagcagttaatagtcacacatccrggtggctggttggataaggcaggagacatytgactccttagtttctggattggaaaggtgtgtgtgtgtgtgtgtgtgtgtgtgtgtgwrwgagagagagagagagagagagttggggttggaatgggagtagttccatgcccagagaaaagagatatcagaatgggaagtatgagaattgagcccctactatgtgttaagcagcctccttggtagtagggatcgtctctgcttgtatggtgcccacactctggtggtgcagacaagaaccagccagggaaacaaaaaataccaagagagctgcacagcgaatgcacacggagagtggcctgtgcagctgtgtggctccttgccttgttctgtgcaggtctctcttcacaggggcagtagaaatggcctctgagtgacaaggtgtcatcggccatgcagttatctggggaaaagcaccctaggcagagggggctcacaaggcagaggakcggggtgacggccgtgctggagctgagcccacsaggcagtggcaagtgaagtggcaaatgggccggatgaaggctttgtcagtcagaggaaaaaactgcagtttactcygcatgaaagcagaggctttggggaggttttgagcagtgggtgatccatggtttatgatctcagaagctcattctggctgcagtttggtgaatgaatgaagggagatgtcgtggatacagggagtccatggatgctactgtcatagtcaagacaagagcaatggtaacttggatcacggcgatgatggtagaagcaaaatgccgcggtggttcaggaggtgtttggaggtggcgtgtataagacctgcaggtgggttggatatggggacgtcaagggagagagaggaatcaagaatccatgcctgggtttttggctggaaagattgggtaaatggtggggctgttcactgggattgggatgggaagcctggaggaggagcacgtggggtgcgcaaggaatcaggcgtggcgtttggtggtgttcagcctgagatgcatatgctaggaaggcagttggataaacaaagcctgggaggatttgatccaaaggatcgttcaagactgcagcatagaaactgcagtcacagcatctaaaatcatgggattggatgcccccaaggacagtatatagatgcctcagtgacattttgactctgagggaaatacagacggagttggttaatcaaccatagctgggtgcaatgtaagtgcctggctgaagtttgacacgcgaacggacggcccgctggaattctgtgctatgagccggagtagaaagagagatttggactctgcaacaccaaggtagtcgttgaagccacagtcgtgaatggagaccaggagtgaatagtgggagtgagcagaagtcggaggataggacagaagaaggcagagccatggagcaccctggagaggtgtgacccggcaagatcctgagatggaaggtagcacggcctggagttcagaagckgagcctcaagasggaagaagccagatgctccagagagcaggtgagttccagcagccaggaggtcgtccgtggcctcggtcgggagattgcggtggagtggcatggataatacctgatgccagtgtggtgaggatggcagacggggccttttgaatctcagctgtgggcaggtagatgctgcctttttctgcatggagaattgacttgggaatgttgatttgctgaagaaaaggagcttgatgaaataggaagtcgggtggaaacaaaccttaaagaggacagggcgagtagaatgtggggacgtgagatggctttggacactggaaggaaaccttttcctcagagagggaaccttggaaggaaccagtatgggggctgctgtggagatggaattcacagtgctttccccagcttctgaccgccatttctctcaattggacagcactgtggccacctgagagtgagccgaggaggagagcggggcctggggaagcaggggtggggttggggagagcgggaggccggctgccaggtgatggcccagccttgctgagactggaactgggaggctaggaacaggacaatgaggaggatgacgggagtgactgggaacgttttagaaggaaagtgatgcaattaaattaatagtttaggaagacatgcagtaccggtgtacaggggggatcggagaaagggctggcagagtaaatgttcatacactctgcatttaaaaaatatactaaacacaaaggtatgcacaattcagatactcatcttgatgcaagttgaccagtagagtccaattggggtggtatcttgagggtggaagagtatttgatatgtggagctgagtgagggcaaggttccagagaggagagagcctggacagaggcgccaggctcaagatgcgcagccagaagtcagggctcgtagagtaggaggatctcatggctggggggctttgtgcagaggagaagggacggagaaagctggcacggtggatcaggtcttccttacgcactgagtccagctttgcattgggggaaggcgtggggaggtgccagagggcacggtgtggggagataccatgacatgcagatatttagtgcatgtttcctgctcattggtttctatctgcatcagagctgtgccttgctttcctggagttgctggctcatgagggatccagacctgatgaggggcgttctggagagccgctggtagagacacgtgtggtggggaaagctgtgccccgggatggagacggaggtccctctgcgctcctgtggagctctcaggccctgcagctctctggcctttctgctctgtctctctccacttcctcagtgtgattcagcrcatggctggtgcttctgccctgtgtcatggtatcctcctgactgggagtctttcctcttggttgccaccagtgccctggaaccctttttccctgcatcttcctaggcttcgtcatggtccgctcatccgtgcttccatccttgctggtgcttacagttgtctgctttcgtgtttgtctcccattagccaaagtgttccttgcgggtaggaagcatgtttcattcattttcctaacctcagtgccgagcatgttgccaagcaaaataagttgaatgaatgaataaatagtgaaggtgcttaagtgagggaatatgactgaaatcgtcctttaaaatattaattttcctaaagggaaagaaataatgaaatacataatgtgattgtaaaatttcactggcatgacttgaaacttcatttttgtttcatttataatattttcatgtaatccaaatacactagttggcaccagtgacccagggcttctgagctactgtgaacacagcgtgtccatatgcccgagctggtggggcatggcttggcgtggagcagccaccctgagttgatgggaaggagggagataagtgtttagagcgttctggatgcctcagcttcatttcctggggcagtgataaaaagctttttactttgatgaaaacatttctacacagcaaagtgaaagtgttgcttatgaagggctgacgtgtttgaatatgatgaattatttacaaaaatamaagcgtatttggccytttaaaagttggtaagtactgtgtaagaagcggctttgcataaagagcagtttactctgttggaaaaaaagagactaacaggtaactgcagagttgcagtccagggatgggtggaggctggtgcagaatgggaaaaaacagcatggtaatatagaattcaagttgtagttattgtataggatgtaatttgtgtttctgtattatagttttagtagcttctgaaataaacatctaaagtgttatccaaaagggcttgaaggctgggcgaggtggctcttgccggtaatcctagcactttgggaggcttaggtgggagcactgcttgagcccgggagttctagatcagcctgggcaacatagtgagaccttgtttctaaaaaaaaaaaaaatagcccgggaggttgaggctgcagtgagccatgatcacaccattgcactgtagcctgggcaacagagggagaccctgcctcaaaagacaaaatgaacaacaacaaaaaagagcttagttactatggcttcttggatgtgctaattacatattgtattggtgtctcagggttatatacatttcaaattttcttggtgtcccaggaccagaagttgtctaatcagtcatcataactttttaggactatactctgcttctcagggttaaatatatctaatttttaaaggcagattaaagatctacttataaaacctcagtaatgaagacaagtggtactggcatgtggataggtagacaaattaatgcaacagaacagaaaagtgttaacaaacccagacacgtggcagaatctaaaggatgatataagtgtcatttcatttaggagaagcaaagatagactactgaatacatgatttgaggatactaggtagtcatctagaaaaaaataaaaatagattattccatgcagagcacctccaggatagattccaartggattacatatgtacatatataggtatatttatgtgtatatttaaatgcaaaaaggaaatcataaaaagaaaaaaaatgaggaaattcctttctagccttggagtgaggagaccctttaaatgggactcaaaaaccagaagtaaagaaaagattgataagttaatycacattcaaaaaacacaatgaaacaccttggtattgccccaaatcctgtaagccaggtcttagcatgttcctgttgaggccctggtgcctctcctacctctccacctatctttctccatgtcccatagcatgccagaagctccaacaccatgttaacaactccctgtagttcttgaattgtggccctagagaaaacacttaaagctcctatcacagcatagtgctaaccttcttaatatataaagagttcctagaaatgattaagcaaagagctcttggacatgactaaaaaaaagaacagcctgataaaaaatagtcaaaggagatgaacaagacaaatcacaacggaagggaagtaaatggctctttgaaaacatgaaaagatgctcagccttattcatggtaagagacatgcaattgaaaataacacctgtgaaaatggcacctgtgacatttgcaaatattcataaacttcataacacactgttggcaagtccacgaggaggcaggtgcttctgtactttcctggtgggagtatcaagtggtgtagctaccgaggaaggcaatttggcagtatccatcaatattaaaaatgcatgttggctgggcgtggtggctcacgcctataatcccagcactttgggaggccgaggtgggtggatcacgaggtcaagagctcaagaccatcctggccaacatggtgaaaacccatttctactaaaaatacaaaaagtagctgggtgcggtggcacacacctgtagtcccagctactggggaggctgaggcaggagaatcgcttgaacccaggaggtggaggttgcagtgagctgagatcacaccactgcactccaacctggcgacaaaaaaaaaaatgcatgtaaccattgagtcagtaattctgcttctagatatttattactcagacatactcacacataggcaaagtgacttaacaagatatgaatatggtgtagtattgtttgaaataggacattggaaaccatctaatggcctgtctacgagtgggcgcttggttaaataacatttgcagcagtgtaaacgaatgtccagaagatcttcragatacaccgttatgtgaaaaaagcaaggtgtaaacaacatacacacacactcagatacatacatttttatgttagaaaggacaataaaagcatatacttgtatttgtgattgcgtaaagaaactgggaagaaacacaagaaactgtttatgtaacacttgctgggcggtaaagggaggtggaggggagaaggggtcctgggggatggaaaaccagagttgtggggagacttttcagtgttaccccgttttatacattttgatttttgaataatataacttatytcccattcaaaaattaaatttcagaattagcaagaaggtaccgaagtggcattgaattaacggtgaattgccttactttgctgttcacgtgttcattagggggtcatgtttttatggtcttcctcctgggatcatggtttcatytgtcagcccctaaaatttgatcgatttctgtcttcctctggcctcccacttctcctacacaagatcccaaaatgtcaaacgatgaatattaaaaaaattgcacgcatcactaccccttgtggttatcttatcagctcttttctgacgtcatgcacagatttgaacgtggaaagcatcacttctattttaatacagtttctgactgatgcaattgatggtttcatgcttaagatgtgaactatcgtttaaaccactggagagctgcccagccagtttcatctggtagaaatcactactttttagaaagaaaccagatgccttgttgtagaaacatgagctttagatactagcgcttctccagtgagtgcaaatgtagcctcaagtgacattgacatttaatgacaccactaaagggggccccagcaatttattacaagttattctgttgtgacagggatttgattagttgactggacagcaggggcagtgggcacccctgcacctcttcctcagcagctttgcagggcagagtgggagctgctgtataccggggctaggggtctaggctgaccagaactctgccctgggagagctttctgcccagggccagagggacaaagccttccctctggctgggccttcatggggacacttgaattatttagattcccgtgtttgccctccgccctggttttccttggggtttagagctcatgctgtctctgggagtgtctcagtgggcctctttgctgtcccctcactgactcttcccccttggtttggatatcatcctgcttattttcctgtgctctgcttctagtggtgacagctttctttgtcttatcacttaatattatttccttctagtccrctgcttggttttattttagctgctacttccttccaagttactggattttatgagaaccctttcctgacctttaaacctccatcttcactccccttgcaagcttctccttggagctgcaagctcctcgtgagatctcttcaggtaacccgtggagcacacccaagtctctgaaaggtacgggcctgtcagtgtgcactcacctagttctctttctgcagggcacccctttctcacaggagactgttctggggaaaaccctggtggcgattgctctctttttctgggagtggctcctgggatggggacaaggatggggatgggtgaggagaaggtggctgcacggtcctttcactctgtggagcacttaaatccttcaggggctttgcaagccacccggaatgcctttgtgtgaaaggttattctttgtgaataatattactgccctagtttaatttcatttctcaggcgatctgactgtgcgtgcagagttttggcactctgtattgtgtaactgttctgttccttttgtgagggccatcgttaggaaatctgtccatttttttcctgtatgatttttgaattttctttgttttgtgttggtccatttttgaatgtatttcagcaaaatgtttgtgattcaaaattgttgtgacttcttgtatctgggttgcagtctggtggaaagtactgcgtatggctgatagaataaggcattcagtagtaggtttgggggtgacctaaacgttttccaaatgccattattattaggtggagatcagcttcagagagggcacgtgtatagaaagagatgtaattcactcttgctcttttttttttctttttttaatcgatatcctgctggcctgtgtcagtaattttcttgtgctttatgacttctcagtaagaaacagtggatggtctgatgtgttaagaaatgcatatgtaaggccgggcgtggtgggtcacccctgtaatcccagcactttgggaggccgaggtgggtggatcacgaggtcaggagatcgagaccatcctggctaatatggtgaaaccccgtctctactaaaaatacaaaaaattagctgggcgtggtggtgggcgcctatagtcccagctactcgggaggctgaggcaggagaatggcgtgaacccgagaggtggagcttgcagtgagccaagattgcacactgcactccagcctgggcgacagagcgagactccgtctcaaaaaaaagaaaaaagaaaaacaaatgtgtgtgtgcctgtatttgttaaacaaacaccaaggaggcactgtaacctagagtgcttaattacgagcccctgcgttgtagttgtttcttttgctacagtcgttaagattgtggtgaagattaaatgagataatatatagcaagtgtttgcaatagtgccttcaggagagcaagtgctgagacacgtagccattgtttccttgggttctgagacagtcttttccgaaaaggcagtctctgcaagtgacgtccaaaggggcttcagtcgggaaaggaagagaaaggctgctgagagcatccatttggctgggaaaggtgtttctttgtagttgcaggaagttcagcttctggaaacgctgatatcaggaaatggctggagtccgcaagcaattccactttcttggcaagaaattaaaggaaaatgtgttgcaaataaaagggaagaatttttggaaaaagaactaaaaaaaaaaagggrattgtcattagaatgcttcttccatttaggggaagctattttttgaaaggctattgtagtcccattccccatttatgggacttctgcacctccaaaagaattcacctctgccctctcctgtctctgagcgtttcgccttcactcggtcctgtctaaaagcagaacgatgctgttgggtctcctgctgctggggttgagtgggaaggccctgccgctggcagctccgggggcagagtggccttaggtgagcctggagcctgtccaggacaccatccctctctgccatggacactgtagcttatatttgctttgtatggtttccctctgtkactggttgtttactctagacttttgtagattgttggtctgtattcttaactctgtgtgtggacttagtcctgtacatgcatcacrgttttcttttgtaatttaatttactctaacttgaagaaaggtgagaatgtgcccatcatgagcaatgatctccttatgggtacattttgagagtgctgtgtgtcaaatgcctttacacagcctctacgtctggtttgcctttatctgaaacaaagctatcaaggctttatctaattttaattaaaaattctgcaaataatttgaggaattacacttttwtatgttacgatatatctggaattgtttaatactgtcggatgggcatgtgtacttctcaaaaatggttggcttctgtctctcagtaggtcatatttcataaacattcaaagaccttccaggcaggcgtccattgtgcagctgtggccaggtgctccttctcatcccggaactgtgtttggagcagcaggggagcaggtgggtggygatgccgctgttgactcctgctcgcctgtctttcctcgacatcataagcttgagttctgctgtccatctcagatgactagcagtgccctgcaggaatcactgagcgcgtgctgaatgaaggggtcatgagaagcagtgtgggacacttggagacgtgtattttggagcaagacttggtctcaaatctcagctctgtgtaatttctcagcactctaattttctcatctgtaaaatggatgttcaacaaatgtcagtttattgaatagttcattaaatactttttcctgcacagaagaaattgcaggcttgttttaggtcataatactttggaattttcttgaattgcccaccttacatatttrtaatcagttttgatttcaagtatgataggctccacctaggttttcaacataaaaagagacaagaaaatggagagccgtttccagaaatccttcaaatgttgcttttgatttttaaaagaggctgtgacttcatgacaaggtctataaatgaacgtccttgcactccggggtggggacagagctgcagtgaggcctttgccctcgcgttcctgatgctgccgtggaactgttccctggtctgtgccaggctggcccattttcctgagaaggctcaagcatgctcctattttaggatttgacctgctgtttgtcttgctgggttattttgcctccctttatacttgtttcctaccttatataagggcattgtcctcaagtggaggaatatgtgaaactatttgtagtcaaatttagcagttgttttggtggatattagtagttggctaaaggaagtaaacttttttttttttttttgagatggagtcttgctctgctgcccaggctagagtacagtggcatgatcttagctcactgcaacctctgcctcccaggttcaagcaattctcctgtctcagcctccctagtagctgggattacaggtgcacaccaccaaacccagctaatttttgtatttttagtagagatagggtttcaccatattggtcaggctggtctcgaactcctcacctcaggtaatctgcccacctcagcctcccaaagtgctgggattacaggcgtgagacaccgcgcccagccaggaagtaaacttttcaggagatctcagtcaacaactgtgtaggttttgccagatttaatgtgcttgcgtgtctgtaaactcaccctaaggacttacttctgattccactggttctctgaagtactcagtttcccttgaagaaagacgtctgtgaactccagttttctatttgggtttccttgcccacagagcctgagataaggacaggtggttcatttgagaggtgactgcagcaggcaggagtagggagtgaagcaaggggtcaggggcaagaagggagagccagtaaaaggcgagttactggttccagcaggcccccgctcaggaggacagaaggcagccgcaccctcgctrtgcactcccagatgcttcttttggaaatcgagtgggctctcctggccctggcaggggtgctggatgaaagcagcaaggctcagatgtgcgcctgaagtaggatccaccacttcaggagagactgacctcactaggcacaggccaccactgctgtggcagaaaccagaagcaggctgagaggatgtggtaccaagcgccagaggcttctgctactaacacaattagggtgacrtttatgttctttattctactttccaagtctgaggtgtatgattttttaaaaagcactcattaatttttaaagttcccagatttcctggagatcaacgtaaatccagacaatcacgcttgccctggccttgctcatgaccgtccatgcttctgagctgcagtggcagaagtgggcaagtgccagrgagacagcagggctgacaaagtctgaaacacgtgccatctggccttccacaggggaaggctacccctgttctaagacagtcatttcatacgggggttttcatagaatacgctgtgtttaggtgcctgtgttgatgaagtacatgcagtgtgatgtttcaatatacgtatatgttgtgagtgccagttagaagacgggtgatcaagaattggaatttcaagagatcctacacatttggcgtctcccttcaccttccctgggtgacaggtacttccacaattcctgcctgttgcccttacctctgggcattgtacatgtgaagaaaggtgctggtggtttctcccaggctgcttcctatgggcacacccacttccaagaggatgcatgggcaaagatcacttaaagaaatcttcacggagactcttaaaaatgaacttttctggccgggcatggtggctcatgcctgtaatcccagcactttgggaggccgaggccggcagatcacgaggtcaggagatcgagaccatcctggctaacacayggtgaaaccccgttctctactaaaaatacaaaaaaaaattagcggggcgtggtggcgggcgcctgtagtcccagctgcccaggaggctgaggcaggacaatggcatgaacccgggaggcggagcttgcagtgagccaagatcacgccactgcactccagcctgggcgacagagggagactctgtctcaaaaaacagaaaaaaaatgaatttttctgaggatgtctacctgacaacaggtctgccagtcgtacttttcagctttcttttaaaaatatattttttaattgactagtaatggcatatgtttatgaagtacagtgtgattctttgatgtatgcatacattgtggaatgattaaatcaggtgaattaacatatctatcacttaacccacttatcattgttttttgaacatgtaaaaatctattcttctaacaatttctaaatgtataagatgtcattattaaccatggtaaccatgctgtgcaatggatagctaaagcttattcctcctgtctgatggaaactgtatgctttgaccaagawctttcttttccccatccctgcctgtcccagcctctggtgaccaccgttctgttctctacttcaatgaattcttttaaaagttccaaatataagcgaggtcattcagtatttgtctttctgtgcctggcttatttcacttatctgttttcacgactgactttctccgatttccaaaagaagaaagggatagccctttcttcttcagagccttactatggctcattgccccagcatgtaaaaatctctggggtactaaacgatgggacaatctgaaaaggctctgttcctagggcagagtttggggagaacaaactaaggagagcatctgtgaatgtgggagactctttatttcactaagtcagcaaacccatggcaaggctccatccacatactcatctgtccatacatcygtacacccatccgttcatctgtctgtctgctcrtctctccatccatccatccatccatccacccacccacccactcactcacctatctatccatccacccacctacctatgcatccacccatacatctacccaccatccgtcctcccatctatcttagaactataattcagaaatgagaaattgttacagggatgcaagttagatgatgtatttaaattataaaataaccttttcagacagaaattaggtctgattgagctatttgacttgccactggagaatggctttccaggaaggttgtttggtggacagggtccatggactgagtgaactattcctcagctccaggttttgacaaaaatatgtatgaggcatatttgccgtaaaaaaaaaaatgtgagaacatacatcattcacaactatttaaacttgtgatacaatttttatatggcaacttaaaaatgtgtgatgggacgcacgttctttggcaggtatgccgcaagagagcgagtgaatgcaaagggctctttagagctgaattaacaggctggatgtgagcgaattacctaggctgtgtagcgttcacccacctgagagtgtctgaaagcataaaggccggactggtacagccaacaggcataaggactacaaatggttttacttgagatctgtcttacaagtctcctcagcaagatcagagaggattccaggggctagtctttcaacttccaaccagtccgtaccactgttgtaaccagaatgattatgtggggctatatacacctcagtgctttgcagagcactacccctctaaaatctctgcaattgattatattttctttattttaattccacgttaatgtggctgtgtccctcctaaatacagcctgagtcctttgttgagtgcctcctatgtgtcgatagggtggtgcacagatggacgtccatgacctcagggagcctgtgcctcgtggccaaggccgacctgaacaaacgtatcatgctagacacatatgcacgggaagccacattcatccggggcatctagggacatctccccaaggaagagacagaggagaaggaaaagactgtgttagcccctatggatgtggggctgtgggagagcaggtgtttctggyggaggggcagcttgtgcagagacctgaagggtaggagacatctttaactscaggcgtggctttccagaatcatggtattccaccttcccagagtcaaagcagtaagttacacccccgatgaaatgagcacatmacacacacacacgttcatgattccacgccccgaatgggcgtcaaaggaaaccagrttcctaccagccacgcctctgccactccagctggtggcctgcaggacagaggctgcggggctgccgtgggaggtacagggtggctggagagttgagatgaaccgaaacaccgcttgccagagacgggaccgtgttctgtttcaaagattgctttctattcctcatcttccttggttctcataacagtccgaagaggaatcctaagcaaagtgaggctcaggaacatctagggcatctaggaacagacttgaatcaccacacggtgggtgcagtgagggaggagccaggctgctttgccttagctgtgctcagggtctcagtggagggcctgcccccaaggcactctaaataatatttgccaatattagctgagtggccagtgcccgctctgactgtgggttatcatgggtgaggcaccacctctgcctctttgagagccagcattgctggggaagcatttgccagattactgaagtgtaacttttaaagcacctgtttttagtgatttcagttagttcagacatcaacctttaaaacatgtgygatgccttctcttcttagatatagtgttgtgcatctgatattttacctttttatgagcatcagttattattgttttatagtagagaaatgtattttaaaggactcttgaggtttacagttctgtttgctgctataattagttaactacctcatatttctaggtatttttatttrtctttctaaagataaataaaagatttaaaaaaacctttcttatgacttttaacatttttttttctttgttgacctctgggcgtcagtcaccccttactggcccccacgtgtctgctcagaaagcctggccatcctcctctattcagtctcttgggtccatccctcttctgtggtcaggtgaagcagacagccatgttgctgtgatcagcttgccttgaagatgggaaggagctgaagggctggccacggccaagtgctgaggtcaccgatttaagacacctcttctgactgcatggacactatatagtgacatcagacaagtgatatttgttctgtgtgcaactattctgaatatttcctggtaggtgctggctgaggacaaagtaacagccaatgcaaaattatcatacttcttattaatagatgagttatattattcttggccaattatgtaaaccattttcataagtaattttataaacaaatttataaactactgtttacataatctgtgttttatttaaatttgtatcttctagcaacaacatcgcttagtttatcagacttcatttgaaatcacttgacatccagataggaatatgttgtggtttccgcgtttctgaacaggaaggtttagaagggaagaggtagaggaacactgcagcacttattaatggctaatggtctgtaacagtgtgtgaataacaggttattacataagagctcttcttaatttttatgttcattttctttgagccaaaatgttaactgttttctttcccattttggagttacctgagtaagcttatttaaattttgtaatcttgctgataaagtaacatgaaatttttacttttaaactttgcagaccaagaatatacttgtttaatatacctgtttgctgaataaataatgtattgtgataggtgatttgaaaatggtaaaaaaaattttaatatgtatctaataagtaaacagaaacagaaaggcaggcaatttttaaaaaatttttaaaacactggtaaatagaaaccattagaatctttatgttttgaaagcctttcagcagttaaaaatttcacattaattaagtctgcatttcctataccctaatgggaaagagttacatgcatgcaacttaaagacctttagtcgattcaaggttgtatagatttttttttttttttttctggtgacagaatcttgctccatggcccaggcttgagtgcagtggtgcgatcacagctcactgcagcctcaacctcctgggctcaggtgatcatcctgcctgagcctcctgagtcgtcgggaccacaggtgtgcaccaccacacctggctcatttttaaaattctctatagaagacaaggtctccctatgttgcccagactggtcaagaactcctgggctcaagcagtcctccctccttggcctcccaaagtgttgggattacaggcgtgagccactccacctggccatagattgatttttatgtctctytctcttttttttttttttttttttgggacagagtcttgctctgttgcctaggctggagtgcaatggtgcaacctcggctccttgtaacctctaccactcatgttcaaggaattctcttgcttcagcctcccaagtagctgggattacaggcatccatcaccatgcctggctgattttttgtatttttagtagagatgggattttgccatgttggccaggctggtcttgaactcctgacctcaggtgatccacatgcctcagcctcccaaagtgctgggattacaggtgtgagccactgcatsctgccctctcttcattttttatcttgattttttttgcagttgagaattataataggtatggctttctttaaaaataaaactaatctctgagttttaaattgtgcaaatgaagggaaggatgaaaagtctcaacagaaagctgaaaaacaaggtttctgggtgtgatgtaatgaatgtgacgcttgcagtcaattgactggagtttgaatattgactagtttgaatttggttcctccatacattggttgtggactcctaggcaaattgtttaacttttgaatgtctccctaatctgtaaaatggtggtaattttactwtcacacagccagctagcttccttccttcctgccgcctgcctgctttccttccttcctgccttcctctctctctctctctgtctccctccctccctccctccttccttccctcccttccttcttccctcccatttggtcaggataaagatgaaataatgaatgtgaaggtactttgtagactataaaaatcagcattgttagggcgtcattacaaaakctggaggacacagaatgtaaatgttaataagccttattgttatataatgtttgagtggtaattgtgtgttctaggttcttaaagactctagttttcccttagtatagtagttaactttctattgttgtttgaataatctattttagattgctaggtaggcaactaaatacatagcttattatgcaatgtgggtgttgtgtgggcgacttaaccttgggatgacgaacttaacttttaccagttttggttagtatatattttaatgatgaagtttaagatttcatagtatatccttttttaaaattttattttctttgcatttatctgtgtagtgatgtggcaatataaaatataaagtttgaatgttctagctcaaaaaccagtgcaaattagatggtctgaagacaggaatgtgtattacatgcgtcctttcagaacacaacacaatggcaagaattggtataagaaaattaaatcatttttattttaaagctatatttgctttgatataaaacgactccttccaccctctctctctgtctcttgycttccttctcgtccttcctctttgttaactccatttgtagttggcttttatttgcgtttagttttgactcttactgtgctttaaaagttatctgaagtataaagtgaaaataaaaaggaaggtgaatgtgttgcatrgtagaatcatcgccaaacagaaagggttaaaatactttttcttttcttttttggtggggggagggtggtgggaagtaagaggctttccaatgaggcatttcacaaaggcataatctttgaatctgattagataccatgttgagttggcctctttcacccagcacagagaatttctgacccatttaaaaagagatgttactgacaacatctgctaayggcaggmgagggctggctggaggaaaggaggagatgggaaatggaataaaaacctatgggagatgggattgtggtgaatgaaggctacaaagcgttttctcatttcaagagataaagacaaggcatattttgagaaattatcttttggctctggggaaaatcaagccagattttgccttctgctttggcgttctgcccttattgtaaatatcattccacagagaattccgtgatagctccgtaaagtcttgagtacaaatctgggaggackcgccccgcctgtgccggggaaacttgggtcctgggtcgatgacccctgtccttgcctttctttttccgatccttggatgagaagaagcttgcactattgacgcagaaccttttgccacttaacatgatgcctggaaacaaagtggggttttgtttttgtgaccctgttatgctgcccgacacacaggacgttctccagaatgtatggaatgaattttgactgcatgtgtagtctttctctttttccatgccaaatgtgaaaaattttccgcagtcttgtgtrtgttacccgtccrccataaagctggacaccgtcattcagtcaggtacaaaccttgcacgttaaggacacctaggcagggcctgggtggtgcagtggcttttctggcaggacatgtgtgcgrtgacagaatcagggccacattctggaagccacatcctagtatggtataggtggtggtggttgttttgattgttttttattgcttcagccttgatctgtgattctttgccgttccactgagcaagctggttaagtgcatcggtcctggggtcaccctagctagctgcaaatcctggtcccatctcttatagtctgtgagaagtttattgcataactatcctttttgcctcagttcatttataacatgggatgaaaataatagtacccttgttcatcaagcagtccaaagggttaaattaattaaataataggtgtgtaggacagtgggctgaatacatatgagctgctctttcatttccatgatgatttcatttacagtctgacaattttcacatgaatcgtctcaggtgggtcatggcagtcttgttagagaggcaggctattgagatccctttattttacagatactaaaagtggctttgaggtgttaagtgacttgcccttccgaggtgaggggtggctggacctaggcagagcatttctacagcagatggaaagatgcctgacacaagcaaacacagggcatcaaaaggagcctcatttctgcacctccaattagtacttcacaaatgtgttcgggcagatgcataaacagtctatccagtttttgcaaaataatagcttgcgtggcaaatgtccttttgtgaaccgtaagtattgcayttagggtgggaagctggaggggaacagacagcagctgttcttggggatacagttggggcctcagcctgtggaacgtctggaatgtgaggtttcctgtaagggctggttttgcctgcatttttccttgtgaaggttttttgaaaagctgtaaattgtaataaaattggagttcttcttttaaatgattgattctcaaaattctacatgagtagaatatgcatttcataaatgtaacttggcaagtcatatttcaatatttctacttcaattttgctcctaggaaaattattgtaactttattttgaagagtgtttgtgtgtgtgtgtgtgtatgggagggatttccttttcacatagccagtgaactagctgtgtgtttgctaatgggataaagtgtgttgaggtgagcacttgaggtctacttcccagggtttaccctaacccaggaataggaagtaggggattcctttgataatatgcatcatatgtcctaggcaaacaagaggggaaccatgtaaatgtaaatgtctgtttacagatagaattatgcatttgaaattggtataaaaataaaacaagagctaagggatttcccagaggtcatgggaatggctcctattacagtaaaatgcttacataatgataacacttagcttgtgatatttgcagttattttaaatgttattcttygaaacactgcatacaggcagcttactgtaatggtgcagtatataatatttttctattaagagaatggaatcttctgtttctatcaaacaagatatgtctacctctattttttattaataatttttctctaatcgttattaaaggtacctttattcttgtatgccccaaatggtgtatgttactaaaaccaaagttcacgctgtgtttacgatagtctattgatttgtgtaggtctgttcattgatttgtatgtacgtgaaactgtcttaagtacttatttgaaacctctgaataaattttatagaattcatagctaagaaaatgtttagatttgccacaaatctctttggaataagttaaaagtagatatactctaaagtacccacttgtttgcttggatagcgtaattccaaatccgctgtgatggtcgtgcacgcgtgcatgcacacacacccacacacacacacactcacaccccacttgacttgcaccatgaagacaaaccccatctctgacattttgcctgtgccaagactaaactggtgctggtattcagtcttacaaaatgaaaaataataaccactacccccaccaatgaaataacaaataatattcctttgggagatattaaccttttctgatgccttttatcaatccaatctctatgttaggcacgtaccttttaatgctattttattttgggatcatacttgcctgatcatctctcaattagagtgattccaaacatttttccacggagaatactgcgcctacctaaaggaagcccttaggctgcctctcagtcttagtgaagtgactgctactaggagtgtgagttgcccactcaatttactaaaggaatgtcccctctacctcccctcttaattattgattaaggcaaatggatctttatttcattggcaacctggaggagtagtagtccaaccacttcccaggcaacatagagcgatggtcgctatataaatgcttaaatgaacacaggccagggacccatggagccacctggaccatgccatgtggaactagccagtgtgaagcatgggttctggggacatcagaatgagattgtgtctacagaaagtttgttaggaaagactgacacttggggcacgtgcacattgtcttagtaccaggagtaccgttctgtttttccagaacaagtggttactttctttctgtgggcactgagttttgtaaactacgagttcaaattttcaccttgtcagtttacagtcaaatttatggcttctccgtagcctgtgtgtcacttttgtggcgtgtgttttgtgttatctcctttcctgcttctgttttacttccctacctcttgtttgctttcttctttttcatttcagtttaatgcatgctatctttgtctcgctgtagtttgtgtatatttgaaaactttcttaaatgttctctggaacaaggtgaggtaagtaatcttcatttatttggtatcgaatacaatcctgagtgtgttacctttgttttacataaggggaaccagccacacagctaataaagttgcaggactcaggttcagcttgaggtttctcctagaaagcccaggctcactctcccagctgtgccctgttctctcaagaaaccaacagatacactccgcacactcctcaacaacccatgacgctccacacacacacacacgatcttcagtgggcaccgctgcagacacatgcattccacaaaccctgcagatccgctgatcggaggcattgattctcaaagcacatggcctgaaattatactaaaaacgcaaattcctgggccctaccccagacgcactgaaacagaagccgtgagggaggggcccgcagcttgtcagtcatcgcgaggtgattctgttgcactcttgactttcagaaccactcaggagattacacactttggaaaaaaaagaattgtttttctgataggactttcttaaatagcagaccctatgagtctgtttacatttgaatttataaggattcaggttatatatatcacttcaaaaatatctattatggaaaaataggaattttttaaaaataaaattattctcaagaccagcctggccaacatggtgaaacctcatctctataaaaatacgaaaaaaaaaaaaaattagcccggcgtggtggtgcacacctgtagtcccagctgctygggaggctgaggcatgagaattgcttgaacctgggaggtagaggttgcagtgagctgagatcgtgccaccgcactccagcctgggtgacctgagtgagactctgtctcaaaaacataataaaatgaaataaaaatgtattatagactattcctgttctctaatactcctccagacgacctttccctgtttcctttgaagacataaaygttgggttttgaaatgtttgctatttgatttcatttttcccctcaattattccatcttctttctcccttccragggggttttacagtttttttctactctgtaatttctgtagctataaagaaaagttaatgtataggtaaagaaaagttaatgtataggatatctttactagagatcacttaaagtggccgcttctgagccacatttcagggacatgaactgamygggtgtgccaacctgtgcccctttattattgattcttgaatctctccttgatgccttaagcctctccttgaagatttaaaaatgtaaagctgcatagtgtcttggttttgatgtagagaagtcagtctacatcttatagatgtctaaaccaaaggcatttgctctattctgcagagttacaatcagaccaagatcaaaagctgtttcttttttttcttttttcttttcttttttttttttgacacggtgacttttctttcttctcagaagtatggtatgctatttccagaagttgtgaaggaatctcttccagcatattgagttsctgaaaaatacacaggtgatggtgatgctttaatcatgccccctccattgggagggacgccttgtgaatttsagctagaactgggatcccatcttggcaaatctgcgtaattcttgggtatacagctctaataggcaaaatgatctcccacagatgtcagtaggaaatgtcctgtagctggtgttccctgagaagttcatgtgcccaaaggaacactcattcccatacttgtgatgaaaggtattggattcgactggtctgttgtgatctggtttctccacggccgcttcacccctcatggttgtatcattggggcagaaattcgctgaccaagatttaccaatttgtggatcaaagtcatagtctctttttttgttagattattttgaactgcagggattgcagtaagtcctgttctcccagctgcttgttgcctggtaggattcagagcatagctctgctttttcaggcatctcatgctcaaaacagtgcatttcacaatgattccctgaagtctaagatgttggtagagattacagcctaaagaaacttctcagtggagagagaaggtctcactgtttgtcctcaggggttttctgtgtggctgttatttgatgtttgctgtcacagtctcatacctgagctttcttaacagcttgaagctcaaactagaatttaatttcctatgattcaagaccaagacggcttctgtggcttcctcctggtgaagggtggtgttcattccgtttcctgtaatctcagactcagtatctttttttttttttttttttttttttgagatggactctccctcttatcactcaggctggagtgcagtggcgcaatcttggctcactgcaacctccgcctcctgggttcaagtgattctcctgcctcagcctcccaagtagctgaaattacaggcatgtgccaccatgcctggctaattttttgtatttagtaaaggcagagtttcaccatgttggtcaggctggtctcaaactcctgacctcaggtgatccacccaccttggcctcccaaagtgctgggattacaggcatgagccaccatgcctggcctagactcagtatctttaaaacaatatttttcagttatgtcactgtcaccttgaggaataggcactatctttgggtggtcgtttattttccatttttgtgtgtttaagagtatttctgttaaacttacgttttatatgagatagaatatctgatgggcatctgtagcatactgcacaggtttggcaaccttgtttctctaccctttactcttggtaattactgagagttctgatttatyygtataatgatgttayttatccatttattctgcaatgacaaatttaaccatgtaataaaaatgttgaaactctttaattcagacatacaaataatgacatactaattttactgaatctgtagtaatgtagataacttagcatttcatttttggaggaaatcactgattacagtttacttttgtccaaattgtctcacttagaaaatgctaaggggatggatatcttgatgcccccacctctactctcaggatagatgctgaggatgatgtgaatgtttatttggacctagcaacttcagttacttttctttaaaaatggtttattttatacgcatgtaacaattatgtataacaattgttgtatacatacgtgtgtgtataacaattctcactgagacaggttaaaattaatatcatgtcatttgcaattgttatcagtcctgttctttaaagattgtggattgaatcctagaccaaagtgataatcttaataacatatgaaattgaataagattaacctatttcttcaatattgttctgaacagagagcaatgcaaaatgccacatggttaagttgaaattagacatttcttcattttatgaaaagaaaatagctggctatatacacaactgcacaggaaaacaataattctagttgtttttggcacctgacatttagtttattgttaaaataaaattcactacactgggctgatttgcaggaaagccaggcagagctttggccttagagcaagcgagcattccatccagccgattctagaggagctgcccgttttgttcagtctctctaatatttcctttattctctatgtttcctactcagaggctctgagtaagtcaaaagggcttagacctttgatctttttccaggctgccatcatcatgttttttttgtgaggttacttcacttttcccccatttatatctaaacagcagaatgccaaatatatgtatctccaagaatttacagtgcaaatatttttcttttccaaatatgccgtgtcctaccagcataagccatggtggtcagaataaaggtactaagtaaacaatgctgagtaagtctgagacgagccttgtctctaccccggagacaagtttgcatgagtccatcaagtctctctacttttaaatggtatgggatttctaaaatctttttttgacataattgcagtttttaaatgcattsagatcagtgttgaaataaccatgcttgaattctctgcttttatattgaagttatgaagctttcagggaatttgaagtgtggatgataagtgtttctrtatacagttttttgtttgtttaaattgagrcagggtctcactctgtcacccaggctggagtgcagtggtgcaatcttggcttacttcaatctccgcttccctggctcaagtgattgtccagcctgaacctcctgggtagctgggattagaggtgcatgctaccacgcctggctaatttttgtatttttatagagacagggtttcatcatgttgcgcaggctggtcttaaactcctgagctcagtgcagttcacccgtctcagcctcccaaagtgctgggattacaggcgagagccactgtgcctggcccctatatgattttttctaattgtggatgagatttttctgttgacaatggtgtttaattgaaaccacaacaaaactagtacagtaaaaataatttaatatggtatcaatttattcttgtttttaattgagagcgattgctactcctcagctgactaaaattctctactgttctttaattaaaaaaaaacaaaaattcataactcaaactaggctaattgaaagtagtttttaaggctgcgtgtggtggctgatgcctgtaatcccagcactgtgggaggctgaggcaggcagatcacctgagcccacgagttgaagaccagcctgggcaatatggtgaaaacttgtctccacaaaaaatacaaaaattagccgggtgtggtggcgtgcacttgtcatcctaactactcgggaggctggggtgggaagatggcttgagcctggcaggtggaggtttcagtgagctgagacggcaccatygcactcctgcactccagcctgggtgacaaagtgagaccctgttttaaaaaaaaaaaaaaaaaaaaaaggttgttaatattccttcattctctacttggacagtttataaactatatctaattaacaaaacaaaagagtttacatttgaaaatgtcattcaaacggcttcttttctggctgtataaatgcagtatgatgatattaagaagctgcagttaggtgaaaaagtgttttctgtagaaccttagctgtatgctgttgaagtcataccttggattggtacactattttctggaattctaattctgtcccactgggatatctaagaagaacaaagaaagcgtaatgagtgttacttgatttggtcctatccctctgagctcgctgctgctgaacttcatatagggattttctcctcacacacggcacagctaaacttttccaacacttaggaactcttcaaaagtttttcttcaactcttagtcattatatcctcccacaccatctacccactcgcacatcaaaaatcctgaaatagtgtgaagtcatttatctctgtattaaaaaaaaaacccataaaaatcatgatattaaggattctgacaactgtaacaaaagtcttagcttttaaatgcatggatctgttgccctctgataattaaagggtcttttcaatatctaaattttaaaaaacctcagcatttcaaatattcaggcattataattcattttttatatgaaaaaatgctatcacaaaatctcaattatctataaatctggaggtttagattagtgtatagtgaatttcactcaaagcactacactttaaaaattaaccattttgggttgaaattaaaattttgtttaagaattatgtgtgcctctctgacttccaaatcagaacaagttaatatcaggtattctttttctgatggaaataacagggccatgtgcagtggctcaagcctgtaatgccagcgctttgggaggttgaggcaagagaatcacttgaggcgagcctggatatcgagaccctatctctacaaaaatattaaaaaataaaaataattgccgggtgtggtggcatgtgcctgtagtcccagctacttaggaggctcaggctagaggatatcttgagaccaggagtttgagkctacattgagctatgtgatcgtgtcactgccctctagcctaggcagcagagcaagactctacctctgaaaaaaaaaagagaaaagaaaagaactatcacattagtgcatgctcgctctattttaggcactgtgctaagccttttgcctggattattttatttaagcctcagtacatccttgtgaggtggtaataactattatctccattgaatatttaagaaaatacatgtcagagaaattaagtagattggcctgagtgcacaccgaatttcaaaacccaggcaagcygatcctggagttgtactgtgcattattctgttaatttctcatggtttaagtttatgatatcttttaaattctcatcatttaaggttactataattcacaggcatttttgtttgtcatcctgatgtaccctggcattggtttatattccaggtaagccccaaggtgtcacaattatgtgtaaagtaagaataaattgctttcaaatgcaagacagaggcaactttgccagtaagtggcttcagctttatgggttggacttggtgataggtaatgcggcttctcagatttcattcagatgaattctaggttcagagtcttgctctgataggtacagttgcctgttgcagagttttagaaacagtggttgtgctggaaaataaagatatttagtgatatgccatttaacaccttaaagtatggacaggtctctggctagaaaatgaaaatgaaaatccctgccgtttgtaaactgggtgttttgtgtggtgtttgattactctgctctgccagcagctggaggtgacactcccacttcccaggctgtttgtccctcttcccccaagtcacggcagcttgggtgcagcagggcatccacagagcttggtgtctgtgtcgtgctccatctgatagtgtggaattacatcttctgtgatttctgtgatagccctaggcagcttttggatatttaggcccatctggcatcatctttatttagttcccatttgctttctaagaattaatcatatggcatggtgattgttgaacagtatacttgygggaaattatgtactaatagaaacaaaatagaaacaaaatatatcattaatagaatatgcatttaaaatacatcaggccttagttttctgatggaaataacagggccacgtgtggtggcttatgcctgtatgttacatacagattatgttacattgtgagaccttcaacaaatagttaatgttttgtataaaagcaataaagcatccctataacttgaattttaaataaagccgcaawtaaaacttctttgtgcacctaaggcaattgggtagttttcgaaccaatgggaagtgacctggacttgcaatcctgcctgtcagaaaggacagatttagagatgtgaaagaggtcagtgaatatcattttctcctgcctctgaactstggcttttccaggggcaagtctgggtcaccatctgaagtgttgcttctcttctaaaattacagacatctaaactaagcccgtgtcataaatcctyaggtccagaaggacccagaagggctactgagcccgtccctgatgctccagataggaccctctggaatgaccctttgtgtttgttaactgtccctgtccaccccatccccagctccttcaacttccccccrccgccccacctcgctttccccttctcaccactgtgggtaggagtgaaagtgagccgcaccagggagggaaatcgcaaagtgccttttaccttctctcttaatcctgaatggtaagaaagtcttctttcctaacacattaatagtttcagccgtggtattttaggtaagctrtgaaagattggaaagtgttttctgtcragaagaaataattatccctttcaaaaaattgtatattccaaacatcttctctctttgttaggttattgaaagtctgctatttaaatagttatttcctgttacttattaactcagaaaattttctatatggttrtatttgggaagatttatttaaaagttttcttttagagttaacatcaataatctgcatgttttctacagtggaggtgttaatgttgaaacataagagaatgaacatactcagcgaatggaaatcttaacatctaatccaaaaaagaaaacatctggaataaacaccttcatgaaaactttcattttcgacttttgtgtggtttcctgagcgtgattccctgatctaagagactttcttatgcgagggagagaactaagaatttcctcttggcagcatgtgatgaagctggctgcaccctccttcctgggtaactgtgtctttgatccccaggacccttcttgagttggkttttgtccttcgctgccccacttcatcctctcaatctctaaatgttgggaggctgcaaagctcaggcctccaacctctctcttcgcccacttagtcccacagctttgtctataaactgataactcacaagttgatctgcaaactttactttcccccgaacgcaacgaatcatatattaaactgtgtattcagtgttttcatggaaagttagtgtgtgagtccgtttccatgctgttgataaagacatacctgagactgggtaatttataaagaaaaagaggtttactggactcacagttccatgtggctgcggaggcctcacaatcatggcagaaggtgaaaggcacttcttacatggcagcaagagagaatttgtgcagggaaacttccccttataaaaccataagatctcgtgagacttattcactatmatgagaacagcataggaaagacccaccctcatgatgcaattacctctcaccaggtccctcccatgacaggtgggaattctggaagctacaattcaagatgagatttgggtggggacacagccaaaccgtatcggtcaggtatcttagacttgttcaaaaccaaaccttaagtttctacccttacctctgaaaatgacatcactattcttccgtttgctcaggtccaagtctttgaggtcattcttgactccactcttagtatcacacctcaccagacagcaagtcttgtggactccagcttcacccactttttgccacctgcactgctctgcctgcagcccattcctggaccagtgagacagcctctccttagcctcccggccttggcctggctccttgctggtctccttccacacagcagcaggagtgagccttgcgcagggccagtcagctgtctcacttctgtggccctgtggtcttgtcacagactgggtcaaatccagagtcctccccattgccctgaatgaagaaggctggcttcctctgccactcggccgtctctccagcactctctctctcactgggtcaagtgcattgttctccatgcactttgagctcaccaaacacacttccccttggtgcctttgtactaactgaacacactgcatagcaaactcttcctccagatacctgaggctcaggccctcctgcgttcaggactgctggagtgtatccctaccaacgggtctccccagactaactcatgtgaagtggcatccactgcctgtgacacctgctctgtacctttattttactgacctttatttttcttcaaaacacttatgatcatgtcacatttatgatattactttcttgactccctgtctataagcatgttgaaggcaagaacctggtttgctttgttcactgttgtgcttccagggtctgcagcagtgtctggtacagagctgctgctcagtgaagtttttccgatgggtgaatgaagagtttgctgcaattcatttgtacaagattaggacttaaaactcctaacgtgggaatcagcctcagtgacttaggggctggaattttgaactggaattagttwatgttagaatgttaagttttaggagggcttaggagaaaggaaaataaaaaacagagaaatgctgcaagagacaatcagagctgacgaattacattcaaagttttgtctcttgaaatttaaagtcttaaacgtctaacagtgctagcatgattgacacttgaatgttcaagtcaacctggaaaataaagagtgtaccgagataaaagtgttttgaatcggggaatgacatgaagcaagaagtgttttaggaagatggatgtacatgggttgggtggggagcgagagagaccagatgctggagagtgtgccagggccagcccaggagagccagcctgaggccacgaggcctgggccagaggagggacagttcttgtgggaactcttgtgagaggtggatggatatgactcaaagcttgatgtgatatggtggcaaggaagaaggggacgttaaggaagatccaagactttgaaccagactgaatgaatgacagaagcagagtttgatgaggaggccttggccttgtggagagagtacttcattcactttcccattgtcaagtttggrtttgtggagggagcaggaaatcctcatggagatgtctggcaggcaaccagagaagcatgcagccactgaggaggaggaagccaggctagaaaggaggactttcagagttattggaacagacaggtatttcagaggtgttaaagaatataaattagagagaaaaacctggggacatattcatgattggggtcaggaagagagtgtttctaaaaggaccatattggtcaggggtgaatgcccactcatgagggaggaggggagggaaagcccaccattgggttccgcaactgagaggccactggtgaccccacagtgtgagcattgaagtctgcagagtctaagctacaagcctgctttcctgaagtaagtttaaaatataggaataattttgtattatattttaagtttatgttttagatgtgcttcccttgatagcattttcagaatgtttaggtttatctgtttttttttctctctctctctccctctgtcatcaattcctatgtcataggttaaaaggctgtattaggctgttcttgcattgctataaagaaacacctgaggctgggtgtggtggctcacgcctgtaatcccagcactttgggaggacatggcaggcagatcacttgaggccaggggctcaagaccaggctggacgacatggcgaaaccctgtctctactaaaaatcagccgggcatggtggccggtgcctgtaatcccagctactcgggaggctgaggcaggagaatcacgtgaacccaggaggtggaggttgcagtgagctgagatcgtgccactccagcctgggtgaccctgtctcaaaaaataaataaacacctgagactgggtgatttataaataaaagaggtttaattggctcatgggtctgcagactgtacaggacacatgatgctggcatctgctcagcttctgggtgggcctcaggaagtttacactcatggcagaaggtgaagcgggagcaggtgcgtcacctgcaagagcaggagtaagggtggggggaggagccacacacttttaaatgkccagatctcactagaactcactatcatgaagacagcacaaagtcatgagggatcctctcccatggtccaaacacctcccacggggccccacctccagcattggggattacaattcagcatgagatttccaaacwctgtcaaaggcagagcacaagacagtatcccttggcatctaaattgattataaaagaagtttctttctttacagggtttctttctagcatgaacttttacatagaacatgttttctgatggccccactttgtgtgtgtgtgtgcatgtctacatacacaatcacccactatataaggatgttttggtaaacaacagacccacatatatgatggtggtcacataagattataataccatatttttactgtagctttcctatgtttagatatgtttagatacacaaatccttagcattgtgttacagttgtctacagtattccgtacagtaccatgctgtacagtctgtggcctggaagcagtagkctatagcataaagccttggtrtgtagtaggctggaccatatgggtttgtgtaagtccactctgtgatgttcacacaacaatgaaaccaactagcaacacgtttctcacgtgtttccattaagtgacacacacgcatgcacayacacacacacacacacacacactcacaaacacacatatacagagacagagagaggttgcccgattgactttaaggcactggctcacgtggttgaggargccagcaagtctggaaacaggctaagagctgtgctgcagccgtgagtgtgaatttctacagagcagcaggctggaacctcagccagtgtttccgtgtttcagtcttgaggagaatttcttcctcttgggaaaatctctgtgtttgctccaaaggcctgcagctgattggatgacacattatagagggtaatctgctttactcagagtccactgatttaaatgttaatcacattttaaaaatacctttacagcaccatctagactggtgttyggccaaacaactgggcctcatggtccagcctagctgtcttatagagttaaccatcacagtgagaaggcagtggctgtgataccatgtgagggagaaacttttgttccaaggatttggtcctttatgtcaatcctgtgtttcttcttcttcttcttttttttttcttttttagataagagtctcactctgtcacccagggctggagttcagtggcgcaatctcggctcactgcaacctctgcctcccaggttcaagcgattctggtgcctcagcctcccaagtagctgggactgcaggcgcccgccaccatgcctggctaatttttgtattcttagcagagatggggtttcaccatattggccaggctcatcttgaactcctgaccttgtgatccacctgcctcagccttccaaagtgctgggattacaggcgtgagccactgtgcctggccaatcctgtgtttctttactgacagtttcaatcgtatgcagcctgccggagatcctattttgaaggggaaaggggtttttcaattccagaaagaataggtttgactttctaaattttgtatcataagcattataggsaatgctttaaatagtttacgaagcttagtttttttttttttgaaagcttaaatttgctaggtgaggattcattgaacataattcctttttttttagttctataaatgttttcaatgtatctttaaaatatactgaacttaatgtatcattttacagtgtaattttcattagtaacataaaacttgattagggtcatttaaattttttttcttcaaatactcaggacaatacatgtagaattagaactggagtaaagactaatagtgtgagcagctatccctttctctaccctttttctttcttcctttttttttttttttgagacagagtcttgctccattgccaggctggagtgcagtggcaggatctcggctcaccgcaacctctgcctcccaggttcaatcgattcccctgtctcagcctccctagtagctgggactacaggtgcacactatcatacccagctaactttagtatttttagtagagacggggtttcaccatgttggccaggatggtcttgatctcctgacctcatgatccacccgcctcgacctcccaaagggttgggattacccagccttctctatcctttttgtctggagagacagacacaatttctctgctgttttaatctgctctagaaccaaaggtagagtccagaagagttctgggctcttccatgatccttgccaccaggtgaagcagtggcctgccttcctcttcctctgcctttggccaccccacagtgcacccatccatttacttattgatcrttttctctcttcccttagccttcagtggctctgcacaatgtttcaccatttcctcggctgtttctaaagaagggaacagctaggttttccacagtgacctgactgcagattccctggtatgctttgtagcctctctaagtgcaaggctggtgggaaattgctcaggttcgacatgtctcaagatattttactcagatacttaygagaagcatctctttggccatttctacccccccatcatcaccttctcatgcacagtgcagatactgcctggccagggtgggggtgggagagagacacaaaagaaaacaaaaaattgctttatttgatgttatcctcctgtgagcatatagactggttctgggtattgcaaaatgtatcgtggcccggaagtggagtggcttgtcaagtttttctttattagctaaaggacaggaattgacagggaaataatacaattaatggagaagagtgaagcatgtaagtagggaaagayagaaatgtggtctcwgcttcttgaaacacagtcttctctgtagaaatctagatkactgtaggttgagacttttaagtttactacagggtctctaagagtcagttattagaagttaacattgactgggtgccattaaatatctcatctcatctgatgtttatagctgcccgatcatgtagccattataaatggcagcaagtggaagcagcttgtccccggtgctctatgtgagtgagggcccggggttgtctgattcctgagatgacacaccaatcactacactagactatgctacactagtctacactacactagactacactgcactagactacactacactacactggactacactacactacactggactacactacactacactagactacactacactagactatactacactagactatactacactacactatactacagtacactagactacagtgcactacgctagactacagtacactacgctagactacagtatactacactagactacactacactacattagactacactacactacactagactacactacactagactacactagactacactagactacactacactagactacactacactagactatactacactacactatactacagtacactagactacagtacactacgctagactacagtacactacgctagactacagtacactacgctagactacactacactacactacattagactacactacactacactagactacactagactacactagactacactacactacactagactacactagactacactacactagactacactagactagactacactacactacactagactacactagactgtactacactagactacactgcactagaccactgcactacactacagtacactagactacactacactacagtacactagactacactagactacactacactacactacagtacactagactacactacactacactacagtacactagactacactagactacactacactacactggactacactatactagactacactagactgtactacactacactgcactacactacagtacactagactacactacactacaccacaccacactagactacactatactacactacagtacactagactatactacactatactagactacactactacactacactagcctacactagcctacactacactacactagactacactacactacactatactagactacactacaccacactacactagactacactacactagactacactacactacactacaccacactagactacactacactacactagactatgctagactacactacgctagactacactacactagactacactacaccacactagtctacactacactagtctacactgcactacattacactacactagactacactacactagactacactacactacactacacgacactagactacactacactagactatgctagactacactacactagactacactacactagactacactagactacactacactacactacaccacactagactacactacactacactagactatgctagactacactagactacactacactagactacactacactagactacactacactagtctacactgcactacactagactacactagactacacgcttctctcatatgaaggagagactagcccgcagccagcccatgctcctagggctcttttagtacctatgtaacattcatttaatgcgctctctcaacacatttcatcgctcacatttcattggtaagttcacagttttagttgcgactctcttgtgaacaaggtttcttacaagaggaggggaagctgtacaaatcacccctttctggacacagggaggggacaggagwgaggacgagagacagagctgacttcattgcatgtcagtaccaactacccccttgttggaggcctaaaacattttttttctggggggccctgaacccmttctttgaggccctgcatatggtaaagggctgtgttaagtcccgctcctggatggtgaccattgtttccttaatgtcttggtttctcctgaaggtgggcgggccatgtctgtgtgaactgcagcctggagaagaggaaggctgatggagatggtggacacgtggccacctctggaaattcccaaatgcctctttcatgattattgaatgtgccggtttggggtatgatacagcatcaggctgttagtctttagacctaggaattgttatcagagagtgaattttccccatttctttattacccttgtagcctgcaagttaaattcttgttacattaacagagtaaaaaaagaaaaaaaatcccattactacacaattatgttggattgagggtttcttatgcatcagcttttagcaatgtagcaaatatacatttaaacaacacacataaaatgtatacatatattgaatacatatagatttcgtttaatgacctatttttgctgtcagagaagcagtgtcactagattcttctctgcctctttgactggacaatttttctaacttttagagatggagtcttgctatgttgcccaggctggttttgaactcctggccttaagctgggattacaggagtgaaccactgtgcctgacttctctaccatttaattaatatgtataatctgcttgggggaaaagaagccttaattttttgtgtgatcatttcactgttgacacttgactttaccactgagagccgttagaataaatgtgtgtcctcgaagctgaaggtcagttgggtttaccctgctcttatgattgatgttgtgtgtgataacctttatctttgctcagtcccagtgatttagtcacatctgcgtgctgggactgaccaactgggactttcctagtcttggcaccacaagtcccacgtcctggcaaactccttagtcccgagtgggcagactgggatcagtgttcaccctaatmgcagtctttccaacaagcacctccccaacgaggtctccattactcccacctcccccactttaacactcactgataatttaatattaatggccgatcagatgtaaaggcttattttaattgttcatattgcccagctacttgagaggctgaagcgggagaatcgcttgaacctgggaggtgaggttgccttgagccgagatcccgccactgcactccagcctgggtgacagagtgagactccaactcaattttttatttttttaaattcatattgaacttaagagtgtggcacttcggtagatgcaatgcgtaaagcggtccctcttyctgatttttaggcattgcttacttgggtatgtggcctttgcaagggtcacttgtctgatgggtcaggtgacaggaagtaactcttccttcgctaagaatgaatggacatttgggcttttttgtacttactcttgtcccagagcttctcctggcatttccatttaaggatgttaaaggtaactacacaggagaaagcactgtgcatttgaggatatgccagtcttttctttcattattgagaatatctctagtattaagatgtattttctcaaaggttttcccatagctttgattctggaacatccagtaaatagcattgactcattttgcatggattcaagagaagtttgccagtgtaattaaacaatatatatttatttttagtaaaatacaccaagaaattctctgttctcaaattttggttccgagttttaaatgttttgtgaaaactggtggtgcacagtgtcatgtgtgcctttgtctttgttgaacagagatcagctctaattttcatctatttgagtacgaaactgtagtgcattttgagttgttgggctcaggaaaaactgattataataagttgtctatgaatatgataattcatttgtgctagaagaagctagtctttgaaactcagcggatatataataatttccttgtaggatattaattttgcatccaagccaagagcgttaacatgatatcggcttctccatatgcataacctgtacattgtttaatctgactaacacaaactttagaaaaatccacaaaagatcacccttccttcaggctgtaggcctaaaaaaaacktttttctaaaggagtgacagctacttgaaggaaaacatggatttttttttraaaagtgttttcctactgcctgccaaggagcagctacttcatgaaatcatgcaatggctgctgaagactgttccctggggacttacactgtttcttggctaaatatggttagggaagtttcctccctttctcacacagggacctcttattttcagaatcgttttgtcagttggttcctggtaggattctgggtacgaaaggagatacaccgggagctactgctcacgtttaattctgtggccttgcaccctgtgtcatgcgaatagggccaagtaggagacggaaacacaaccgactcggaaaatgccttctgtgaacttgaaaaggaaaaagaggaattaggttgaaacaacttactgggaagtcagtacttgcaaactgtaaattgggcataaaactgaaagaagaaaattcaaatttgtgggtaaaaaatcagggtgttaaaatattgaacgtgaatcaataaaaatagatttagctttatttccctccgttttggccttcagggtgtggattcatgcattcccctgcaatgctgcaaacccaatcagaacatgaggttagatcataggaaccagaaaatgaaagtgaccacaggcagggctgacatggtgcagactcacagtggatgctgtgtgacggctgagagaagcagcgggagtgtgaaaagacatgcgaatttcagtaaaataaactaggtagtaactgagtaaaattaattatctaaactgaccaaataacttattattatggataaattattactttatagaaaggacttttgaaataaaacttactttaaatatttcaatatgtcatttttaaaagaacctcagactcacaaatctaatgatttatcatttaaaaagtttcttcttttaaaaaacycaataaagtgaaaatatcccattgctttcatcatcacctgatcatctttgccttttgcttctgtttgtcacacgtagaaaaatgcagacttattttcatcactttggtattrgaaatatttttcagagtttgttgagagtatctgaataaaatgtgtttctagaaaaccgacattgaaattgataggatgtacataattgttatgattcagtaaacttatcaaatgtgatttatctaaaaataatgaatggaattgaattagttattttacatgtatttcttttcttttctttctttctttctttctttttttttttttctgagatggagtcttgctctgtcacccaggctggagtgcagtggtgtgatctcggctcactgcaacctccgcctcctgggttcaagcaattctcctgcctcagcctcctgagtagctagaattacagctgcccgccactgtactcggctaatttttgtatttttagtagagatggggtttcaccatgttggccaggctggtctcaaactcctgacctcgtgatctgcccgcctcggcctcacagagtgctagtattacaggcgtgagccactgcgcctggcctattttacatgtatttctataaattctgcccaatgggtttaacacttcacttggattcttattactttttcttttttttttttaattgaatgcctcctacactcagcattccttacttctatttgatcaggagagtcagtgaggctgtctgaggattttaaaatgttctctccattttgtgccatttaatcagccattctgattttttctgagtgtctatgtgccaagaactctgctagatgctggaaatacaacagtgaacaaaataaagatagtcctggtgtcctgagaggatacaatgagaacacttaatgcaggcttgctgtgttggggaaaatctttgctgaaattaatcatattaaagtgaggcttaaatggcaagtaagagttaaccaggctgggatggagatagcattgcaggagggtagatgttctagaagaggagggaagtggcgtgtgaggacagacgtgagaagcacgcatgatgtgttgctggagctggacatcaatacctgtgtgcttggagttatcctaggaaggtgagtggttggatgtgaagctgaagaggtgacttaggggtcagatttttggaggttttatgagccatattaacagttttgactttatccaaaaatggtgaggattgactaaagatttttaaggatgagtatggggaataacattaaatttgcggtttacaaggattactttggccgttagaaatagtggttttgaggaacaaaactgaagaaggcagrgaatagtcagtagagtggtggactaaaccagcaaagtgtttaggagctagtgactgacaaaagaggtcaaagtaagtggaaatgtttgcgagatgtctgagccgcataattagcacaacttggtgcttaatggttgcacacggcagaagtgggagcagggcagcgtcccaggctggcctccagttttgggtgtgggcaggtgggtgaatgatgcgygactgtcagcgagaaggggaatggagaaggaaggaagggctggtttcgggagggagatgttcagttttgagtcaatagattttgaagtatttgttggacagataagatacagcaggttggtattagcagttaatgttggagtctgaaggtggagagggaaataagggctggagtatagttgttaattaaagtattactctatctttaacttttatattgctattcagaagaggaattcagtgctacatattgacaatcacttaggtaatttcacacttagttttgaaaaatagtgttttattattattgttttttgagacagggtcttgctctgtcacccggggtggagtgcagtggtgcagtcttggctcactgcagcctcaacctcctgggctcaaggaatccccccacaccttagcttcccgaatagctgggactataggtgcgtaccaccacgcctggctaatttttgtatttttgtagagayggagttttgccatgtaacccaggctggtctcgaacttctgagctcaagcaatctgcccatcttggcctcccaaagtgctgggattacagggtgagccaccacacctggccaaataatagtgttttataacctctgaaattctatggcttcctccgtgtccccaaayaggcaatttcttgattatcatcaagtatttggtcaattgaatactggattatggaatgtgatacattaaaaaaacctgaacacatgcaaaaaagtatagaattactcttttaaaggcagttgctattggaaaactaatataaccttttgttttatcatgtaattcaagggatagaatcaaaataagggatttgttttctagtttaaagtatgcctatgtgaaggaaaattggttaaaataaaaaataaactatcctctagataaagagaacttatccttttctgttcaaggttttaaatatttgatgtgtcaaatttgaatgtattttcatctataaacattgtttctgactgcaaatttaataaaggactcactaatagttcttatgttatttatgaatcacatttttgaatttatgccctattagttaaaacagtaagattttggtttttggtgtgttgataggtttatagttactcaagaaagatatgtggtgagacgagactgtcttgctggaaaagatatgtggtgaggcgagacagtcttgctggaagagatatgttttgcattattttggtattgtttcttgaagtatactttaatttgcattcatctcaacatgagacaaaaatatggctgggcgcagtggctcacgctggtaatcccagcactttgggaggcaaagcaagtagatcacctgaggtcaggcttctgagatcagcctggccaacatggcaaaaacccgtctctactggaaaatacaaaaattagccggacatggtggcgggcgcttgtaatcccagctaatagggargctgaggcaggagaatcgcttgaacctgaggttgtggtgagccgagattgtgccactgcgctccagcctaggtgacagagtgagactccatctcaatagaaaaaaaaaaaatctgtgtttatttctcacatcattttctaatgtgaggactgttttaaaagtgtatgggattaaggagcagagcattcctgatgtttgcttatattttgttgggttggggaagggaatgaaagaaaagatcctcccctagggttgccatagtttggagtaataggagaataacaaatgttttccatcaaaaacagactttctcttattctctgagcaatatatatctcatttggtctagataacatttatgaaagtcaatttagcatggatgggcttctgtagatacttgtcgttaataatgattgttcactatacagtgatgttttttaaaccctaagtgaaatttgagttgtcttttgcatgtgggtaacatatgtgtttcagcacaagggagatgaggatgtatgaagtgtgtaaaagaagcagggaaaggtagtgtccaatactggcaaccagtgaagttgtttgaggttattactgatgacagtatacttttcaaattgaatttggtaaattgcttcactggctgaataagagagttgattctgaacgaaggagatcaaacctgaacrgtacattatcttcattatacttatggttgtatgyaataaacataacttttctaatccaaatattgtggcagactatcttacagaaaattgtatttgtgtatatgaaggattttcctatgtgttttgaaggaaatgaaaatgtgtaatggctacagcagtgatactgataggctagcaggcaattgattgctyagaggttaagttgagagagagagaattctctggaccatagtcattattccttattcacactccattcagctttccccgccccttctgggcacagcctcagatcttgtgccgttttggaaggcacacggtgtggccctggtacatgcttgtatccactcattgaggtctgggattccaccatggtaaggctcatcagagcccttcctcaggactggcaggaggacacccagagaagcagttctaacatttcactgtggttggtaagcaggggaggacatgttttcagtcctggttggaagtcagcttatcagtcaggacaggtgaggttctaattcagtaacaagtgctatgaaattctcaatggcttagtacaacaattatgtatttccttttcatacacagtttgccacaggtccaggtgactccttcatgggtcaataaattactttttgtttttttgcttgttagtatgaattgggcttttgtttcttgcagtcaaaaggatcttttgaaaaacaaatgtattggaattttattcagtggaaagaaacactattttgagagagacaagcagaagcaagggctaggaatagcattaggatttgctttaaagctgacgtagactcgcaactctcccgattggaaggcttttaaggtagactagtagtgctccttattttatagagaagagagctgaggtgaggtaatttgcagagaacttaggctgcttgctaaaggtcacatgggaatttaaggacagggacttaaaccagaaaaagatttctgattctttgtgcagtgtgatctttctattgttttatggtttctcatacataaaggtggaacttatacagaaaagttttgaaggccactttttcttaaggcatttaaaggagacgagagatgtccatgaggttggccatcacagtgggctcattgcctacaagctgggcattgtgttaaaaagttccacaagttatcatttatgggagcaaaagcaatattttctagccagttttcccagtgccatttgttaaatagggaatcctttccccatttctttctttttttttttttttttttgagacggagtctcgctctgtcacccaggctggagtgcagtggcgcgatctcagctcacggcaagctccgcctcctgggttcacgctattctcctgcctcagcctcccaagtagctgggactacaggcgcctgccaccatgcccagctagttttttgtatttttagtagaaatggggtttcaccatggtctcgatctcctgacctcgtgatccgcccaccttggcctcccaaagtgctgggattacaggcgtgagccaccgggcctggccgtttccccatttcttgtttttgtcaggtttgtcaaagatcagatagttgtagatgtgtggtattatttctgagggctctgttctgttccattggtctatgtctctgttttggtaccagtaccatgctgttttggttactgtagccttgtagtatagtttgaagtcaggtagcatgatgcctccagctttgtacttttggcttaggattgacttggcaaagcgggctcttttttggttccatatgaactttaaagcagttttttccaattctgtgaagaaagtcattggtagcttgatggggatggcattgaatctataaattaccttgggcagtatggccattttcatgatattgattcttcctatccatgagcatggaatgttcttccatttgtttgtgtcctcttttatttagttgagcagtggtttgtagttctccttgaagaggtccttcacatcccttgtaagttggattcctaagtattttattctctttgaagcaattgtgaatgggagttcactcatgatttggctctctgtttgtctgttattggtgtataagaatgcttgtgatttttgcacatcgattttgtattctgagactttgctgaagttgcctatcagcttaaggagattttgggctgagacartggggttttctagatatacaatcatgtcgtctgcaaacagggacaatttgacttcctcttttcctgcttgaataccctttatttctttctcttgcctgattgccctggccagaacttccaacactatgttgaataggaatggtgagagagggcatccctgtcttgtgccagttctcaaagggaatgcttccagtttttgcccattcagtatgatattggctgtggtttgtcataaatagctgttattattttgagagatgtcccatcagtacctaatttattgagaatttttagcatgaagggctgttgaattttgtcaaaggccttttctgcatctactgagataatcatgtagtttttgtctttggttctgtttatatgctggattgcgtttagaacctaggcagtaccattcaggacataggcatgggcaaggatttcatgtctaaaacaccaaaagcaatggcaacaaaagccaaaattgacaaatgggatctaattaaactaaagagcttctgcacaggaaaagaaactaccatcagagtgaacaggcaacctacagaatgggagaaaatttttgcaatctactcatctgacaaagggctaatatccagaatctacaaagaactcaaacaaatttacaagaaaaaaacaaccccatcacaaagtgggtgaaggatatgaacagacacttctcaaaagaagacatttatgcagccaatagtcacatgaaaaaatgctcatcatcactggctatcagagaaatgcaaatcaaaaccacaatgagatatcatctcacaccagttagaatggcaatcattaaaaagtcaggaaataacaggtgctggagaggatatggagaaataggaacacttttacactgttggtgggactttaaactagttcaaccattgtggaagacagtgtggcgattcctcagggatctagaactagaaataccatttgacccagccatcccattactgggtatatacccaaaggattataaatcatgctgctataaagacacaatcacatgtatgtttactgtggcactattcacaatagcaaagacttggaaccaacccaaatgtccaacaatgatagactggaataagaaaatgtgacacatatacaccatggaatactatgcagccataaaaaaaggatgagttcatgtcctttgtagggacatagatgaagctggaaaccatcattctcagcaaactatcgcaaggacaaaaatccaaacaccgcatgttctcactcataggtgggaattgaacaatgagaacacttggacacaggaaggggtatatcacacactggcgcctgttgtggggtgggggaggggggagggatagcattaggagatatacctaatgtaaatgacgagttaatgggtacagcacaccatcatggcacatgtatacatacgtaacaaacctgcacgttgtgcacatgtaccctagaacttaaagtataataaaatatatatatatacatgtatatatatacacatatatatacatatatacatatatatatacatatatatacaagaaaagcaatacttgcattagaataactgttcgtagaataatatgagtcctgggagagacattgtggcatcatctcatcatgcagctcagagtcatgtgggtcgttcmccttctgttctctgcaaactcagcggaggaccggagacttgggtgtgatagggtgacattgacattgtcggggatttcagggcccacttgaacctcagatctggattctggattgtagcagatacacaggtgatgtagagctgtctaaagttgatgctgttaaacacgtgctgcatttcatccttataaactgaatgaatctccaaaatgttatccaactcatttggagacacatttcacatacatgaaactctattcacgctgcagctgcccagcgtcagtctctgaaacttgtagtcttggtatttaaatacagttatgtgtcgcttaatgatagggataccttctgagacatgcatcactaggtgacgtcctgatggtgtgagtatcactgagtgcacttaacaaacctagatggtacaggctgccacacacctaggctctgtgtgtggcctactgctcctaggctacaatccctatgcagcatgtcactgtactgaatactgcaggcagctgtaaccaaatatatctgaacataaaaargtaatgtgttgtgctataccattaggaaggctactgcgtcatcagtcaataaatatttttaagcytcgttataatattatgggaccatctcatatatctttggtcgcttgttgaccaaaacatcattacgctgtgcatggctgtaattgcagctaaagcattgctgtccaaattaactcaaggcgttgggtgtgtagtacatgctcattgtgcagacgagacctgtgcaccattagcaccatcaggtcctgcagtcagtggatttcttaaagttcaatacgttcttttaaaaagtgaaataagtattctgaaagcatttttaacgaaaccacttctaagttgggaagcaagaaaatagataaaacatgacaataattatgacaaggtaacaacagaataagtatatgaggataaatgtatatattatattggaatatgaagagccctaagttgttgccagagtgaacctattcacttatcatattgatcatctgggctcccacccctcttatgattagtaatagagcagaaaagtcctcaacaacctgactcagcctgttcttccacctaagcccctgcacgcactgcacgcactccatggtccagtcacaccaagccgcagatgcttttcctcatayttgayttactgttttatctgttgaccttttttacaatttttgtgcctaccctaagcctttctcctacttgctrtacctggtacacttacctcctcttaagaaatgtttccctgttcccactatagtcattagtgatgtggtatttctggttttcctcctgggtatgaggtaagattgcaagtttatgatgtgagttgctttgatcaatagcaggtggaaggaagcgaggtgtgttactgactcgtggaagtttttaataggcgacgctcactttcccacgctcccatcccctgctgtggtagccagtgctgttctgcatggtgtttggtcttgcattcctgagtgagaacaaggtagaggaaggagactcctcagaactttatgcatgtggacagtgagtgaaaaacaaatcctgtgtgttttcagttactaagatcctgggatagtttattatctcagcaacacttagccctgacggactgacacatgcccctcttatgagcttctctttcctcagtgttattgtaattgttggtagcatttttgagaacttactgtgccctagactgtgtgcctggtgctttatttctgtktttttttttttttttcgcttgttcgtaatgttaataatttgctcaaggtcagactgtgtgactcctaatgactgcgctctccccagctcccttgcctgcgttactcaacaaacatccccacgcacctgctgcgtgcccagctctgtactaggtctgaggatcaaaagatgaatcagaaataatccctgtccatgagaaaataaggatattatagggagaaacagaaattcaagccagtgcgtatgatgacatattaataaaggttgtacagcacagtgggtgctagaaagatttagaatcaaaacctgtctctttcattatgtggtcttggacaagtgtctctctccccactctccaacctttctgacttctattccaaaaatggggacatttgtaacttttataagatgtcgatggccacctacctgaaaacagtagtagcattgcatgcgccgaagcatttgaagccacaggcactcaacagcctgccacaaatgacagtttgtgtgtggtttccgtgttgcttcagtggaagattcaccgagagcacaaaggaaggagccagaaacttgcttgagggaaaaggagcagaaaagttatatggaggaggaggtggtgtttgacttgagttcttaaacagaagtaattttaactctgattggaggacaagggcaatacattccaggataagggaaatagcatgaacaaactgtgaaacattgggaactacaggaaacttatttttagaacagtgcagagcacagttggagaaatggtgggagaagtgctgtgcaggtgccacgggcagtcccagccccctgaatgcgactgcacaggccattcggaacgagtggaagggctcattctgagctgtgacttgttggttttttttgtttgtttgttttttgttttgttttttaatatgggttctggaaacacggaagcaatgtcaaggattgccaggagtcacagatgaaaggaaggaagccaactggtggaccgctgtagagagagatgatgaaggcttaaattcaggcagaggagatggaaagagaacaggtatgagcaaaatgaagcaatgaaatttgataaagacatattccggtggtaaaatgtaaagagtgaggcaaagaagggggttcaggagagctaccacacttctaatgtggtgactggagggttgtttgtaatagagcttgagartagagaaagtttatttttttrktttttgttttttaactgtcaagttttctgtgtaggaattattcactttmaaaactcaaacaatgtggaaaatcttcaaagtaagctaagaaattccactacccacatatgaccctgttagcttttttcttctacactgaaakccacatgtatgtgtaatgatcatcttaaacagaatggtacctttagcagcttccttttgtatttagtaacatagcgcaagcagccctccagctttccactgaagtacctaagagatctgctttacgccttagtgtaaaaggataagtagtatcccattccatgtaggatgtttccggttatttctttatatctacttttacaagtaatgtcatccaggacactcttgtgtagctatctctgcatgcttttgacagtatagtaacacttttttttttttttttaacaaagagagtaagtgcagtcttgtgcatgtagcttctcaggtagcttgtggacactcacgtgggcatgtcacctactcagctggaccagaaggggctgatgtcagctagtcagctggaccagaaggatgaactggagctgagtatttgtggggtatcaaaatgtgaatggtactcgaaactatcgccaatgattcacttattgaaagtatttattggtgggggtctgctgtttgccaggcgccgtattatccttggggatacaatggtccgtaacctcccagcgctttactacagacccatgaagacgaatgaatagtcataaacaaatttactgttaagagtttactgataaaatacatttgctgataaaggttacaaatgagaagaaatgggtgttaggatggaacctaatttttagacttggtggcagaggaaggccttcctatttctttgttatatatttttcttggctaatcctaaatattttctttatgtacatatcttgattgttacactttctatgtgtcctagaaggagcatggtttgtaagcattgacttaaacaagtggaaatagctccagtttgcatgatcagtcccatggttttagttcctgcttcagcaaattgagggtgggtattcagttgttgcatataccaccttttattcatccgttccctagtggataaatatttaagttagtgccaattttttgttgttgtaaaaaataccaacttcagaaataacacatacgtcattgaacttgccccctttctctccattttcaataccattaggggtcattgtgcccatgactgtggtgaagtcgctctgcgcataggacacagagcatgggccctccccagagtcctcactgggacgctgctcccctcccagattctctgccaggggctttcatctgagccacttaggagagacttaaaggtacctcaggaaataacagtgtatcttaagaaccgaatgctttcgggaagacttccctctgttactcagaagccttttatatagctatttcctatgttttcactacagtgcctttcagctacaaaatgagttgttagaagtgtcatttttgctgttaaatattatttctgtgattctatgttttcactgtttcctgcttactaacatgtgtgttacagtggccttgaccttatatcactaaaggacagtgctaaaataacgataaagcaccagtgagattttaaggagttgctaggggatacaactgcagacgtctcttgcaggggttcctcaacatggctggatggcagaattgtatggaggagcttcatggcccctattgtacgtttactcatgcagagtctttggacaatatattttctaaaagatgcccgtggcttgccaaagttggtttcagatatatttgaaaaggaggtgcatcattagtaactacttttgctattttttaaaaaataaaatttatttttacttcttattttccctcttctaaaatttaacctaattttgctttcgtattgtggggaaaagaactctgatgttacatgaagaaaatgtaatacaaactaggttagattttatgtagtctgtctagcatagaacaataattattgccaacaggacagaatgggatgaaatgttgtggtggtagatgaggctcttcagtgataggactctttggttttaaggactttgagaggtggccgtcttcttataaactatcatcaagtaggtaggcatgaggtgtgagaccctcctgagcctcacacctgtacaaggtatgatttaggaccactggatttttgtgggacttgatctttttatcatatgggtgccctgtttatggaaaataatacaaaagtacctttttcaaatttcacaaaaatgtgataatgtgaactcatcaccgaggtcattcccaggaccttggaaggggcctgtacacatgctgggccctgaaacttcatggtatatctgcttcatggtatatagcttcatggtatatctgcctattctcctgcccagaaatgttgttcccgctcagtttctttggtgactgaaattgcacatgtggaagggcactctggtgctacatttctttctctagaatcgaagttccccgagagagaccgaagggagacatgtggattattccccagagtccactcacacgggctggtagctgcctcctagggctcttggttgagaaagaggcatgagaaagattggggtgggccaaggcaggattagaactaggaagacaggagggagacagtggggatcagcggggcttgtttcctgttgctgccrtttgttacctgtgcctgaggttgcagcgtgccttacttgattgatttgtggcctcactttctgctgcyactgtccaagcccatggagaatgctgaggctggggactagtgaaaacagaaatggacagtgggacagggaagaaaagggctgaatgaaaagactgacccaaggacaaacttatcttattaacctgttttgcttagtatatcctgatcttagtctctgttttaaaatatattggttacaaaaaggatttttcccrtggctctttgtcatctggcatagaacaataattacggccaacagggcagggtggkatgagatgttgcgktggtagatgaggctcttctgttatgcgactctttatatttttagggactttgagaggaggctatgtaattataaactataattaattaattagatakgtatgagggaccctaatgattctttaatgtaccyaagagcaaataaatgaaaacttcagaaagcagaagagaacctccctgactaatctatgtgaatttcgagaaacactaagtagttacctgttagcaagttcttaacacgaaaacttcagggggctgtggcatctaaagattaggaaatcttgaaaataattactcttgtgaaaggaatttaaaggacagggcaattggatcttaaaagtatgggagtctaccaattctttcatttctctacctcatagggctggtataagtatttcatattacaatgctgctaagtcacataaaacacggcatagtacacagcaggcactgaataaatgttagcaaattatgtgtaatataaaactgtaaaaaatgtaattgttatatttgggtagctagagaaaaaaatacttcagtcatatcatattagtccattttcacactgctgataaagacatacccgagactgggaagaaagagaggtttaattggactttcagttccacgtgrctgrggaggcctcagaatcatggcaggaggtgaaagacacttcttacatggtggcagcaaaaggaaaaatgaggaagaagcaaaagtggaaacccctggtaacccatcagatttcatgagacttattctctatcaygagagtagcacgggaaagaccaactcccatgattcaattaccacccccctgggtcccacccacaaacttgggaattctgggagatacaattcaagttgagatttgggtggggacgtagccaaaccatgtaacatatttaaacctttgaccactggacttagctaatcttgcttccaacatcagatatgtttaaagaatttggtgcttatttgtgagtcaggaatggagggaagagtgcaggaacaatttttgaaaataccactgtctgacttgatacaatcatgtcagagtagttaaaaggagtttagcaggtccttcaggtcctgctgagggcaattaytttgtgtccttgacaaagcagtctcaaggccrttatacaacacatactgtgggagtgaaaggctgatgaggaaagctgcaaatgtaaatctgccggtagggaagatcactgagacacagagagaaacatcaagtgaggaagtcaatgccggaaaggtgactagatgctgctggggttaaagggagagaggaagaggcttggctgtgcaacagtgaacctggaagaaatatatgctaccctggacgtgaaaggacacgtcagaacatttacatgtgtatgtgtatgtgcgtgcrcagccacacacacacaatttggtttcttgaacagaaagaagcaagcgtcctcaaaagacaacccactttctcattgggttcagttggaactctgagcttcaaacctgactttacagagaactcattcactccattttcctggacaatcgtccttcagagccctgccctggctggccactctccctctcccgggtggtaagcrtcttggaagggctgcaggctgttttggcagtgtgtccccagcatgcagccctgaaaaacgagtgcgtctttctgtggtttgtgggatcctcggaggaggagtgaaggtgattataatgtgtcagattctcatttggggtgggaagtgttgatttgacagagatgaaagcctttggctggggaggggtgtgtgaggtgcrgtgtggcgaggattccccsgtcggactgtgatgtcagtggccccggagggaacagcttgcactcagccttgagcagttggaatctgttgggagggcagttggccaatcctaggcctgagagttgggcaatgggagaccccatcagtgtgtcacctttgcctccgggtagaaagaaagcaatctaaggatgtgtgcaagactgcgttcctaggcgagtctgtgtaactgatgccaaaccggggaggaaggctgtggaggaggccgtggaggcccgctcaccagctctgtactgttggtcagagacgcactcctgctcctgcctgtgacccagcagttgacggttaactggtatggcaacattatatggtgaggagggtgcttgcttgctcacatgataataacaaaaatatttattaaattcttactgttacgaggtattctgttaagcctgtttaaagaccctgaggctgtctaagaagttttatgatactaaaatgtaattgaggcataccttatattttcctaattgtcctgggttaagtgatggcaacagtgactctaggggttcctttgacttttcattactccaagaagtcagaagagagactggtgagaaaatgaaaactaacactgaaatgtatcagaaggaagcttggaaagggtagtactgaagaagagaaaactatacgggcactctgcctttgtgcaacagagaaagagtcatacctattgcgagggagtgagttgaattgagcaaggactgtgcataaaggtttgtttgccttataaaggtgaaggcttacgttttgtgtctgcttctttgtgttctttgtgtttgcttgttttagtatgcttttgttttcagcaaagcatttactatttgccagaaatgctggcagtcacagtagtggaggagttggcatgcaattcattaggattatttcctttaaaattccttcacaaccgtcttagggcaattctgaaattacctttgggagatagattagaatatatgagaatgtctagcttacagttaaggctgatctggaagtactaatagtaggacagcttctcacctcttctgaaggactggagaggcagtctgcgtagggtagaaaagagaaaagagagcattccatagagagaactggacatgtacagggagctagaagtcctgaccccgtcccctcatcttgcagaaggcaggtccatagccagcctcccagcggctggcaagagcaggccctctaggtcccagtgctgggctattagtttaaaattttcctaatttatttgaaaatttataagagtaatggatttttttctttgaaaattagtttgtgattctacctattgtatgagcttaatagaagaacccaaggaaccatttattaattgccgtgttccagatggcatattaagaatttgatgtgcattatctttattagtcttcatgataatccttataagattgatactattattatcaccattttacagatctgagccttaggataagtccattgcccaaggtcacacarcaggggccacaccatttgtaccctgattataaaggaaggtatgaactcccattttcatgatatggagcaacttctgtacaagtgttttaagtttggaaaattttaaagacagttttgctaaaaatgcctttcctttcttctctttttgaaagaaatcttgacaataaattgcttatgtgttgcatgtgactcttaaacattctgtttttaagatctctttgatattgttggtgctctctctctctaagatctgttaataagaagaaaagaaattaaatactattagtgaagtatacttccaaactttgtaacaataatttccaccattctcagatatacttaaataactgctaaaatgtatgttggtattgtaaaacctaatyggcaaactgacaggtttggggtttttttcccctcaacaaaaaagtaagtggaaaaagactctcttaaaattagagttgtgagtggtttgttggcttgactcgtggcattgagtgcctcaggtgagcagagaccaaagcgtgacctgtgctagtggagctcttgttgccctgtttcgttcacaaggaggcaagttctacttcagtcttrcatgtgggtcacacacagctgacctcaggttgccatttcttttcttttccattttaccagcctcacagtcttttttctgttaccttccatttacaatccattatatataagtgggacttaagggcctatgaaggacacaacaaaaactgtgagtaaacctggtatcatccggcttttctcctgtctgctgcagtttgatgttgctgagatcttgtscacagctgttaagctatctggaaaagaactaactggaacaygtaaagtagtcattccgtttctaaagtgggtttgtttttttctgtcctataaaatgcacgtaagtctttgtttatgtgctacgtttggacatatttgagggagtrtttccttctatttattggtcgcattaatatcatacatatgtcactttaaccatcaacccagatagcctaagggagaaaacatttttgyggccaaaacctgagttttacataggaaaatgcttgggtgtaaatacagccaaagactcattggcttacttttctacatacgatttgagaattgagatatctttttgactaattctccattaaaacctgatttggcttttagtactctatattagaagaaagtgactattaagaaacttaatccaccaggataattttcttaatccatggtctgtatgtgtgggtttatcatgtatttatttatgtaacaggtatcgggtgtctactatgtgccaagaacttttttaggaattgggaatacagcagtgaatgaatagattaaaataaaatcactttcctccaggatacctgcattaaaggagaggaggggtaagacagaaataaatcaggaaaatatgtggtgtgtcagattgttgataagcactatggagaaaaaggagtgaagggcagttaccattttaattaacatgggcagggaaggctgcaccaagtaggtaaaatttgagcaaaaatttagagcaggcagacagctggtaacaagtttcaagcagaaggaagaaagagcaattgcaaaaatttagtctcagaatatggctggcatatttggaggcactgcaaggcggccatgtcagtagaggaggagagcaacgttctcctaggatattcaggaccccatgaaggattttgtctgctctctgagtaagacaggaagaaactgaagagtttgtttgtttattcacttacatattttttttgtgtgtgtgtgacatggtctcactctgttgcctaggctgagtgcagtggtacaatcatggctacctgcagcctccacctcatgggctcaagcagtcctcccacctcagcctctcaagtagttgggactacaggtgtgtgccaccacacccagctaattttttaaattttttgtagagaaggggtcttgctatgttgcccagcatggtctggaactgctggactcaggtgatcctctcacctcagccaccagaggtgctgggattacaggtataaacygctgcacctggttcattgaagagttttaagcagataagtgacctgatctgacttcctaagatcactgtggctactgtattgagaaccgactgtaggagaaaaagggcagacgcagggagacgattgaggaggccagtggccaaaccaggcaagggctggtggtggctggggccgtggtggacacagtagactggatgagagatgaaaggattgcggatactttttcagggtacagccaacagtatttcctgatggattagctataaggtgggagagaaagatgccaatgatggcttcagggtttcagccttgatggaataatggaggatcatcaggtttaggaagaaaatctggagtctgccagatgtttccaccataaargtatcgtttctcctttgtgatgagtaatccatggaatgatactttgagatcttgtgaatataatatttctcaacactgtattaggtgtttggttttggccatttctgtggtctgmatatttgtcctccccagccccaaaattcatatgttgaacataatcaccaaggtagatggtattagaatgtggggcctttgggaggtggtcaggtcatgagggctgtacccctgagaatgggattaattaatgctctgataagaggccccmaaatgctgctttccccttcagccatgtgcagacacataggagggctcatctatgaagaaggggccttcactagacgttgagtctactggtgctttgatcttggacttccagccttcagaamtgtgaaaaataagcttctgttgttcctagattatccagtctaaggtgttttgttacagcctgaatggaccaagacagacgtattagttggagatatggagtaggtttttggctatattatgacacaagtctgggtgtaagttgattaaaataaggactgattttcatttgaggccctgataatggaacatgggcaaacatttcatgggtatgtcgcatgttcaatttcattcatttgaatggactagaacaatgaaagataataatttaattttgattgttctacaggcctgtctttattaactttgcagatgtccatctgtgtgataattgagccagttttcttaactctataatatagccaaaggcttcgagccatcttttctgtaacagtgatgttgcccagctttggtgggcaggtggcaggttagtttgactcccatgagaggactaatccagagacaagtargctagcaaaggatggactgaggctacggcaggtgagctgcagggctggcccctgcagctggctagggcttaagggagccatttccacatggctggacctgggccttaaacccagtgatggctgggattgccaggctcctgcagtccaaagaatctgggtttcagaattgactcactttgttcaaattccagctttgccagtcactagatacgtgactttgacaaagttacttctctgaacttcagtttcttcacctgtagattgcggataatcataattcatgatctgatcttgttcaccacaccagacttaacctcctgccatccttttaagtgtactttttaacatgcacatgagtatatggttctttggcttggcacaaattaccattgcgttgcatgtcctttctatttttggtgatgctaaatttgctcactaggttcagatggagtctgccagatgtctccaccataaaggtatcatttctcctttgtgatgagtaatccatggaaygatactttgagatcttgtgaatataatatttctcaacaccgtatcactcagtggttttactattcattgatgatctttgcctgaattattgctttggggcttataaaatgatgatttttgaatgaattctactattccatctatatttatagcttgaattcttctgagagaaaagaacttccctcactctgctcccacttttttgttctgcttcactttgggtatcattaaggactcgtggattccttctctattcagtattataatatattaccatttctattcttttttgtacttaatgtgttataatctattgctgtatttattatttccgatattcaaactacccagatttggccagtatgckttctttcaaacattttcttactatatttcatatgtctttattaacctcagaaacacttgctctcttggcacaacatttcccttatttactttgtatgttcctatttcagacctggaatcagccacttctccaaggaactctggttctgttcagtgggaaatggtatttagtagccaagacctgagcactagatgtgctcattgcaacttggatgttattccttctaggcccttacagtggatacagctaggaaatgtatatttaaatgatgagttataatgctatctccaattcaaatccagtaccataggattcttcctaatttttgtaaaacaatattatacaaagtaattggcatagaaagtaattattagaaagcttatacattataggttagtctgattaagaatgttgtcatatggtgcaggttttaatattggttatttagctcacttacaataatttatcttgtgtactatgcctgaacaaggaatctgagcatagttttcagtcttcggaattttgactggatttggcatccttaaygtactcagaatgacctwcatacttcataatattagtaagtgtccttacaagatggatagtttagaacatcatcatttaaaaatatctcagcaagttataataaaatgtttttattataaaacataaaggtttactagaaagtctttaaataaattgaaatgtaactaatgtaatgtctcagtattaggtatagattttgctgatggaatggtcrgtatatgcaattttcattgatggctccttttttaggtttattgtagtaccccgtatttgtgctgcttttgatcatatcagaatactgactcatgccatcaactttgttagccaggacattttgaactttttttttcccattatacttttaagttctgggatacatgtgcagaacgtgcaggtttgttatataggtatacatgtaccttggtggtttgcagcacccatcaaccggtcatctacattaggtatttctcctaatgctatctcccttaacccccaccccatgacaggccccggtgtgtgatgttcccctccctgtgtccatgcattctcattgttcagttcccacctatgagtgagaacatgcagtgtttcgttttctgttcctgtgttagtttgctgagaatgatggtttccagtttcatccatgtccctgccaaggacatgaactcacccttttttatggctgcatagtattccgtggtgtgtatgtgccacattttctttatccagtctatcattgatggacatttggtttggttccaagtctttgctattgtgaacagtgccgcaataaacatacatgtgcatgtgtctttatagcagcatgatttataatcctttgggtatatacccagtaatgggatggctgagtcaaatggtatttctagttctagatccctgaggaattgccacactgacttccacaatggttgaactagtttaaagtcccaccaacagtgtaaaagtgttcctatttctccatatcctctccagcacctgttgtttcctgactttttaatgatggccattttaactggtgtgagatgatatctcattgtggttttgatttgcatttctctaatgacgagtgatgctgggcttttttttcatatgtttgttggccacataaatgttttcttttgagaattgtctgtttatatcctttgcccactttttgatggtggtgtttttttctcgtaaatttgtttaaattccttgtagattctggatattagccctttgtcagatggacagattgcaaaacttttctcccattctgtaggttgcctcttaactccgatgatagtttcttttgctgagcagaagctctttagtttaattagatcccatttgtcaattttggcttttattgccattgcttttggtgttttaatcatgaagtcttagcttatgcctatgtcctgaatggtattgcctaggttttcttctagggtttgtatggttttaggtcttacttttaagtctttaatccatcttgagttaatttttgtataaagtataaggaaagtctcagttttctgcatatggctagccagttttccctacaccatttattaaataaggaatcctttccccawtgcttgtttttgtcaggtttgtcaaagatcagatggttgtagatgtgtggcgttatttctgaggcctctgttctgttccattggtctatatatatctgttttggtatcagtaccatgctgttttggttactatagcgttgtagtatagtttgaagtcagggaacgtgatgcctccagcttagcacattttaaacttttaagtttatcatatatatgtaaggatttgaattaaaaccaatgctgcagggagtgtttttcatatgctactatagcatttttgtctatttgtgttttaaaatgggtatttggttttctgggatggacatataatagagccttttaaataaaaagcattgatgaatgaataggtcggctttatggagttttaagtttctttcttcttgtaaacagcatagaaccccattcaaggcaatgtcaggtagattatatccttaatttatattgggctaaaatacattcaatagctaatttaacttaaaaaaacaaaaaagcaaaaaacaacacacatgttttgaagagttgtttaagctcttcattttgggtgtcccaagtaggaggtgaacttgacattgccttttggcaaagactggagagcagggcaggaccagtgagtaatgcttgtggaggttcaaatctctggtgacccattccatacagctgtggttcttttaattgggagacttgggttttgaagggaagatggcagccgggactgacagattttacaatagtagagcagagtaacagcaaagccaacaaataatttatttattgacaccaactatacaatcatgctaatttcattccaagtgcagaacttatacctcattccagtttctgttttcaaagaataacagaagcacaatgaaaatacttgtcagagaaaattcttaaaatccacttggctacttttttttgctgtgaaagaaaaagccccctttgtgccagccattaggacttatagatacggctgcaacacaattcacttttttccatgttaccaaatttacaatgaattacacatgatcttttgatttcctgtctttcatgccatcctatgctcctttttttcccaataaaaatacctcttctcttgctttgctgttcttatgatccaaatgactaatacaatagaatgagaaagtatgtgggcaaagcaactccgtctcattttctcatttattttgatttaaatactttgttagctgaggggaaattacatacatatctatgatgtcatcatggttgttgtacttgagttaaatgtctaattttttttttctatttttgagacagagtctcgctctgtcgcccaggctggacttcagtggcgtgatctcggctcactgcaagctccgcctcccgggttcatgccattctcctgcctcagcctcctgagtagctgggactacaggcgcccgccaccatgcccggcttattttttgtatttttagtagagacggggtttcaccgtgttagccaggatggtctcgatctgctgatctcgtgatccacccgcctcggcctcgcaaacggctgagattacaggcgtgagccactgtgcctgaccatcttaagttgttttttagtgtctacccaaaacagattgtaaatttggaattacatgaagtacaaaggaggctacagttttgtacatggcacataataagcactcaaaaggtgtttgttgggtcaaaatgaaaagyacatactctttatgtttgctgtgatttgcattatggttcaacttgattcagtatgtatttctactcttgtgactgcaagcatgactctggaagcagacgcctgggttttaattgagctttgccacagactarctgtgtggccagctatttaacctccctctgcgtcagttccatcctctaaaatggagggaataatactaattcttaccatatagaatttttgtgaaaaacacatgtgactacccaatgagtattagctcttatttatgactactttcttgtaaatcagtrtwacctgccctctagattctatcccggaascttttctagtcttcataaacactcctgaaatgtttttgccaataactttcctcaacctcagatgtgtacaactgaaaatccaaatttttcaagtgacattcagaagcatctgctgtcctttgtactttttatctcaatttgtgataaaaactgaaataatatagtatgcatatttaaacttaacagtttgccttttgaagtctttttcttaatgatttacattttctttaaatgaaatttatawttaaaggtagagttttaaatgtatctgaattttttttgttttttagtggctgattggttagacttgtttaaaatctgttcccttgctttctaacttgttacttaacctgcagttcataccatatgcagataagttatttagcctggaatatagacaatttcagtcggtgacatttttttcaaatttataatttttctcatacatccatttktctttcttcccttcctccaggaaggcctcctttccttccttctttccatccattcaaaaataatctctatgccagggactgttatgtgtctgaagacacatgtaattaatttaaaacatgtgaatcaatgaatacctatgtactcccaaaccagcctgagaaaatattaacttgattttcaaagtttaaaaaaaggttctagtgttcattttcatttttgattgtctttattttacttaaagctaaatgaaataataaagaaataaaacattttttaaagttttaaccaatgcattttaaatataaagtaataaatctttaagagaacaactaaaattggggaaatttcatattctgtattccacaagcatgtggaggccatccatgctgagtgctgtggtgaacacagcaggctgcrtgggaccttatacagctgatactcattgtcatttcaagtcattttacccaattaacttttcccctgtaccttgcttgtaaacagaattggaaactatctaaaggcctatagtactttgcatgctctgtatgtttgcaattgatgaaattttattttttggacttcagcagtttgtacagacatgtacaagtgagcttgtatatgttggcaatatattaatctgtgttaaatatgttagttttgtggccatggctgatttgaaaagaactggtttcttaatgctttcattgggtggtagaatatttggaaaataaagatacttacagagacttttatgaatatttattttaaatatttgttgagtacttcctgtgtgttagggctatgctagagtcttaacattaattacctcatttaacattcacaaaaactgcatagtgtaggtagggaaattgtccagagagaggttacattaataagtggtggattagagattcaagctcacatctgtcttctcccagaacccatgttttcttcactgtactagtatttgagatgtggatttcatgaactatgacatcatattttcttaaaatggcagaataatgtaggttttccctctttttatggaatatatctgaaagtactgacttgatagtaggggacaaagtaaaatcataaagctaactttaggctgggagtggtggctcactgtaatcccagcactttgttaggccaaggcaggcagatcacctgaggtcgggagttcgagaccagcctgaccaacatggtgaaaccccatctccactaaaaatacaaaaattagccgggcatggtggcacatgactgtaatcccagctactctagaggctgaggcaggagaattgcttgaacctaggaggtggaggttgcagtgagccgagatcatgccattgcactccagcctgggcaaaaagagcaaaactccatctcaaaaaaaaaaaaaaaaaaagaaaaaaagaaaaaaaaatctcactttatttccctcactctccagcagtttactaccacccccaagataatttttttctaatattaagatgggaaaggagagtattttcacctagtgtcaattttaagaataacttagtttgaaaggtatagacatatagttatacataccatttttttagagcggtatttaccagcattataaattaccttaagaacaaaagatacatttcttattgatgataaagaaaatacaaaggctaatactggttaaaatagaatagagtcatctagttttattggagtggtaacaaaaacaaaatttaaagcaarcatcgtaatgaatcttgctttggttgctagatctctaagccgtccataccaatgacagtcatctgtcagcagtgttttctgaatgtttctgtgtgcagggacctttatgaggtgtttaacctcatttaasctctgtggtttgcagcttgaattttaaaaggccaaaaataatggttgttctttcctggaagacatatgaaaattatrtgttgcatttttttttaacagtaatttcccaaagtccttataccttagttgttctatcctatcaatcaggtaaataggaaaaaaaattcatatctgacatttagagaaatcccccaaatattgggtgggtctggaatttgctaatcactaggtctcttctgcatctaacttaatgaaacatgcagtgatttaattttctatcagtacttctaatgttaataagatgaaacaatgaattaaatgagtaattcctttgtctgtttagggaatacatgctaaaattttacagcaaaaataacttacccccatctaggacccaagaacctaaggaaattactcattttgttttccgtaaattgctgctgtgcatgagacacgtattaaatttcaattcaagagctgggttttggtacgtaactttctccttgtatcgttctaattgctttctccctgtatatactttcaaaaagtttatgttcctcccgtctttacttctttctttcattcctccacccacatattctgtgcattgacctgttccatggatatttactgtcttctttgttccacatgcaggtgatacgatgagaacaaacaggacaaaatctctgcccktcagaaactcacattccacgtgccattctactctctccttttccacttcccctgcgctcatcctttagagttggtcaccctctgtgatggctggtgacatcccccagagcatgaatggatgccccacagtttgctaggtgctggttccaaaggtgctgccacctgaagttttgcttgcatgctgattctccaccctcagattttaagacaaagtaccccaagattgtcttttgtcattagctcagcatttttttttcaaggcaaatataaaagagttatataagaaagactgctgtagataacattaccgagttctagatgttggcttccaaccaaatttcaaatcaaggaagcgagttggtatttcaacctctgaagccaactaacattcttatgaaaagtcacttaaagtattaagaatcatggattttggtggcttctagacgttacttgtggttttcttagtaaactacaatatggtagtatgatttagaatattatttctatataacttcaggggtgtaaactatcatttggcccttgtggatattattaacatttttaattagaggtttgcttttcttcttttaggccttttgatrtatagtatcagttctcttctgggacatgactatttgccccacctggtcagatctctaagaaaatggcaaaatgggaaaggaaatattgaagagtaatgggtttcatattttgtggcatagtgggaaggaggacatcttaactattggtgtctgaataagaattcaattttaaaaactagttttacttgtgcagtaacttaatggaaacatgtactatctcattctttctctataatattatttgattctcattatattgttgacctgaaggaggaagttgaggcacaaaatataattttaaaaagtttacttgagctaaggtgagaggacagccatctggaagactgagacccaggtcaccttggatatgagctctgttcggcctttgttagaagcaggttttccaaagcaaaaggggggcagggagtgggctgataactgctgtttgtcaggaattcccgttggttagacaaataagattgattagtgattgactatacattggtgaactgtggggtatggggtatggtgtccagtgagtggccttgcttggttagttgatagctgcttgtggcggcagctggtcaagagtccacatagcaagcagcttcaagagctgattacttagcgcaagggggggatgttggatgcgactgctgcctcactctcatgcctctgtgggtctgataatttacaacaggctcgcattcctcagataaaatttcttttcttactatgttttattgttaagcacctatattagtttcctgtggctgctctaacaaatgccacaaacgttgtggcttaaaacaacagaagtgcattctctcatcattctggagaagagaagtctggaatcagggtattggcagggctgcacaccctccagaggctcgaagggagagtcctttcctgcctattccagcttctggtggctccaggcattccttggcttgtggcagcatcattctattctctgcctctattttcacatccccttttcctctgtgcacttctctctcaaaaattcctctgcctccctcttttaaggatacrtgtgattgcacgtaggtccccctaagattatcaaggataatttccttaaagtcaatggactgtgactgctaatcatgtctacaaaataccttcacagcaacaccttgtttgtatttgaatgagttgctgggaatattagactagtcaagttcccacataaaactggccatcaccccctgtaaacttggcactcatatacttcttcttaaactatgactaatctccaaataaagacacccataaagtcatatttccacaggacatgatgcagctatcttacttacaaccaaaaatgtgttaaccctttccccagaagaggatgcaaaagttcctggttggttttcactgttttccttaacttcctggaacttaaataccatgatgtaaagttcaatgttattcatgcatcttatgttagatgataagggataagagcaggaagaatgcaaagattcttgcttaaaaatgtgtatacccacatactcaataacaaaataagaaatactcataaacattgaagcccttgtttctgaaactgactgcctggtcctagatagtgtttatagctactttcttccattactcattccatattccctttgccctctgggagcaccacagcctgttgctcagggttctttgcctgtagggtgacccagaccctcattcctgaggggcctgggtcattaacagtcctgcctgaaaggggttgttggttttccattgacttcagtcacagggcatggtggcagatgcagatgccctaaggggtattctgcattccagacatgttcttcctaaccttctttttgtagccgaaaagcaaccaggtgtccaggtggttgattaggacaaggggccaaacaaaaaggaataactaaggctttgttcacttgctgggataagcaagagacacaaaatggtgctggctccccagaggtgctggctgtcatctgcagaatggcactggtgagagtcaggtggatcagctcagatgaggggtgcatttcactgctgggaagtctcaaacaaaaggctcctgcgtctttatgggcctgttggctgggggaagggctaggtatgggaaagtaccaaatcaaagggaagaaaagtacctcctccaggccccccagtaagaaggcggctgaatggaggtgcctggacaaggaaggaacatatgtgtatgagcatgactggcccaggggtcagggaagcctgagtcctcaactgcarctccttccagaaaactgcagtgcactgactgtgcaccaagcatgttgtgtggtggggtcagcttttctccatgagggctgccaggcacaactttgtaactgcctctattggacctgaaagatcacacagacgatttgggcctggagccagaatacccgatagtagcagctccatttcctcctggcaatcaggatcaatcaccccagccagtactttgcctattgattcagaggcctgaggagcccaaagtgactgggtggcagtctcaacttccagttcattggagccattgtgtcttctggtagaaacattcctccctttgaagctaaggacgagcagagcataaggttgtgggaacaggaagtgaacattttagtagtaaatcaccaggagtaatattaaggggtgccattcctattcctccccacccttgattcctggacccatgaatcctggctatgggagaaacggtatcatacattagacactagtttaggacatatacaatctcccacagaacattgccccagcsctgcaagatatcccacctacctgctgctgagacttcaaataccccttttcttttctgtcaagccagctgcttcaggatatggggacatggtttgaacagtgaattccatgatcgtgggtccactgtcatacctcatttgctgtgaagtaagttccttgattagaaggaatgctgtgtggaataccttgaagttatatcatttagggctcacttggataatacagggtaaactcctcctctcaagatctttaactgtaatctcatcttttgccataaggcaacattctacaggttccagggattggatgtgggtatcttttgggaagtgatttttggcctcctggagtatctgactgttttacttgtaaactttggagaagcagtaagactgaagaggtagagaatatacgttaaagaggatctttaggcacactaatttgttatttgttttgaaacatagctcaggtacacatttgctatgtaaactttggcaagtgacctaacttcttaatcctctttcctcttctgtaaaatgaggatagtaagaataatttatctggatcattttgaagattaaatgatttagtaaatggaaaatgattagtatactgcccccgcacatagtaggcattcaacaaattcagactaatgctatcataagcagctggctcagaaaagctttgcatcgaacaagcagctgtggaggccggtacttggtggttgacacatatggatgtgttttgtttgtatttataaagrttttgagttatttgccgcacgaagaaatactggtaagacacacaggaaaacatacttgtgtgttttcttggggagaaatctggtgagaatgagacttctcaatatatatattttatattgttttaatttttgaatgtgtaacaatttgaaaaggacaactaagtaaagaacttcaagagataaaagttcgtaaatagagagtcatctatactygtcttgattaaaaaacaagacaagstagtaaaaatccccaaagagtaaaacctgtttttttttttgtttgttctcatgacccttgaatccatggtgtttcttttggtgtatagttattttttttcctttgagttgagtcaaatttttatattcagttttttttttcttaacagtcttccacttaaatttaaatttcagtggttttttcattgtgcatttaaacataggtagatttattttatttagacttgacaattagatcatttgatgtgaacaactgtaccttagaaaaatgtacttaatttgaaatacagtcctgttattaaatcgacatagaaatcatatgcttgtaatgatttgcttctgcatacttaagaagctctcactgtacagtttttatttttccattggttgtgacttttgatttttgggccctgtatttccacttacctcattaagctccatagtgactactcaaaacagcctacatagagaaatatgctgttatggtgaatatctgccttcaaatattagcactgtacttctgtatagagctgtgtatttttgaaaaaattcagtttgtttaagcttcataaaagccctgggaaataggtgggtcaggcataactaatgctatttatcttcaactgttcttattgtctacctgcttaagtaaaagcggggaccatggtcttgtcatccttagatttctagtatatagcatgttgttagtgttcaaaaatagttactgaatatacaaataagcatatagttggataaagagataaggaaaatcactgaaaccacatttggtggcaagtaaatgaaataatcaaaactagaaaccccattgttagacttctagtccaaatgttcctctcagaacaactgactgattcatagtctctgctttaaatatgagatcagtttagggctactcaaatcctttgtgccaaagagaatatattaatccccagtccaagtaggatttagcacttttgtccaccagaataatcaaagcaaaattctcaaattgtaaaggcctcagaaacacatgatgagaaattgttttgttctgtttatcatacttttaagcaaaatgcttatgcatctgccttagtgaatttgggctgctccaacaagtaccacagactgggtgacttttaaacatttatttctcacagttctgggggctgggaagtcagagaccatggtgctggctgatgcagttcctggggagggccctctccctggttgacagatggctgctttcttacaagagaaatgttttgagagataagtcatctctttctcatttcttataagggcatgaatctctctctcagctcttgtgagggcactaatcctgtcagtgagggctctactctcatgacctaattacctcccaaggaccctgcctccaaatgccactgcactgaggatcaaggcttcaacatatgaattttggggggacacattctgtccatagcactgttcttctgtcaaagcatggtgaggttctaattagtattaaatggtctaaagtattcttttggaaaggaaagatttaaattaacacctgaatatttttatgagtggtaaagttagaattgaaactgttgacaggttttcttacctcttattttctccatggtgtcaccataatggatctaaaaaggaaattaatatttatttttatcaccaatttttctaacttaatgtgctaaaaattatataatttaacaagtcaaaaattgaacttaccatcttctttctcactgggtaggagacttaccatcttctttctcattgggttggagacttaccatcttctttctcatcgggtaggagacttaccatcttctttctcttctcatcgggtaggagacttaccatcttctttctcgttgggtaggagacttaccgtcttctttctcattgggtgggagacttaccatcttctttctcattgggtaggagacttactatcttctttgtcttctcattgggtaggacacttaccatcttctttctcattacaccatatatatgtgagtttgaaaggtggtacttatctttattctcattcaccactctctccatattcagtccattaaataagtcctgctggttatgtttttaaaatatctctcaactacatcaccattaccttatatatgcacattactttttccttaaaactaattgtcctcactaacggctgatcgatgtttcagaaactcacagtaaacttacttgagctggaatataatcaggacctttcactaattgacaaaaaccagcctcatttctacctctttttctcttatttaagctctggcaacatcaaactgtttgtagtcccatgcccttcttgcatcactaccttctcatgctgtcatctctggaaattccagagcacttagttgctcacttaatttcttctcattaaggctcagctcaggtttcatttctagaagacatacccgacccattcctcctcatgactctctcctgaccccaagtattgggttcatttattcaaacattcattaatttaaatatgtattgagcacctgctattgaccaggcrctgttctaagtgcttgtgatatatcagtgaacaaaacggaagagccctgtccttgtgaattcatatattctagtaaaataaatggacagcaaataaaagtaaattatgtaggatattcgaaagtttagagtgccacaggaaaaatgatgtagaacagagtgaggagggtcaggagttgggctagtaggggctgggagacaacaatattaaataccatgtagctctcatttgagacggtgacattttgaacaatagctcgcaggaggtgtgatgtagacacytgaggaaagaacagtattccaggcagaggcacaagctagggaaaaggccaggatgtggatgtatgcctagtttgtgcaaggtcagagaggtcatgaggaacaggccatgtaaggactttggccttcgctgtgtgagatgaggggatgttggagggtttttagtagagcagcaacatgatctagtttatgttttgacagggtgctatattgagaccagactatagatgcatgcaggttaaccagttagaaagctattggagtagccaggtgaaggatgatagtggctggaattgatggtgttgactgttgggaaggtgaaacatgattaggttttggatgaattttgaagtttgcaacaacaggactgcttaatggtatggatgtgaggtgtgagagacaatgaagagtcagggaggacttgtatcatcccagtcattctccctratcttgtgcatgtaactggtcatctagtcttgtcagtctgccatgtaattatgagttttattttgctactgtttctcaactgcactgctgcagtgggactgactaatgggcattcctggcttcaatcaattctttctatgggagtaaagagcattctaaaatccacatctgcttatatcattctcaaggttaaatcttgcatgtttccatccacctacaaataaaattctgaagtccttagcatggcatacagtatccttaaactgcctttgcttactctgagcagctgtccttcacttcttccacatgcctttcatcatatataatttttgacttccctaaaaggttgatccttcatgccttcttgggagggtatgtgctgttccttctgtctgagatgccctttccgtcttgtctgttcgtggattacaaggctcaatgtgggtgtccatttgtttgtgagaagcttctctgaccttagtatctcacttagtctgttgcttttcttctttttcctatagacctcatgtacagttaggacacttcttatcccactgatgtgtagctgtttgtggtcggtcttcccttaaggggagcagcagtggtttcattttaccattacttagcagaggcgcaatagatgcatgattgacttttgggcrgttgggacactaaggcagaaatgggtagaaataaattggagagacggactttatattatgccatgtaagaaaaaaacagaaaaagagtttggyggccaaaaaggggtaaatgcrtttagtaggaaagagttaaggtataggtgtgggttttatggaagtcttgaggaccataggaatggggagagtagcgggagatgaaggttgtttggggccagatggtggaggtgcttccatactctgtttttcatctttattctggaacagtgaggaactaatcaaattttttaaataaaaatctgaaacagactgttgttcttttggttaaattggactttgcccctaccatgttgtttcattgcattgtagcatttacaaaagggaatctgtaacagtcaacagtgcttctggattcttgcagggagggtagggaccatggggaggagtaagaagtttccccttacaaaatcttgacttaatttgtcatggggaaaaaaaaaaattcaaacaaaactcttgagagtgcmgccatccaaagaagaagaaaagctgctgtctgttgaactaaaagagatgctgggcttcccttaggctgaggctggccgccctgagcatctggacgattcggcccacaattgggacccctgtatttacctgaagtcagtycggattgaatgaagcaggaacttcctgcttgtactgagctcaaggtcgtggctcacccagtgggcactcctggttcctgtctctagtcagggcgagcagacgcctgtggagatggcacagaggtgacccggtgcaaggagtggcagggcccatgtttagagagtttcctgggtttctcttgttttgtgtattttctattgtgtcctctagctgctggactcgggtctcgggccctccccagctgtaggaagtttcccgtccgtcctaggaagcccaggccggaagcgggcggayggcgtttctagggtgggcatgatgtcatcagaagtgcctgtgcccacccgtcatgtgccaccttctctgtggctgctgattgcatgagggctgctctagtccagtcttgaagtggatggtggctgggaggcagggactcatagcaggcggcccacgtgtggggagctccaagagtgaggggacctggggtgaacgagtgcctcaggtggactccagaaccatgggtgtaaagcccattggcagctccttggcttggcacccagagatgggggtcgcctgtgcccttgggggtgtggggcctttatagcccattcagtagcttcgtggtcccagtttcctgctgtgctgaagccctagaagacttcccagagtttcttgagcatggagtgttgcrtgctgccctggaaggtcttggaatgccagccgggcatgggctggtcatggacttttgggcccaaggatcactccacgtcccccaggagagtacttctgagagtagagtaggtgaagaaagattgatcaggagacctgaaaccagaaaggcaagttgagggagaaggctgtacgctggcatggggctgttcagttagagcaccttttggctgcaagtaagagaaacctgcttcagattacttaaacaatagggaaaactggcgtcataaaacatgagccttttaggaagggcaactccaggattgatggattcagttactcacacccttyggatctgcttctttacccttcccactttgctaatggactttgttttgatggtggcaagatcagctctttggctgtaggcctggtatgcacattggaagaagagtggacttttctgtgtgagagctaaactaatgactttcagggaaggagagcattaccatgactgatgtagcaaattgggatttattctgagctggagatggtgagcttccctgagaggggaaaatgatggctaactgtctgaacaaaggtaatagcagtgggaatgaagaaggtttaaaggaggcagaaacactgtgaaggtactgttgacagaaatcagtgatttgcatttagggactgaagaagagggtggattggaggatgactgggatatttagtttagatgatttaagaggaggatgatttcacttaaagagatgggatatgaaagagggaggtgaaggaggagaagagggagaagattcaagtaggttaaagtgtagccatgctgagaattatctgttagttatttgatttttttgttttgtttttgtttagaagctaatggtatagatatagaagtcatccacagagatgttacagttgaagagatgggggtagagaagactttgaaggaaaagaatgtagaatgaggatagaagagaggaaatcccaacatttaacaggtgagtagaggacacgaagccagcaaaagaaatttagaagggacattcagrtagacaggaagcaaactagtactctatagctctgttttgatctgccaattcattaaaattatcaattgatgaraactttgttttgttcacaccttgactctttttggtgccaaccttcagtcaagccccctacagtatcattgacagggtttcattgcaccgaaaagtttacagtgtttcatactggatgggttagttttaatggcttttgaggatttctgtggtgttctagttgggtgatttttccctttatttttcatagggtggttacatatttgctttaggcaaatttattattggctaaatgacctgctttaccatgttatgtaggagaaatttccaagaaactaacggattagttaacaatatctgatactactgagaccaagggagatgaagactgagataatgatatttagcaatttggaaagttggtttaaccaaaaaatgattttaaccaaagaatgatatccagtctccagtaacaatatctgatactactgagaccaagggagatgaagactgagataatgatatttagcaatttggaaagttggtttaaccaaaaaatgattttagtgcagttatggggaatgaaatcattgggtgattattaacacatgaattagaattaaggacattaaaataagcactggactactcttttgactttgatggtgaaagaaaaatagaaggtgtgatgggtttaccaggtgtgaaggatgttttgttgttgttgatcatgtttcaggattggtggaagtgttagtgtcttagaaatctttacattaaaaggggcaaggagagtttgaagacrtgagacataaaggggaaataactgagtgagcaaggaaaagaaggaatcaagaaccaaaaaagagagccagctgagttaggagagaagctagaaagtgggtagaggttcagagaaacattggaggggaaaaataaaggatcctctgagtaacaaaaggctaggtcacgtgtcagggtgatcatgctgtgtccggatgcttagtagtaatggaacagtcttggtctggctgctgtgggatcagtatagggagccatctaagaggcagaaaagaattgacatgactgcatttttctctaaccagttagaaatgcaggtcacaaaactcgaatgattgggtttacctagtgtggggtgggactaagcaaagaattctgtggtgcttgctgaggtgttattgcagtaatcggcagtggtctttaaactcaataatgaggtgaggcaaagttaattcaaatgggagagaaactagatgaacagtgaccacagtgtacagttgagggcaaatacctgactcaaaagttatgaaaggaagaatgaggtgtaaggataggatggtgtcatcagagaggggaattttgtcacaggagggagtaaataatttttctacttattcatggtttataatggcatgacctctaacccacatagaggagtagcagggagcaaatgaatcatatcctgttttaacaggtaagcttgagggaataataaacagttataatgtaatatcagaaatctattgttttattagctgtatraccagtatgacagtttatgaggtgtattagtttgagatagttgtaaatcatggtataaatgcactctcacttttaacaaagagctttttaatgtacagtctgagccgagactagtaagtaaaactcttatttttgttattcagaatgtacgtgttgattacatcgacaagattagttttcaagtagcaagtgtgatgtttctctgaatattttaaagttgttttaaaatgatttttaagtcaaggataggttttttgaaaattaattttgaggtgaaatagtttttatgagacagtttctgtctttagcaaattctctttgaatccctcaatcctggctccagtggtgtgactgagctccactcacctgagtgggtggaactctgtcccctgcgttggttagaggtgcaaatattggtcaacatttgaaagcagttaacctattcccaatccccaagcaccatttttagtagagctaatataagaggcacacgtacattttctaacaaattgctttttttttttttaaagaatgtaatggagtcactgttctggactacaactttgacatttatttgcataagtaggagtggaagtggttctcatatacagctagaacacccctttaaaagactcactttctcttaagtttgagtttgaaggcagaggcttttattattattaatgccatatgttgaacagtttgttttgttaataagttgctaaaacctgcttcgctcctaactttaacctacactctcacaattacaaacaccttccttcctccagggttcacacagtaatggccgaagtgccaggcactataagctgataagataagaagcacatggtgcattgtcataagccaggggtccctactgggccggctgacgcacacagtcttcccctgatgtcagagggccgagaagtagcaccttggctcttttcccaaattttgtgccagagcaggggaaaagactctttgtttgaaaaagcagctattgaggtattttttttttattgcttttcttgactgtaggccagattcctgtctgtttaaatggtttggtattatttctgaattgtttggcagaaataatgtttgctagcaaagatacattcaattcattacacataatgttttatgatcagttcgttgccacttataaggctttgaatttgtcattttttggtgaaaaagtaagtgtggcaaatttgatgaaaggcatagttcaatatgtctcatataagctcttaaactctgtcaccagtatttggacaatgaaccctgtcttagtaaatctatgaggagggggaaagctaaatgtagactagggtcatttcagtaacatttaatgcctaacaagctgtttatctcaattacttattggcatttatactgaaatatgaaaaatgttagattcatgagatggaactgttcaagactagtagtaatctactaatgcataggccaaacgcactctctactgattaaaaaaaaaaaaaaacccagacatcagaacatgctctryggccaaaytgtcatcatagtgaaaagtctgcgcagtacattattctataaaatgtygtttaactattttaatggctccttatgaagtcctaaagaatgaagataattacaaacctgtaattttatggctgccttgttgaaaagggcagaccaaggtgcctatatcaggatgaaagacctgaaaatctaaatagcctagcatattatatataaaacttttagtcattaattatgagattagctcagattagtgaaatatagcaagttttgcattgtcatctaaacttgaaattttaacgtgaacgctagttgaacaaagttggcagtgagaattgtgaattacaattagcactctacagaatggtgagacatactggaagtaaagctgaggatgactgctttttggtttgtttgtttgasacagggtctcattctgtcgcccacgctggagtgcagtggcacgatcgtggctcactgcagcttcaacctccctgagctcaggtgatcctcccacctcagcctccggggtttcaccatgttgctcaggctggtctcaaactcctaaggctcaaacaggcctccagccttggcttcccaaagtgctgggattataggagtgagccacggcacccagccgagtgactatttaatgtttacatttttgtcaccaaggaagcaaaagagttttagcaatttagaaatgccactgaattgttaaaatgacattttggattaaggtattttacagaaaccactttataacaatgtcatattgtatcttttgatgaatgttttgttgactgggtataaactaatttttttatacttaggtggtaataagagctgatattttctgagttttttaaagcaactttcatatatgaagtgtagagattattattatctccatttttcaaatgaggaaattgaggcatagaaatgttaagtgatgtatttcagtaattctgtaagtggtagagctaagagtaccttggtagtcgtcttcgataattagaattttatgttttaaattaaatgctgccgtagagaccagaataataattccacatttcttcaagcactaaacttgctctcatgaaatgattaagtattagggaaggaaatcagagttttagaggtaataggttacatacatgaaactttcaagaaagcggaagtgccatatttaaatctttctctgatgtaaagataagcggacacaattcttctgtgcttcactgctctgtgcagtaagttcatgttagtagggtgcacagcttagatgcctgtgtttctactcatagcatttcttagtcactagggacaatttggctcctaaatattaagaaagaattagcagctgttacagtggagggacaagatgtttgacagcagcatagcaagttgggggctgtgtaatgaatgatctgaagtggaacagctatagtgtcagcaagtgaatagaaacttttgaagtatttgcagcacagcttcaaacagtgtagcgtgactgtggattatgagaaaataaatacaggcaggtcaactggtactaaacacttaagaatggggatttctttttaaaagcaaactcagtttgcctaagaggtgaagtgtaatgcttccaaagggtatcacaatgtgtgaaagtggctraggtcacaaatgagagaactatctcttcaagaacaaaatgtgaagaaaactgtcttaggaactctggcctgtctcactcagataacattatccatagcagtgatactgactactcagataacattttccatagcagtgatactgactctcaagcataggaatgtttagagtatctcattgatgatgcctaagtggtgtgtaatttcttgttccagtctattggcaggacttgaattcctaggtttcccaacagaatttcatggtgtttgcttctccagtattttcatatttatcagcaaagatgtagtaaaataaataatgaaatcaattttttgcaaggtaagcaaggcagaggacagatgtggttcccaaagactcaggttgctgttctgctagcaaacagctggcggattcagtgtcatataagtgtcgtagatgggatcaaaataatgaaattactagaagtaatgaaagcacttcagtaagataatggttttatccatctgttcatgtgattctgaaacatttgtttagtgcttagtgtgtgaaagtacagttgattctcattatttttgaattttgtatttgctcatttgcttactcactaaaattgatttgtaaccccaatcctcacagtgttttcactgtcatttgtggacatgtgcatgtacagagtagggttatgtattgattggttgatgaaaatgtcaccaaaggcttgtaggaacctaaccttgtatttccaataggagcaagcattggtcaagtatttgctgattcagtgtttggactttatagaacataatgctactaataataatcgactgtaattactagcactgaggataagatgattaagacgtagtttctacttcaaagaccagagaaagactttacatcaatgcttaagaaagtgatgtatgtcttatatagcattgattttctgacagacccttttgtgttgagatgccagcttatcattaaagaaaatcgagttatttcctcttttaaaattaagtagtgtttgagaagattggttttgattttgaaaatgtacagcttaaaagaaatacgctgttttcttgatattaacaaagcaaaatcatgtaaattgtaaaattcaagtgtgtatgttttgaaagtatatgtgaaaatatcactgtcggcctggtattaattcttactcaaggactgtccatttattataattgtttctcctagtggcttgagctaaatttaagcattaggaacatggtaatgctacatttgcttgttttagatatcagatcagattgatggtttttgtttttgtatgcttattatttttgacacaatatttgtccagttattaaaagattcattctgccttttaaacaatttgaagtatactttttttcagaaaggagagcattagtttgctagggctgccattagggtactagtcatattggattaaggtctcaccctatggacctcattttacttaatcatcttcttaaaggtcccttctccacacagagtcacattctgaggtactgggggttaggacttcaacacatgaattttggaggaacacaatttagtccataacagagaagaatgtacattgtagtttgtgtcctaacttttcttggctctccattggttaaaacaggtaatttttgtgtagtttacattggaaagtttttcctgcttaattttttcctctccagaaaacaaacacttttggcactttcaatttttttctttttctcttaacagcaaagaacatatgtgggtttatgcagctttatgcagttctgcatttccttcaacatttattgatagtgcctacacagggaacagtaaaccggaatgagagtagggagtaacatttcctgtgaagcattcttccttggttaaaaaacaaatttttgaagtagatttaagaggagggtatgagtttaacaagacaagaggaacatttcctataaagagacatgaaacaagcagtttgaacggagggaagactgtcacaggctgtgaaggtaaacagagatagttatattatactacaaatttgaacataagaattttgggaagacacaaacattcagacccacagcagtcacttaaacaatggtgatatcaaggttaatttttaagcacattggaaaggttggaatatgttctttgaatattgacacagtcttacaacactcgtgcaaaagaagaaagaataataaattcatttcttcatgtggaacccaggacaaatgatggcagttacatgggctgtttccactgtgcttttaatagtctcaattagggacaatttagattatgtccttgagtaaggagaaaaaaaggcccctacaacaatgctgttcaacagaaatataacgtgaagtaaagatgacacacataagttaaagtattctagtagccactttaaaaaagtaagtgaaattaacttaataataaaatggacttaatttattccagaatattagaattttagcttctgattattaaagaattatttgatgaaatattttacattcttacatttgtactgttgtctgtgaaatccagtatgtactttacactcacagcacatcccacttcagagtagcaagttttctagtctccagtagctacttgtcactaacggctattctgttgaacaagtgtagctgtataaactttgtgattttccagaatagtgtctttttaattttctcaccaataacattttcaacagcaaaactagcataaatttctctttccttcttcacaawttcttggatagatttattctgacagcagatcttagcaagctcagcatacctttgttttttctttccttattaaatcaagaacttgcaccctttaacttaaaggaactactttatggcttctctgtggcatatctgaattgccagcatcactattcttgcacttttgggttgttattaagtaaaataagggtgacttgaacacagacactgggataccatgacagttgatctgataagcaagatggctacaaagtgtctgagggatgggaagtgtctacagcatggagacgctggacaaagggagaattcatgtcctggttgggactgagctgtaccatgtgagattttatcatgctactcagagcagtgcacaatttagaattatgagttgtttacttctggaattttccatttaatatttttgactgtggttgactgtgtgattaactgaaactgcagaaagtgaaaccgtggataaggagggtgggtatactatacttagttctttaaaaaaatgctggccggatgcggtggctcacgcctgtaatcccagcactttgggaggccgaggcgggcggatcatgaggtcagcagatcgagaccatcgtgtctaacatggtgaaaccccgtctctactaaaaatacaaaaaaattagccaggcgtggtggcgggcgcttgtagtcccagctactcgggaggctgaggcaggagaatggcgtgaacccaggaggcggagcttgcagtgagccaagattgtgccactgcactccagcctgggcgacagagcgagactccgtctcaaaaaaaaaaaaaaaaaaaaaaaaggccttgttgcrtacctattgtgtgctgggcacttggcttagggcagatgttacaaaggtaagtagagactattggcttccaaagaaataagaatcttgaggtcaaagcagataaatagattatcagcaataagataaggtgaaagatggacacataatataatagagctttagatttgcattcagaaagttttgatttcgattctagttttaatacattttagacatgtgaccttggattatttatatcttcgaaccccattatccttattgggaaaagaccaataaaatgcctggtacctaataagtactcgataaattatatatatatttttaaaaagtattgagagagacgaaatacctggttactgagcctgttaagtatatggggagagattgggaatgggtttcatagtagaagtaataagcaggtgtttacagggaagttatcagtgaagaaaaggcactattagcagtggagtcagtgtgcataaaggcataggacaataaacattagttgaagaacattttgacagtttctctaggtcatttttagcccatggctatgtatttttaaaaatcaggcatagatttgaatgccatttccwcaacttactagttgtaagtaattttacctgtgaatcttagcttccttgattgaaaaatagagataatactgaaagcccctcttgtgtccccttccagttgctaaccccttaaggtaacacttttctgacttcttacagatagtgacatttttccaactttaaataaatagactcatgcagtatttatcttttgtgtctggtttcttttgttcaacattatgtttgtgtacttcactcatattattccatgcagttctgaatagtttgttctcattattgtatgatattccattgtgtgaatatactaagtgatttatctgttctaatgttgacggatatttggtagtttccatgttttggctatcataaatagtgctttcttgaatattgtaataatatatatggcttttgatggacttaagtatgcacttttaagggtgtaatttctgggtcatagaatatgcctgtgttcagatttttcggtagattcctgccaaacaatttttcaatgtgattgtatcgatatagactcttactaatagtgtatgacagtaaggattgggatttggacttgctcattttttcatatttcacttactagagttgagtttcctttttaaaaatatgattatgatcatgtcactgtcatgcctaagcaaagccctttagcagctgttggttgcctttagaacagagcaactcatgacttatcaggcactttgtgatttgtcctggctttgctctatctacacctttatctccagaatcttctccttggtatcatgttccgcagtgtaattgagttacttggagatttcctgtcctatgttttctggcgttcatttccagacattgacccacactgttacctttgccagagctgccgaactgtcttccagagtaccatttcacattcgcacaaacagtgaatgagatcctgttgttccacattcttgctggcatttggtgttgtcagtgttctggattttggccatttaaataggtatgtaatggtatctcactgttgtttgaatttgcatttccctcatgatatataatgtagagcatcttttcatttgctcatctgtatgtcttttttgatgacgtatgtgttaatgttttggacttttaataatcaggttgtttgttttcttattaatgagctttagagttctttgtctattctgggttaagtctttatctgatatgtgttttgcacatattttctcccaatctgtggcttgtctttttattctcttggcagtttcttttgcagagcagaaaatcttaattttactgaagtacaacttatcaattctttctttcatggatcttgtctttgtgttgcttctaaaaagtaaatgacatgcccaggttcatctatattttctcctatgttattttctaggggttttatcattttgtgttttacatttaagtctatgatccatttttatttaatttctgtgactggtttgaggtgtgtgtctatattcattttctatcatgaggctgtccggctgttcctgacactatttgttgamaagaktattttttctctactgtattgcatttgctcctttgtcaaagatcagttttatatatttatttgggtctgtttataggctctctgttttattccattgatccaygtatccattatttccctaataaccacactgttttgattattgtagcyttattgtatgtcttgaagtygggtattgtcagtcctcgaactttgttgttctcttacaatattgtgctggctattgtgagacttttgtctctcaatataaactttaatcagttttccagtaaccacaaaataacttcctgggatttctattttgattgcactgagtgtagaactaacatcttgacaatattgagtcttcctatccattaacatggaatatgtatccacttatttagttgtttgagtttttttcatcagagttttgtagcttttctcatatagagtttgtatctattttgttagatttatacccaagtatttcattttttgagtgctagtgcaaatgatattgtgcctttaatttcaaaatctacttgttcattcctggaatataggaaagatactgatttttgtgttttaactcatattctgaaaatctcatataatcacttattagttccaagaagcttttgttgatttttaaaaaaatttttctatatagacagtcatgtcatctgtgaacagttttatttcttccttcccaaactgtaaacctttagttctctattcttgtcttattgcattagctaagacttgtagctctcttttggctactttatgaatggaatatctttcccatcctctcactttcagcctattacctattttttgtctttgtatctaaattgcatcttttatagacaacatatagttgagttatttttaaaaaatccattctgccaactttttgacacattttgggcagatttttattataagcacaattctagctatttatacttactctcttgctccacttctttagttaagaatattggagaggaatagttagttaacttctcactttcaggaagaaaccttgattcatcctattgttatttccattttataagcagaaaataaaatgtttaaagtaagatgtattcggtgccagacaagctccaagtcagttacttagcattaactaatatagaaatttactcgcagaaaatgggagaggcattgtataaaatgtaaacaaacagaagtataatatgtgctatgggaattcttcactggggtgcttgactggacaaggaagtaacatgtctacagtagctattactatgccccgtagtcttagaatataccggggcaggtggccataggtgatattttcatttattaagtttgaattggcttaatgcaagattgaaaacaaccatttcttagtaatctctgtattaagaagatgttttcaacaacatttcrttgttgtctaaccaagattgtcaaaacgggtcttatcagtccttgttctccctcttgcatttgtgtaggcttaaggatgggcagcaggactagagagccttgggtgcctctctaccttcaacccccaatcttttcttaataaggagcaagcaccagctctcatgtttcttgactctctaaacagctttgctttgaggaacagtgttggactcttcaggaaacctgtccttggaaatccaccagttaataatcttgactctaaatatttattttaaaggatatgtatttgaattgaggattttaggggaagagaaattccagccaagggttttgtggctcagcaattttttattaacttaattcttttgttgaaatcacaaataatagtttattctctttgaatactatgatcagtgggagagggtggagggggtgactgactgaggaggatgggtttgtgtttatatctgtaggtacatgtatgttttcatttgtatcatcattatagctaccttttttttttttttgagacagtctccctctgtcgcccagactggagtgcagtggcacgatctcagctaactgcagcctccacctcctgggttcaagcaattcttgtgccccagcctcccaagtagctgggatcacaggtacacaccaccatgtctggctaatttttgtatttttagtagagacagggtttcactatgttggccagtctggtcgtaaacttctgacctcaagtgatcgggcctgcctcagcctcccaaggtgctgggattacagatgtgagccactgcacccagctgtatctaccatttttgagccatggtttatgtcttttgcatatattatgtttaattctcatgaaagccatgagttagaggtataatttttattttatatgttagataaataggtgagaaaggctgcatcactcaagaaacattcagctgtgaggggcagtaccaagaaatgatgtctatacttagttttctttgtcagtgctaaacatcaatactttcttgtgcctgtggtttccgtataattgggaattagaagcaaattgcttaagtttatttatctacaatgcaatagcatagtaacttcttgatctcattactaaatccttccttccttccttccctccttcctccctccctccctctctccctctcccccttcctctctttcttttttctttttcccccctcccttgcctctcccctgcccctccccctcccctcttcttttttttcctgtattcggttgtgggatatttaacttatatgccatacttttataataagtactgaaattattctgattgcagtattttatgcagttttgttgtcttcataaagtccacattatttgagcaaacacttgttgaaaacaggatttctcaacgtgagcaccgttgatgctttctgtggataattcttagctgtcaggaggctttctgtgcaccataggatgttaggcaacctcgccggcttctacgcactagatgtcactagatgtcactggtacccccttcctcttatgacaaccaaaacccataatgtcagcagacattgccagatgtctcttgggggactaaagattctcccagctgagaacttatgatttaaattttactacgtgccaggccaggtgggctctgactgtgacaattctcctgttcctcaaggatctttaggcctagttgataagagaaccatctccctgctaacctactataacatggtcagtacagggcagtagtggagcagtgcagtgtcacggaaacttggaaaacagaattgtgactcagattgtggcatagttgagaagaaagtggtaggactagggaatgtagatgctaaacaaaaaaaaataatcaaacatgtcttgaagaattgttagttgctgtttttaatggttaggactttcttttgatattctctagattttttcatctttgtcttaagttgtagtttaaatcatatttatctgaaaattatcttgagaagagctaatactagtgtctttgttttcatgtaaaatagttggaaaattgagaccttttgtgtctacttaagtctaattcattacttttcttcaggtatatagatttaataacaggctacattctattttatacataatatgaattataccctttaaatataaatttggtttatatcttttgaactgtcttaacattgtaattgtcttaattattaaaataatacatagatatagtatatctagtaaactaatgatggtcatgctggtctagtcatttagttctgctcccaaggaagatgctttcatttcttgctgtgttgcacagatgggtcttgaactcctgtgctgaagtgatcctcctgcctcggcctccttaagtattgggattacaggcatgagctaccacacctggccagtatttattttctgaaattcaaatttaatgatttaaaaaaactttctcttatttctctactagaatttgataaataatggttacaatttggcaactattaaaaataataatgctaaaatttgatagctctgtagttctttagatttttaaaaaatctgatgtattcatgtcttcattttcaagccagcaatgagtcttcaaatctttcttgtgctttcaatcatgaacttctggcaccaatgggagaaaactatctgctcttaaaggactcatttggttaggccaggcccagttagataatcttcctattttaggaccaataactggttattggttatttcagtttacaattaagacttacatcttaaaacactcaaaacacattaatttgttaggccagaaaaaaatgtagtgcaacacttttacagcaacagcaataaatgttacgtttttgttattatttcccttttctgatggtgtatttgtgattcttttggcttacatgattttacagttcagttttgcattgaactgtaggcttattgtgttagtctcttcccacactgctgtaaagaactacctgagactgggtaatttatgaagaagaggtttaattgactcaattctggaggctgcataggaagcatggctggtcagcctcaggaaatttacaatcatggtggaaggcaaaggggaagcaaacgtgtcttcacatgacagcaggagaaagagcaaaggaggtactgctgcacactttttttttttttttgagttggagtcttgccttgtcacccagcctggagtgcagtggcgtgatctcggctcactgcaacctcygcctcctgggttcaagcaattcttctgcctcagcctcccgagtagctgggactacaggtgcccgccaccacgcctggctaattttttgtatttttagtagagacagggtttcaccgtgttagccaggatggtctcgatctcctgacctcgtgatccgcccgcctcaacctcccaaagtgctgggattacaggtatgagccactgtgcccagcccatgctacacacttttaaacaaccagatctcatgagaactctatcacgagacagcaccaggaggatggtgctaaacgattagacaccaccccataatccagtcacctctcascagcccccacctctaacacctggggccacagttcaacatgagatttacaaaagcatagacgttctcccctgggcttgtgcttacactaaacaaagtattgattacaacttgacaactgtcagcagttacagtttttgcttaactggttaagggtgacatagtttggaaaatacgtttctttttacttaactggattaataataaaagtaattcaatttttagaatttactttagaaaagtaaaggtttattagttttctgttgtctcataacaaattaccacaaatttagtgacttaaaccaacacccgtttactggctcacagttctgtagaccctgtgtaactatttgatttgctcagaatatcgcaagactgaaataaaggtgttggcgttacttagttctcttctggaggctctggggaaagctccactcccaaactgattcttgccattggcagaatttagtttcttgtagttgtaggactgaaggtccccttttcttactggctgtgagcttgaggtctctttagctcctaggtgttggttacatttcttagcatatggctctccatcttcaagccagcaatgagtcttcaaatctttcttgtgctttgaatcatgaactctgccaccaacagaaaaaaaatatctgctcttaaaggactcatttggttaggccaggcccagttggataatcttcctattttaggaccaacctgtagcataacatgtcctattgtggaagtaaaatacatcctcacagtgccggagatcatgcagagtgtgcatatcagggaaaagtcttggggactgtattaattcgttttcacactgctgataaagacatacctgagactgggaagaaaaagaggcttaatggactcacagtttcacatgtctggggaggcctcacaatcatagcagaaggtgaaaggcactttttacatggcggcggcaagagagaatgaaagagaagcgaaagcagaaatcccttataaaaccatcacatcttgtaagacatagtcactaccacgagaacagtactagggaaactggccccaagattcagttatctcccaccaggtccctcccgcaacacgtgggaattatgggagctacaattcaagatgagatgtgggtggggacacagagccaaaccatattagggactgtcttcaaattctgcctaccacaaaaggttatcctctaagatactatattggtggttttgaatcttgatgatttgaataaagaagggatttattaatgggcttactgtataatcttgttgaaaaaagtattctcatgtttcaaattgttctagaatgaattaaaaatatttctaatgagacagtatgtaattttcttttatgatttaaaccaataatataggacaaagatgagaattcacattttctttgccacataggatatgattcagtattcctgggaaatctaatccacttgtaaatcttcagctattatcaaaatggatgacttccacgtatatccctcttagcccctattttcttctttttggctgcacatttttatttcctacttcgtattggaaataaccatatagccgtcctatgggcaactacatttaagcagatcccaaaccaaaacaattttcttttccatgaatccttcacsaccttttatatttttaatcatgttctagcatmactgcctggtcaattacctaagctagaaactttggagtcacctttgacatatcctactgcttcattatctataatttgtcaccagtttctgttggctaggcttagccagtattaaagagaattttaatttttttttttacttgaattgttgttatagtgcttccgttatttatttwtatttttttattatactttaagttttagggtacatgtgcacaacgtgcaggtttgctacatatgtatacatgtgccatgttggtgtgctgcactcattaactcgtcatttatattaggtatatatacgtgttcattgtacccttatcgactttgcagcatgcttatccatctaactattcatctttatttgccttcgttttttgagttcccttattcatcctaaaacaaaatataatgcctgactcatagtcagacttcacagtatttttaaatgaattacattgcattggggaaatataaatagtaatrtccttttatagaggaagtctaaaagaaattcttgggtgaattgataatcaaacatttttaagaaggtatatttgckagcaaagaaagaaaaaatatgacagcttatttatatagaaaacctatgtattctgtgatttttctttgtttcaagtctgtatatgaatatcatgctatccctcccccgtcccccaaccccacgacaggccccggtgtgtgatgttccccttcctgtgtccaagtattctcattgttcagttcccacctatgattgagaacatatggtgtttggttttttgtccttgtgatagtttgctgagaatgatggtttccagcttcatccgtgtccctacaaaggacatgaactcatcctcttttatggctgcatagtattccatggtgtatatgtgccacattttctttatccagtctgtcattgacggacatttgggttggttccaagtctttgctattgtgaatagtgccgcagtatacatacatgtgcatgtgtctttatagcagcatgatttataatcctttgggtatataaccagtaatgggatggctgggtcaaatggtatttctagttctagatccttgaggcattgccacgctccataggttaggcatatcgtttgttatatattgcatgtcaagatatgtctgattcatagtaggcactcagtatacacgtactgaataaaaagaatctcaacacttagaattaatcacgtcagctatacttcatgtttctgttcattgtacccttatcgaccttgcagcatgcttatccactaactattcatctttgtttgtcttcgttttttgagttcccttattcatcctaaaacaaaatacaatgcctgactcatagtcagacttcacagtatttttaaatgaattacattgcattgaggaaatataaatagtaatatccttttatagaggaagtctaaaaaaattcttgggtgaattgataatcaaacattttcaagaaggtatatttgctagcaaagaaggaaaaaatatgacagcttatttatgtagaaaacctatatattctgtgatttttatttgtttcaagtctgcatatgaatatcatgatttttaaaaaacgtattttgataagtggaaaggaataatttatagaatacctaaaatatgtcattcacttttagggtataatttttaaagtctttaaataaatgataatgttcattttaaacaatattttactaaatgggcataagaaattatggttgttattcttcttgctttctttaaatcccagttgaaactgtgatcatgaaggttattaattatgaatcggtatataagtctctttctttggtctctcttttctccattttttgtttcttttcccaccagattaaattatactaccagaaacctattttcttatctttcttctgtaacgtattttaatctctctcaagacagtggatactataaggtttatttctatgggagtatttataagaatttttttttttcgacatggagttttgctctgtcacccrggcttgagtgcagtggcacgacctcgactcactgcaacctccgtctcctgggttcaagcgattcttctgcctcagcctcccgagtagctggaatgacaggcgcatgccaccacgcccggctaatttttgtatttttagtagagacagggtttaccattttggccaggctggtgtcgaactcctgacctcaggtgatccacctgcctcagcctcccaaagtgctgagataacaggcatgagccactgcacccggctcagaattttttttttttatttaagatttatcaaggctttactgaaaacctcagtagacagtcatagattttaaattcttattttaaatgtggaaagtgattctagactcccaggcaaggctgtacttgccctttcatagccgatatgcttgtccacaggctcattgtgtgcattgtggctgaggtacagaatgtatttacttagcattaggcttacttgtatttcatggctattgtccagcacttgagaattcactttcactttcaggtgacagagagttgggtcttagtggtttggttaatgttatcatataatgtaataacatatctgttaccttcaaagttaatgactattgtcccctttaatccaaattagctagcacatctcaagaaccatttgaactatgtcacaatacaaagaagggaactgtgtccatcacagctgtcttcaaggcagaagccttggacttccttgtattactttgaccaaacccttggccccttattcttttcctgtttttacccgttttgattcattgactgttttgtgtaagctcagctctcaaggttgaatatttgccttaagctggtcttaaccgccagcactctgtggagtgttgttttatgcagttgacccttgagcaatgcagggattagaggtactgacccccccagcccagtcctgcatataacttttccctccctaaaaacttaagtacaaatagctgaatgttgacagaaaagccttatcaataacataagtttattaacacttatagtttctacatattttatgcatttatggcatacctgatttttttcttaaaaattttcggtatttstaggctatgcagttcgtctgcaagttttttcaaattgttgaaaatctccaaaattttttccagtataattattgaaaaaatcgtcacataggagcagtgcaattcaaayctctgttgttcaagtgtcaactgtacttgtctttgacttcacattcctctggcttgttccttgtagcaaattggctggatccagccttgggcacccatctctgtgggttctgcctggaagctctcacattagactgtcttggtatctttgaggttagtktgtgggtacaccttccagttaatatgatggctagctagacaatttctggatttgatacttctcaatataagcatcatggatgtatctaaaccattaattattctgagacacacctagatgaaatattcttaaatataggtaaatagagattttattatcaatgtatctaaaacagtagcatggtcttttctaacaggaaggcatttctcttacaatcttaatttcataatatttcttaatataatggtgctactgttttgatgaagatagatgttactgaattaactgtcacaagtcacttagtatgtgctcaggtgtttgcatggattataaccctatggagtaggtactgttttggggcccatcttttgtttatggggacagtgaggcttacagggttaagtgactttctttttttaaaattattttttaaaaatgttgtgggtacatactaggtgtatatgtgtatggcgtacgtgagagattttgatacaggcatgcaatgtgaaagaagcacatcatggagaatggggtatccatccccacaagcttttatcctttgagttacaaacactccaattacattctttattttaaaacgtacaggtaggttattattgactatagtcaccctaatgtggtatcaaacagtaggtcttattcacttgttcatttttttggtgcccattaatgattcctacctcctcctagccccctactacacttcctagcctctctggtaatcatccttttactcactgtgtccatgagtgcagttattttaatttttagatcccacaaataaatgagaacatgcgatgtttgtctttccgtgcctggcttattttacttaacataatgatctccagttccatccatgttgttgcaaaagacaatatctccttcctttttatggctgaatagtactccattgtgtatatataccacattttctttatccattcatctgttgatggatacttaggttgcttccaaatcttagctattattgtaaacaatgctgcaacaaacagaggagttcaggtatctcatcgatatactgatttcctttcttttgggtatatacccagcagtgggattgctggatcatatggtagctcaatttttagttttttgagggacctccaaacttttctccataggggttgtactaatttatattcataccacagcgtacaaaggttcccttttctctacatcctcgccagtatttgctattgcttgtcttttgaatatatgtcattttaactggggtgagatgatatctcattgtagctttgatttgcatttctctgatgatcagtaattttgagcatcttttcatattcctgtttgccatttgtatgtcttcttttgagaaatgtctatttaaatcttttggccattgtttgattggattattaggtttttttcctgtagagttgtttgagctctttatatattctggttattcatcccttgtcagagtgatagtttgcaaatattttctcccagtccatggattgtctcttcactttgttgattgtatccttgactgggcagaagctttttaacttgatgtgattccatttgtccatgtttactttggttgcctatgcttatgaggtattgctcaagacacttaagtgactttcttaaggaaaatagcctatatttgagcgtctggtgcctcagaacccccagtcccccaccgagttactgtagatctggaattatatttatgctaaagagatggagcattaaatcctttatataacataacctgtgcctgcatgtcttgtctccatttgagacttcactttggagattggttttctgagtcacagaaagggtaaattttggtgggtttaagcttactcttaatagttctatcaaaaaatgtttttcatctttatgttatcattttgagcagctcaagtttgtagttgactttctcagttaaaagaaactttcatttatgttcttaggagagaaagcaagtaattaatttcactttggtttagaaatacagcagtatggaatttatcttctgataaatgcaaattgtgaatgtgggaaacaatatcttctctgcagctaaggcaccccttaggctgttaattcacgtgaaataagtaatcaattatgtaggtcagaatactggcagtatattaaaccaaggctcattaaatgactgctttctaggtcatagaccaattctctttcagtggaatgtacttggatggaaagaaatgattttaggtgatatatttggggacaaggatagttattataaggcatttgtttttagtttgcttcctgtttttccttcttggttaaaaatggtatcagtactagtcaatcgagttaaccaaaatctaaagaaacatctctttgtttctaccaaaactttcaagttattttaatgatagtgaaaactgtttacgtctgtcacctggataacctccattcatttccatataaatgactttgcctttaaaaaaaagacacccccctcctccccaaaaaaagaaatttagagcctatctatctcttaatcagtaagtggttagaaagaactgctatataaattgttatgttcatgaagttttatgtaaagggtgacatattacatatttaaactctttagatgaaaaaaggaaagtgaagatagaagtaagagaaagaaaagaatctcatgtaggctttgggcaggaatgggaatttaagtaggtacagcaggctatgagtggaggggtcctttgctcaggtacttgctgtaggatttgggattcctggtgggtccgtctgtgatcttgtgaactgggccgttttcagcaaacaaacctatascactccctattagtcttctgtgaaatcatacaagacaaaggattactaagcaattaattcacttgatgatagtctgtgtgtttagggtcctcagaattacccctcagtttggtgatttgctggaagtactcacaggactgggcatgtagttgtactcaaggctatgcttgatgagagccgaaggatacaaagcacaatccgcaaagggaagaggtgcactgggtgaaatccaggagagacttggcacaggcttccgaggataccttcattcctccagcagtgacrtctaacagtgtttgtctagtgttacctaccagggaagcatgttagagactcaattcccagttttcttattgggggttggtcaggtacacaccctctgcctggcatgttctaaacttttcagactctcagaaggaacgcaggtgttcagcatgaacccatattgtttgcacaaatgcacaaacagtctaggcacagtggcctggtctttagttaactgttgactgggaacacccccagagccaaagtccttgatgccagccaagggctgaccttgcaagcagcctttctaagtagaagagcactgtcaggtctgctgtgttaaccccttttctgcccagagccaggcactgtgctatgtagagaatgagacagatcatggagtttatagtctagctgaagaggctgaagtctaataaattcctactaataagtaagaaatttcagcttttgatgactgtcttgaagtgtaggaggaggagggtacaatgagagtatagtgcagtgagtggagagtgtgtggctagtgaaggtagctccagtgaaactgcctttaaattggctaaatgtctcactgagccgtaagagaggaggggattgagggcagatagcagcgaagaccrtggatgaggtgaggaaaggaagggcttggcatgctggaggactgaaatgggggaagcatagggctaagtggcatcattgctactgactgctccctttccatcctccagttagacttattttccgattagtcttgggtctccagggggcttctgctacaaagatttctttccacctctttatcaaagcctgagattagcagtcagatttttcaattgataatttgaggtaaaaacgtgtaaattttaattccaaattggagctagccctgaccaataacactcctgttaaagtgtaataacctcagacgggaggaagtgtaaagaaacacaaggcagtctggccttaagagctgacatcctgggcttatatcttcattccaaccctaattattgcttctgtggccaatagaaaactgctacaattatttaacttctctttgcttcattttcctgttatatattttggggattataattcatttattaagtaaatattttgaacattttctgtgtgccacatacttagttctctgaggcttacctgggctagtatgtgtaacgtgtataacatagtatcttatatgcagagagcattcaaagtaggccaacagttattaacaaatgctattagctgttttatctttttggtggggaaggaggtgaaacagttgtagtataaatgcatgagaggtaaatacagagaaggaggtgtatgaagttgaattttgggattctgaaagcaaacttacctgattttaaagttatacatctgctgaccttcatttgcttttggacaaataaaggaaggttttacataggtgcatatgtgtacagcctagaacaattgtatgcagttggggagaacacacacacaggttaataagaacattgctgatgagcagtgtggtggtataacactgcttagtatgacacaagatacgttttcttttaacttgacagattttgttactaagttgctacaattatttatacagaaatataaagaaaatttactacttctggtatatgttttggaattgtcttttgaaactaataagattttttaacgtaaatgtgtatatatacttatctcttggtgcttggaaaatatgaaaccatctcacgctgtgaaaggtctgtaaagttattggattttcctttcattgaacatttcaattgtgggaggatgcactgtctgctcatgtagcccattccagttacagaagccttgtttcctaaacattctgcctgaagttgaattgttatctgacttcctcaattattaattctagttttgccccctgggtttatggatggaaaaaacaaaacaagatatgaataaaccaaaaatatcttaacctgttatacttaataacattcagattaaacagcaatgcccatcaataatcttgtgttcttcaaactaaacatttgtactcattcacccattcctcatatgacatgcattacagccccctcacagttcaagctgttctttgataactggactattatagttcagtaattaatagcatgaaatggtggtattctcccccaaatttatcttacagttggactgacactgtaagaagctgaaaatgattttacttattgtttgtatctgggctaaacacagaagaaattacaaaattgagataattattacaataaataagagattattggttacgtataccttagaatttttttaaaggtttttcctaacctagctgagtttagttactgtgagataatggaaatttagtgtattttcccttttctgtgattgaggaaggacagagggcttgagataagatacctaatgtggcagaaaataattcttttaaggtcaggaagacgtgttttagggcatgtaaaagcactgtgatgtggaattgtaggagtcagaactcaggtgtcgtgggcgagaggcataatgggagaggaggaaggatatactggatacttgccatatgcttttgactggtttttaaaattaatacagacacaaaattgggatctttctccacaattaaaatggtagaattaatactgaaaaatgctttttcctaattcttacaatagatcctttagtacctatgattactaatttaacattctttcttagaatgagtaaaacaataattctttagcctccgatttgaaactgacttttaaaataaataatttttatagatattaaggtgatgagacttcagaaataataaaggctttggcttattaggataatatattgtcataaagacacatttaaagatatatcagaaatgaacctaatttgcattcagttggtgacatagccacagagagttgaatatttcaagtgactttaaaacataataatgcagccgcgcatggtggctcacgtctgtgatcccagcacttcgggaggccaaggtgggtggatcatgaggtcaggagatcgagaccatcccggctaaracggtgaaaccccgtctctactaaaaatacaaaaaattggccgggcgtggtggcaggtacctgtagtcccagctaatcgggaggctgaggcaggagactcccttaaacccaggaggcggagcttgcagtgagccgagatcacgccactgcactccagcctgggtgacacagagagactctgtctcaaacaaaaacaaaaacagaaaaaaccgtaataacttatatatttgtcttggttatatatcttaaaggataaagaaacccaccttatatgtttgttgtgtgatagaacaatgaatgattatgtaatctagttccattttcctgaaattgaaatacttctatttactgaaaggaactagagatcctgagaaaaagagtacgactctatgtctggggcagaaaatgaacaaaaggaacctaagatatctcatactagcagaggatggaagctgttgagatcgactaggttcttgtcagaatgactgaacctgcttgaagaggctgctccacctggctgcaagatgggacaatttgagcaccagttaaggataatagttacaatggaagaaacagatcaaatttattcaaatatatggtttcgtagtaatactgttattttttagttgtttacccatgggagaatgttactgcatccactcattattttcaaaactggtgaacaaaggggaacaaattaagcatttgtcttgtttgatctacatgaactgtcccaccggacaaccacatagtagatgaagctaagtttctcttcatattatttcagctaataaatgaagaaggcatgatagaatgaggaaaatcaccattgtcaagccctactgaattagtcactcaagagccactaatgctgctgacatcacaaaaaacttctgacagaagtgtgcagtaacactgaccagattgtaccccaaatggaacctacatctcttcaggccttgaggactaatgtcaattttcaagaaatgcagagagcggaggaacatgctaaaccccacagggataaagtcagaaaaatccagattgaagtaaaccataggactaaaaacctattttattcagaaataagttataatgggggaaagtaagagatggagggaatattattggaccaaagagacctaaatataatttaaaaaatgaaattccgagctactgcaacatgtggaatttacttgtgtcctagtgcagaccaacaagcagtaaaaaaaaaaaaaaaaaaaaaaaaaagagatttaaagcctggatatttttgatggaattaaaaataataatttctctttatttgtgatagtagtatttatggttagaatagttttatcttttggagatacatattgaaatgtactaatatattaaaataatttcttggatttgctttgaaattatatgagaggagagtaggtggtagagatggaaaatattggctatgaattgtgatggttgaagctggctgttgagtacmtagggccattatattttttggtgtgatttgataaaagttttaaatgtatatttatacatatgcgtgaataggcaaaatcttcatctgaaaaagaaagttgaatttgtggcttgcagaaagcaaaaaccaaaagggtagcatagtaatgtgttactttatgagaagcttgtaagatttctgtgaagacagaagaaaagtagcctcaatgctactgtatttaaaaacaaagatataaaaatgtatcattgttgatgttatttatttttactgatgttttgcattattatgcgtggaaactcaaaggtgtcaatccttttcatcactgctctatggctcaatatcaaaatgttgaagtagagatactgctgtggtgtttatccatttctttaaaagagttactcagcaagaaaagaaagttaattcttatctacccctcagattgctggctgaatcattaaccatagaagcaattatctttactaaaatattcatcagtctttattatgccttttgttgtgtatcttcaggtaccagtgttaaatctaaccactacatgtaccactctgcttttcagtttggttttgtttagactgtaatccttcatgacagtttccatgggcatttgcagattgcactgcgaaaattaatgaaattcatcagctcttcataacttaccctgatcattcagtctatcaatacccgtgtgcttctcttctatcatttattacttttaacctgcccctgctcatgagtactcctgccagatgctgaaaaatgaaatgaaaatgaaagtcagtttaattagttttatctgtttccactctggcaaaatgttatgtagatgaaaggttgtagtttattagcaggaatgatatattttaaaatatactcgttcaaatatacacaattgctttggaatagttgtctgtatttgtctgtctgtgcgatttactggtagcaaattttaaatcatcagctactccaagcttatgtattttctgttcttatcctaaatttagctgtttcttcatggagtcttggttccttttattgtacactgatactagcaaccaagctctaggtgctgtatgtatgcaattataccgggatattgttgcttctaggccctctcagctaacatagcaaagtgagacttgtgtgtatttatgagatatacgttatctaccaatattcctatatgtaaccatttttatttgtattgtcatacatgagttcactgatatctccaactttaattcattaccacatggatcattctgaactcttccttttgtttatctgtaacatctcactctaccattgagaaatcttgtccccaccatctaccactcatttgtttaattgaccagtgtcaaactgtaccctcttgggacaacaactttatcaactagagtgtggtgcttatgtacagtttattttgtgtctagtctcacagaccccacttattttcaaagttctataggttagcaccttatcctctgccacccgcttcagggaggttgttttatacgttttatattacatgtgtaatacatttagattcttgtgttgcattatgctttccatcctgagatcccctgaccttgtaattgagtttttaaaaatttacatacgtgatagtttactctttgtgctataaagttctacagatttttggcaaattcatagtgtcatgtattcatcgttatagtgtcttacagaatagtttcatcatcctaaaagatcccctgtactttacctattcataatttgccctttccccttgagctcctggtagttactgatctttttactacctctgcagcttatgccttttctccagtgttgtatagttggaattgtgtaatatgtatcctttttagactggcttttcttctcatagcaatatgcatttaagactcatccatgttacttcatggcttgttagcccgtttctttttagtgtgaaatatttagtcgtatggatgtatcacagtttgtttatccatttgtgtattgaaggacatcttgattgcttccagatttgggtgattatgagtaaagctgccaaaaacactcacatggaggtttttgtgtggacataagtcttcatatccattgggtaaatgcttactagtgagatttttgggtcatacagaaagactctatttagctttgtaagaaactgccaaacagtctttcaaagtcactgtagcattttgcatccttatcatgattaaatgataatttttgttgctttgcatccatgccaacaattggtactgtcagtttttttttaattttagccattctaataggtgtgtaatagaatctcatttttgttttaacttcaattcatgattaacaaatgagcatctttttaaatgtttattgccatatctatatcttctttactgaagtggcctttggcccatttttcagttgggttgattgttttcttattgttgagtttaacgagtgtttttttgtttattttggatgcatatcttttatctcatgtaatttggcaaatatgacttgtatggtaatgcactaagatgaaatgagatgacaagtcggaatgagtcagttattactatatttttcagcctcagtttctgggaaaatgtagagtaatagtaacacaaaaaggaaaaccaagagttaaaatctctttgggaagaagtgagaaggagataactcatatagttttgacttaagatggagcttgaggtgatgggaaagtagctagactggagattaaaaatatgttaagattcctgatttagattttggtgtcgtcattatggattgttgaagagaaagtagaattcaagagcagttagaaagttaggataagaattctatagccttgtgtcatgggagtggcagaaagaaattttaagaaggaatcaatattgaatatggaggacctaaagagagcatgaaatttgcattatctgtcttctcaaaggtcaagtatgctatcagcttactgtagtatcctgcaccttttgtttttagggactataatttgctgtgccaggagagcacttacttactttattgagccaattatctttagcattttatagaatttctcacactgaattttacaccactggggctcttttgcagggtgaatatagccagagatcttattttcatttgtcttatacaactctatttgtgtgtgtatakgtgtgtgtgtgtgtgtgtgtttaaattgactatttaactaccaatttcattgaaagaagtcattttccttttcagttataccattctgttgtagaatcccaacagttgtgactttagttcccagcagaattaattaacacatatgaattctctgctttgtctgtttgggaaaacatacagcctactctctggagtcataaagatatgcttcctttccttcttttttttctcagagtgcagtttttcattgctttttttttttttttaacctaaccatccctaaaaagggtaatttattcaaataattcacagaaaagatacagtagtaaaaataattcccgtcactgaaggataattattcaaagcctgtttgtgtttggggttgtttaatgaaatggcataccaacacaaagcaccaaattgaaaacatatactttatatgtgagatatgaaaacatgtgaaaatactttgtttgcaaatcttatgtatattcagtacttatcattggactatgaaaagtatttcagtgaaactgactacatacacagaatattaacgaataaatgtcaagattattctgaactgaacattagttataccactgggtttaatgactttgagaaaaaggaaggatttgtgttgtaaggcaataaaagataataatgtattcatttatttattaaacaatttgtagcacctataatgtttcagtgctacattttcctgtttactactcttgctagagtttcacttgctttgaccactaaatctgtggtaactatataccgaaaaaataagtactctgtaagccttaatgtacagcattggttcttggcattggttcatatgtaactctgaaatttattgctagaaacagctatgtaacatgatgtaatatctgtagtttaaaattgctaaactaactgcattcttttttattgtggtcatacacacacacacacacacacgtatatatgaaaaatggtgtttttttaccattttaaatgctgttttaagcgtacaatttagtggcattacgtatattcccaatgttgggcagtattcacctgtctagttccaaaactttgctgtcactcccagtagaaactctgtacccactaagcagtagcttccccttcccgctctttccagccctctctccgttagatgagaggttgctgggtcttagcataatgtgttgtgatactatacctttcattgatatgaggatgttgtataggtgaattttattcttttcaattcttttacaggtttgacagatgaaaaagtgaaggcatatctttctcttcacccccaggtattagatgaatttgtatctgaaagtgttagtgcagagacagtagagaartggctgaagaggaagaacaacaaatcagaaggtaaggtctcttgtggatctcattttaaaccagctttttctatcttacggcaaaagactaagcatttaatatattctagagtgtgaaatataaagtagacaaatattaacactgtaattctatcagagttattccatttaaaaagataaagtaagttagagaagaaataaatacaaaagaaagatccrtgactaattaaaaataaaaatttggcaaatcttgagaattcagttgattaagttacaaccatattgaaaaatgcagaagtcagtattataattgattttatttaaggattatttttagtgattagataaacattattcatagtatgtatttcaaagatactatattttacaaagataagtctattacaaaaagaaatcctttacaaaaacaagccaatataaaaacaatttttatattgggaaagcactgtagacttggcatttgactttcattcacactcagactctagaagatttgttgtcagtaaactttcagtaaaagaacaagtatattggctgggcgcagtggctcacgcctgtaatcccagcactttgggaggctgaggcgggcggatcacgaggtcaggagatcgagaccatcctagctaacacrgtgaaaccccatctctactaaaaatacaaaaaattagccgggcatggtggtgggcacctgtagtcccagctactcaggaggctgaggcaggagaatggcgtgaacccgggaggcggagcttgcagtgagccgagatcgcgccactgcactccagcctgggcaacagagcaagactgtctcaaaaaaaaaaaaaaaaaaaaaaaaaagaacaaggacatctttttgacctaaacactcatgaaatgagaaaaggagtgcagaaccactgttttaacttttgagatcctggcattttaagcacatcgtggtttaaattttctgcaaagtagctttctacagtaggagtctctttgcatgttgttctcttagtctctgaaacacgtgtatttttaatggagactgtttaagaagcagttatattcacgaataaagaactagaggctcaaaggggatgggaagcaaaataattttttcctcaaactgaatgtatattaatatattggattgtttgatttgaatattgcataatttttattttgtttcaaatggatttatatttggctaaacttatttctgtgaatattgtttttattgtgacaattttatatgtgtttttgactgttcaactttttttaaattatactttaagctctgggatacatgtacagaactaggaggtttgttgtataacttttatattaaaaacacaaagatactatttgggggaaactttattagtgtaaaaaggtgttatcttaaagttctaaaatgtctaatagcaatgaataaaaatgtataattgttattaaaatgttatggtgttagaagtataggtaatttttctcactaatttttaaagtttctgaaattttgttttgcattttttatagtggtaatgttttttaaatgagggcttttgtgctgaaatatgaagtagtttttaaagtaagtgtatgtgaatgtgtttgtatgtgtatgcctgtaagtgtggattgagagggaggggagaagagaaataataaatcagaaacaggcattgtcttctcaatcttggcatttaatatcaagactaaccttaaagaaagcttgacatagcataatttagtttttataagcctcaaacatttgaaaacagtttaaatgtttgacactttcaaaagtgtggctgagctttgcttaagcacttgataaaaaaagatgcaaatttcagcttgctatataatgagggataatagtrtagtgtaagaatatatggtctttgtgggatatgaaattgagtacaggtcctagaacctattgtagtgctaccataaaaactaactcttgaattttcataaacattgtcagtgtgtcatttcctacctcccaaatctttgttttctatattaatcaaataatactttattgaacacatgtacagaagagttaaataattgttaagaccagcagtgtgtaactgaaactctactcagttattctcctcctcacttaactttttttttttcttataaggagatgttttttatttgaccttgcagagggctagggacagtggaaagcggctgagtgagatgtgacttggagtttaccatctagttgtgggaatagacatagagccacwtagcagaatgcatcagtagtaaacagggatacaagcactggaagtatataaaaaggaacyttacattccactgtgcagcctagtaagacccccttcagcctgtcttctgagagtgtttatcaaaagaatgtatctcatcatatatcgcttcatgttcagtgaaattctgtagcatggcccttgaggcctatataaaaaccaggcttcctcccttcattctttcctcccttctttcctttcttcctgttactttagaaaatgtcctgttctctgggcgtggtgacttatgcctataatcccaacactttgggaggccgaggtgggaagatcccttgaggtcaagagttcgagaccagcctggctaacctggtgaaaccctgactctactaaaaatacaaaaattagctaggcatagtggcgcatgcctgtaatcccagctacttgggaggctgaggcacaataatcgcgtgaacctgggaggtgtgggttgtagtgagcagagatcgcaccactgcactccagcctgggcagcagagcaaccaaacaaacaaaaaaagaaagtcccgttctcaagtatgccttattctccttccacgttgcttcaccgaaaactttttgaggaagaaaatttttgtggagaggattttcagggagtgttttcatttccatgagtggaaccaggaacagaaactgtggcagatagaagatattggagaatagcttgttgaaaatgagacaagcctatctaaattatttcattttttgtcatttagaaaaaagaaaatgaaataaaaccgtgtaacacactgtaccccataaatatgtacaattattatgtcaaaaataataataaaagaaaaaaacacctgtaagcagtgtgaacgctgaccgtatttgatttgagtattgcagcagaatttttattttgtttcaaaaggatttatatttggctaaactttcaaagggaagctaaaggatcaccaggggtcaggcatctgaatctcgatagaatcatgagacgctcgctatgagatcaatttgaaggcatgaactgcgtgcatcatagtaaattttgtattcctcacattttcgaatgaatgaataaattagggagggttaaatactaaacctccaagtgaaatagcctgagggtcgctacatttgcttctcatactatggggacacagagctatttttatgcttctgtccctcatactcatttaatagcctcttgcttgagggaagatattatataattgattgattgatttttgagcaaagtgttgctctgttgcccaggctggagtgcagtggtgtgctctcggctcactgcaacctccgcctcaaggttcaagtgattctcctgcctcagcctccagagtagctgggattacaggtgcgcaccaccacgcccggctactatttgtatttttttttttattagagacagagtttcaacgtgtcggccagcttggtctcccaatcctgacctcaagtgatcccccaccccagcctcccggagcgctgggcttgcagccatgcggcactgctcccagccratacatattttaattcccacaggttccttgtgttttcattcattcagcaaactgtgtgtcaagttctgttcaggtgctgggattattaaattgttaaagggttctcagtctacaaatagaaggaaggagttgtaatttattcctttcttctagttagtctggcagtgggtttaagcagagtccaagctggtagtttccctgtcagggaaagtcttacagagaaagaggcgcgattacgacgagattttgttttgacaggtagaaggaggttttgggaaatgtrtataacatgacaactcctcaaagatctaaattccagagtctttttttctaactcttattttcagtttaattttattgctttcatagcattttcatttcagatacataaaattctatctacagttgagaggaaaattgctttttaaaagttgatctctgaacctaaattccaaaccaccattttttcagtgatatatggaaattagagattgcatttattcattttataacctgttgtacttatttagggaatatataaaaacttcctcaggaagcattaaagccgatacatcctcagaagaaaatatagcttcgaagcagagttttaaacaggtttcatcaaacgactatacattcattttgaaaaaatgtaggaaaataaagaaaattatctaggcatatgttgcccactaaatgttatatttttatgcaaagtaaatttgacagtaaatttcctccagctggtacccttcaagactcagattactaaatgatttaacatttacacgtctgtatttgtacaaagtatatattattaaataaacattaggatataatgaaggtccattgttttgcatttcttataagaatattctaaaatggaaaacaatttcccaccactaatgccgttccagtatttcagttataagtaggaagaatcacgacttaccttgacaatcagcagtgtctccttttggcccctaatgtaaaaaattgtgagttgacagtgtcggtggtattagaaagggtgcatgaagaagtgaatggtagcatgactatatttggcatctttttgtagtagaataatatttaaaataagtggattaatttcttaaaaacctcaaatgtaattgtaacattaatttcttaaaggcgagttacttagtattccagagggtgattgatgaacccacaatcatttgaaaattgtaagtagaatgccaccttttgtgggcagtaattttatttctatgatcgtgtctaaaatattcaatagccgaccgtatcactatcattgtacctataaattcaaataattagtaatgaaaatatttgtgctgcctgataccttaaatttttttcaacaaataattgaagttttcttttttctcaaataatgtagttagtatatgtttttctcctttcagtgattctagaagtgggatttaattttcatacgaataaagcagttagatattttattcttagaataagtaggatttaaattatgccccctaaacctactatttgataacctaaaattcagattaaattgcatttgtatggtttaatatgtaacggatggtttctgtgctagtatatatacggaagaaggatattaaattaatggggcataaattactttgccaaaacattcggtgttggaaggtttagtaagtgggatactaataaataatatattaactattagtatattttcatgataagaaaaaaacacgtttttgaaatggtttgcatgaaacctaattttggacactcttctctttttccttcaatttttttgtctcaaatgttgaaattacattcttacacagaattttcatatattttatttatattttttggtaatggaaaccagaaaatgtgttgaatgtcttgatctgaattataaataaacatgagtccaccatctggtgactagaaaggagataaagttsatacgaattcatctataaagagttatttggcatattctattatttctgttaattgtgtgttcacattatcataaagatggatctttggtatttacatattttaaaatttaaaattatgaatatattattatgaatacttagtaattatacatatttatgaggttcaggtgatatttgatacaagcatacaatgtaataatcaaatctgggtaattgagatatccactactgcgaacatttatcatttctttgtgttgagaatatcccaaatctactattcaggtttaatgattggtccccctattgtgctaccaaatactagatcttattccttctatataactgtaattttgtacctgttaaccaaccactcttaaccatttcttctcactggtgttcccggcctctggtaactaccaatctactctcttccttcgtgagatcccttttctagcctctcacatatgagtaagaacatgcaatttttgtctttctgtgcttggcttatttcacttaatggactctagttccatccatgttgctgcaaatgatagggttgtatttttcatggctgaataatatttcgttttgtatatatcacattttctttatccattcacccattaatgggtgcttaggttgattacatatttcggctactatgaatagtgctgcaataaacatgggaggacagatatatctttgatatgctgatttcctttctttgagatatatagttagcagtaccactgcattttatggtagctctgtttttagttttttgaggagcctccatactgttttccataatggctgtagtaatttacattcctaccaatagcgtacgagcattcccctttcttygccagcatttgttgttttctgtcttttttgacaacagtcattttaactgaggtaagatgatatctcactgtggttttgatttgcattttcctgatgattagtgatattgagcattttttcatatacctgttgggtatttgtatgtctttctcctcttgagaaatacctattcagatcttttgctaattttttgctcagatttttttttttttactattgatctgtttgagttccttattcctgttcaggttattaattttttgtcagttgaatagttagcagatattttctcctattctgtaggttgtctcttcactttgtttgcttgcagaagtttttaagcttgaggtgatcacatgtcagtttttgctttggttgcctgtgcttttgaggtcttactcaaaaaaatctttgtccagaccaatgccctgttgcatttccccaatgtttttttctggtagcttcttagttttaggtcttatgtttaagtatttaatccattttgatttatgtataaggtgagagataggggtgtactttatcattcttctgcatatgaatatccagttttcccagcaccagaagacttgactgtcctttcctcattgtatgttcttggcgtccttgtcaaaaatgagttgactaaaaaatatggatttatttctgccatctgtgttctgttctcttggtctatatgtctgtttatatgctagtaccatgctgttttggttactataggtttatattgtaatttgaaaccaggtaatgtgatgtcaccagctttgttccttttgctcagaattgctttgacttttatgggtcttttgttgtttctatatgaattttaaggttgttttgtctatttctgtgaacaatgttattttgagagagattgcattgaatctgtagattgctttgggtagtatggacattttaatagtacatgattattcttccaatccatgaacataattccatatttttttgctttcagtttttttcatcaatgttttatagttttaattgtaggtatctttcacttctttgcttaagtttattcctaggaaaataaatcattatatagaaaagatacctgtgcttgtatgtttattgcagcactattcacaatagcaaaaatatggaaccaatctaagtgcttatcaacagatgattggacaaagaaaatgtgtgtgtacacacacacacacacacgcgcacacacacaccccatagaatactactcagccatggaaaataatgaaatcatgtcttttgcagcaacatggatggaactagaaaccattatcttaaatgaartaactcagaaatggaaatcacatattgtatgttctcacttataagtaggagttaaataatatgtacacatggacatagagagtggaataatagatcttgsatatgtggaagggtggaagattgggaggagagtaaggaattagaatttacttamtgggtacaggttacagtatttaggcgatggctacactaaaatcccagacctcaccactgtgcagtgtatctgtgtaacaaaactacacatgtatcatatatatatatatatattttaaaaggcagattcccggggtttcttttgtaggtattgtaaatgggattgctttctcgatttcatttttagattgtttgctttcgacatatagaaatgctacagattatcatatgttgattttgtatcctgcaactttactgaattcgtgtatcagttcaaatagyttgtttgctaaagtctttatgttttttgaaatacaagatcgtgtcatytgaaaaccaggacagcttgacttcttcctttccaattagatactctttatttctttctcttgtgtaattgctctggctgggacttccagtactatattgaataagttgtgaaagcaggcatctttgtcttgttagatcttacaggaaaggcttcagtttttccctgttcagtgtcatgctagctataggtttgttgtatatggcctttattgtttygaggtatgtttcttctatagccagtttgctgagcgtttttatcataaaggaatgttgaattttattgaatgctttttcagcatctattcaaatgatcatatgctttctgtctcattctattaatgtgatatatcatatttattgatttgcatatgttgaaaccatctttacatgtttagatatgaatccygcttaattatgatgaatggatttttaatgtattacagaatttagttttttagtattttgttgaagattttttcatcatgttcattagtgatactggcctgtaattttctttttgctgttgtgtttttgtctggttttggaatcaggataatgctggcctcatagaatgagtttgaaagtattttctcctcctcagtgttttgaaatactttgaatagaattggggtggttcttctttaagtattttgggaaattcatcaatgaaactgtcaggtcctggactttttttttttttttttgatggaagactttttattattgcatctatcttgttacttgttatcagtctcttcaggttttctatttcttcctggtacagtcgtgtcaggttatgtgtgtctaggaatttttctgtttcttttagactttccaacttattggtgtatctttgttcatagcagtctctaatgatcctttaaatttctgtggtatctgttaaaatgtctcctttgtcatatctggttttgtttgagtcttctttcttttttcttagtctatgagcataccaccataaaattgcctattctcatctgatatattctttctgagagtatttggccaggttagggaaatcacttatkccttttgaccaaggatccacagcagtccaaccaaatttatttggattttgataattttatagattaagtcatattatcacgaataatgttagagattatgaaactaattcaaataaatatatagctttgttgcaaactatattgatttctgaagtgatttttaaaaacaaattaaaaccctatgaaatataagtggcaaaaccatttcccagttaaaaagaatctgcttcttaaaagcttcctgaagatttaacagtcatctaaattatttgacctaaggttgaataattatttctagaaacatccacttgagagggttgtacctggaatgtgccagtactattcattttctggctagtcatttagtatgccaatgagcaagtatttattgagtatccactatgaatgtataattggagaacaagaaatatagtccacctctacgaaggaaggtggtcccataagactgtaatgccatatcttttctgtgccttttctgtgtttagacacacagatacttaccattgtattatagctacctacagtattmagtacagtcacatgctgtacaggtttggagcctgggagagatagactataccaccttatagcctaggtgaagtaggctataccatctaggtttgtgcaagtcactctatgatgttctcacaacagtgaattacarcaatgcgtttctcagactgtatctcaccattaagtgacatattactgtataaacttgcttctctcaagaacatcactttcatttaggggaagtcagataaacacaccatcaaagaataaggttattttaatatattttgtgactatatatttgaaaaaatccagtataatgtacttgctaagcaagtatgaattttaaaataaattaaatttgcttgagattgaagaatccacatggtttagttttagccattctgactgggctgagatactgagtccatgctctctgtctgctgtatcctgagtaatttgtgtcaccagagtagtatttcttgtgctactgaccttgagaaacttcttattttgtggtgaaagaatatatgaagcctttagagagcagtgactccggtgtgtaagcaagtgttaaatgggatggtgtagatttataaagacaagactgtgagacttgaagtcatgaagaggcatgaaaactggaaagtgttttcttggagtggttgaactaggccgctgatactagtgtgatccccagaccagtaacatgaacatcacctgggaactagttagaaatgtcatgggtcgggtctcaccccagacttgctaaatcagaacctctggtggaggagcctggaagtctgtgttttggctagctccccaggtaattctgatgcttgctagtttgggaactactagtagctccaggcacagcttaaattctagtgtctcagggaaccctttccaaacccccagaggagatcacatactctaactacatgcacttattgtacattgccctttccttttagcacttgtataactgatttcaataattatggtctaattagttgcttactatttttgccccatttagattcaaagctccgttatagctgaatctgtgtctaatgcttagcaagcgttacgcacatactagatatgcgcttatctagcaatagataaggagaatctatctattctccttatggakaataaacatgggagaataaatgtggtgctgtcatgggctgaggagcaacatgagcaaaggcaggaaagcagagctcctgtgattgactttctcccagagccccgagacgggaggagctggcacaarcaattccaattagaagccagtttcacggaaagcagaggttagtgtaaagccggttggctagcatgacagttcaattcaaacaacagtttggatacaatgaatatgcttgttactcctttttttaaaaaagtttttgggtttttaaattgttgttgttcatttttgtaccagtaattttgatgtgrtatgctatgaggtagttttgctacagattataaatcttgaaattatttttcttattttaagaatgcaagaagatggtttaaaggttttgtcttttaattcccatttcatatattagcctgttggtgttctacattkattgtaataggaaaagtagaaagagcataaatattcaaaattaggtatttaattgatagcttaaagtatggtgagttgcagaactatatataattcttttctgtgagataataatcaacacataaatgctaataaaatatgtgattgtggttgttttggatgtgggatttataggtacatttacattgttcttgtaaatactgttttttaataggaaagaaatagaaaaatattttaagggcatctggaaattttttgttgttgaaggttttgccccaacttctgtttttgttcaaaggataatgaacatttagtctacatttatgaatgctccattattgatgatttccttttttcccctcaataataaattatcattagtcatttagattgtcacataagaagctgatggctgaactggaatatagaaaagcamacagctcagttttggtctcattgggtttacaaattaatttattttcctcagttttaccaaatatctagtatgtgcataacgcttgctaagcattagacacagattcagctataatggagctttgaatctaaatggggcaaaaatagtaagcaaccaattagaccataaatataactgaaatcagttatacaagtgctaaaaggaaagggcaacgtacaatgagtgcatgtagttagagtatgtgatctcctctgggggtttggaaagggttccctgagacaccagagtttaagcagaggcacaaagaatgactagagttgattaaatagaagggagaggaaggaagtgatggaaaggctcccatgtagaggaggaggatggagaagtggtcaaggacctgtcatgcaaggccttttgggacatgtataaagattgaggatttcatgctgcaagcaatgtcaagttattgaaaggtttgaaggagatttgataatatatattttgaatgaattttcatagtattgtttggtttgaaaatatcagtgaagtttcagtctccctggttgattgatgcctctccaaaacatcagcacacttatytgatggtttgtcatgtcagtatcaactgatgacttaaacatatcttaatgcagtggctcaaatttttaaaattgaagcaaaaactttttatatctatattacgtttgtggagcatcaaagaataaagttttgctggaaactatttttaaattttaacttttattttagattcgtgggggtacatgtgcaggtgttttacatgggtctgttgcatgatgctgaagtttgacaattgatcccatcacccaggtagtgagcatagtactcagtaggaagttagcatagtactcaataggtagtttttctgttcatgtcatttgcccacttttaatgtggttatttgtttttcgcttgttggtttgtttaagttctttatagattctggttattagaccttttttggatgcatagtttgcaaatattgtctcccactttcttggtggttgtttcaggggtctctagaggaacagaactaatagggtgtgtgtgtacacacacacacacacatatataaagaggattttacttaaagtattaacttacacaatcacaagttcccacagtaggctgtctgcaagctgaggagaaagaagagccagtctgagtcccaaaactgaagaacctggagtcccatgttccagggcaggaagcatccagcatgggagaaagatgtaggctgggaggctaggccagtctcaccttttcacgtttttctgcctgtattatatttgctggaagctgattagatggtgcccaccagcttaagggtgggtctgccttccccagcctactaactcaaatgttaatctcctttggcagcaccctcacagacacacccaggattaatactytgcatcctccaatccaatcaagttgacactcagtataaaccatcacaagtccaccccttgtcaacttgaacccatacacgtctcctgcgatcataggcaatgttcaaataaagacaataataaagtcataattacgcctaacataatacagctatccttcgtacaacaggagatgcaccaatctccaacccaaatactattccataaagtgaacaatacttcaatgccgatatgaagtcagtaaatcttatgtaacatgataaaagaaaaggaaataaagatattagtacaagtgtatacatgcacaatcatgtttttaacaaaaggaggaggaaatactcatgacagttgcagtcctcatttctgccgctggtcatgtggtcgtagctggtatgatgactaccttcttctactacccattctgtatttccttggccttcagcaagcacctcagcaggtcatggttttttccctggtggagtgacccaaaccttcattcctgaggggtctggaccatttgtagtcctgcctggattgggctattgtagtttctcattgactttaatcacagggcttatagtttcccatagactttaatcacagggcatggtaatactaagagatgccctaacggatctcctgtaatccatgcatactcttccttaccttcgttgtggagtaatagactgatttcatcttgatagtctgggtcagtcaccccagtcaacactgtaactccattcttagcttgttgacttaaaggtaggaggagcccagagtgtccctgtggcaatcttccagtttaatggaatcrttgttgtgagtcctggtggcagtgtttcttcctctggaaataagacctctaggagagcagaatgtaatgtctcaggaacaggaagcaaaaattttgctaatggatcactaggggtgatggtgagtggtgccacttccacttccaccccttgattcctggatccattaatcctgaatatgggagaaacagtaccatatactggacacttattcagagcatacacagccttctggagaactttgccccagccctgcaaaatattgtcacctagttggtgttgtaattgtgacttcaaaaggccattccactgttctatcaatccagctgcttcagaatgatggggaacatggtaagaccagtgaattccatgaacatcagcccactgctgcactactttagccataaagtgagtgcctgggtcagaggcactgctgtgtggattaccatgatggtggataaagcattctgtgaatccacggacagtagtcttggcagaagcattgcatgcaggataggcaaacctatatccagagtaagtgtmtattccattgagaacaaacctctgccctttccatgatggaagaggcccaatataatcaactgccaccaggtagctagctgatcaccctgagaaatggtgccatatcgagggcttagtgttggtgtctgctgctggcaaattggacactcagtccagtgttgctgagcccatgcgtaacctccatccctgccaccatggccactttgttcattggcccatagggcgatgacaggggtggctggggaaagaggctgagtggtgtccacagaayggttcatcctatccacttgattactaaactcctcctctgctgaggtcacccattggtgagcactcacgtggcatacaaatatcttcacagtttttgaccactcagagagatccatccacatacctcttccccaaattgctttgtcaccaattttccaatcatgcttcttccaagtccctgaccatccacccaaaccgttggttacagtccatgaatccgtatataatcacacatctggccatttctccttccattcaaagtgyacaaccaggtgcactgctcaaagttttgcccactgggaagattacccttcaccgccgtccttcagggatrtccyagaaaagggctgtagtgcctcagctatccacttttgggtggtgcctgcatatcgtgcagaaccatctgtgaaccaggtcctagccttctcttcttctgtcaactgatcatagggaactccccatgaggccatcggtacagactgacagactgrggaagagaaggcagatggcaggagtggagatcatggacattttagccacttcctcatgtaacttacttgtgccttcaggacctgctggagcctgatcatgtatataccacttccatttgatgatagaatgctgctgtgcatgacccactttatggctagatgggtcagaaaacacccagttcatgatgggcagttcaggtcgcatgatgacttgatgacccatagtcaaaacattcagtttccaccaaagcccagtaccaggccaatagctgtctctcaaaaggagagtagttatctggtggagatggcagggccttgctccaaaatcctagaggcctccgctgtggttcacctatggggacctgccaaaggctccaaacagcatccctgtctactactgacacctcaagcaccattggatctgctgggtyatatagtccaagtggcagagcagcttgcatgttagcctggacctgttgcagagccttttcctgttctggactccactcagaactggcagccttttgggtcactcaataaatgggctggagtaacacaaccaaatgagaaatgtgtggcctccaaaatccaaataggctcagtaggcattgtgcctccttcttggttgtaggaggggccaaatgcagcaacttattyttcaccttagagggaatatcttgataggccccagaccactggacccctagaaattttactgaggttaggagatccctgaattttagtcggatttatttcccatcctctggcacacaaatgtcttaccaataagtctagtgggtttgctacttcttgctcactggatgtaatcagcataatgtcatcagtgtagtggaccagtgtgataccttgcagaagcaagaaatgatcaaggtctctccgaataagattgtgacacaaagccggagaggtgatgtactcctgaggtaacacagtaaaggtatattgctggctttgccagctgaagtcagattgctcctgctgggccttatggacaggaatggagaaaaaggcatttgctaagtcaatggctgcataccaggtaccaggagatgtgttaatttgctcaagcagtgaaaccacatctggtacagcagctgcaattggactcaccacttggttaagcttacgataatccactgtcattctccaagatccgtctgacttctgcaaaggccaaatgggagagttgaacggggatgtggtgggaatcaccacccctcgtctttcaagtccttgatggtggcactaatctctgcagtccctccagagatgtgatattatttttgatttactatttttctagctagaagcagctctaatggcttccattggacctttctcaccataatagccctcaccctcccagtcaaggagccaatgtgggggttctgccagctgctaagtacatctatgccaattgtgcattctgacactggggaaatgaccacaggatgagtccagggacccactagacccaatgtaagttagacctgagctgaagctccattaattacctgacctccataagcycctactttaactggagaaccacaatgatgtttgagtcccctggaatcaacatcagctcagagccagtgtccactagtacccaaaaggtctgatcatttcctttccccagtacacagttaccttggtaaaaggccggaggtctccttggggaaggatgagagaaagattcaccgcataaactgttggtaatatagtggggtccttcttcaaggggacccgtcctccccttcattcaaggggttctgggtctgtaaactggctaaagtctggaaattaattgaggggccataattgtctgtttttataatttaaattactcttttgtccatttgacctagaagttttctccttagaaaaattaagtaggaatacagtagacttcctatcartttcacttctaggaacaccatgattagttagccaatgccagagctctacacgagtaagaatattctgattgctgttttgtctctgctgtccattatagtatctacacccactttgcctttgaccgttgagtaccaccacttggcccctgccaccttgggatccagttatttccattgtatttaaatttggtatttgagtgactgtggttcccgctgttagatttgatgtacagagaagagcaattacaaggctcttcaaagatgcaggtgctgccctcacaaatctatttcgcaaagaattggtcaagggtrtatcttckggaccctctaaggctgggatgagtaggtctaaagtgtctaatccactccaccatcctaatttccctaagcctttggatcccttcctctacgttaacccaagggagatcaggcatttccatcttcctcatagtaggccatttttaatgcatatttcaactaaccaaacatataaactgttaggaccttttttaactccccgagctgcaacattaaaaatagactccctacttagtgggcccaaatcagtaaattcagcctgatccaattttatgtttcttccaccattatcccatacccttaatatccattcccwtgcctgttctccagatttatgtttatataaattagataactcaaacagttcaagtgtagtgcacctcctcatgggtcacactctcaactttacctctaggggctcgccgggacttcagactattataggtctagaagcaaacgagtattgggggtggctcctgaggagaatcaacatcattttccctggcagctgcctcgggaggccatcactgttgcctcaagcagtgcagggtttatctcctgagacaaaggtggaaaggctgatggcagcatgggtcagggaggggatgttgccaccactggggatggggaagctgtttcttctggcaaaaaaggttcctcagagtttacaaacttggtgtccccagcttcatcagggtcctcctctatgtccccattccaagtatcagggtcccattcttttccaatcaatgccctcactttaacagcagacacctggcgaggctgtgcatgcatctttcattgcaggttagccacttgcatgataagagcttgtgtctgtttttccacaatttcagctcttcctctgcaggagataagactctgactcagggcaatcttagcagatttgaggctttgtatctgcttctgaagccaggagacagaatccctgggttcatcatttttttcatcactttgttcaatgaacttaggagcaaccaaccaacttcattatgttccttggttctccacatatggtcaaaggtattatgtatagagtcactaaactccttgcctcttacaagcggtgaatcaggagtgtcaaatgtatttattttgcataactttctaaacagtttatgccaaggactattggtgttctccatattgttagaagtagaatccttagcgttttggggtctaatcatattaagcagccaactccaggaaccccaaaaccaacgaaagaacttcatttttaatattctgttcctctggaaccactcctggtacagaaatctgtattagtcagggttctctagagggacaaaactaataggagatatatatccatagtgaggagtttattaagtattaattcacacsatcacaaggtccaacaataggccctctgccggctgaggagcaaggagagtcagtctgagtcccaaaactgaataactgggagtctgatgttgcagggcaggaagcatccagcatgggagaaagatgtaggctggaaagctaggccagtctcaccttttcatgtctttctgcctgctttatattcgctggaagctgattagatggtgcccaccttattaagagtgggcccgtcttccccagcccactgactcaaatggtaatctcctttgacaacaccctcacagacacacccaggattaatattttgtaccttcaatsaagttgacacttagtattaaccgtcacaatggtctgtttgttaatagtttatttttcagtgcagagctctttagttaggttttttgtcaatttttgtttttattgcaattacttttgaaaactgagtcataaattatttgccaagtctgatgttcacaagggtatttcctagggttcttataagatttttatagttttaggtcctatatttaagtctttaatctctcttgggttaatttttaaaatttggtgataggttggggtctaggttctttcttctgcatatagctagccagttaatacagcctcatttattgaatagggagtcctttctccattgcttacttttgtcaactttgttgaagatcagattactataggtttgtggctttatttaagggttctctattctattcattgctctatgtrtctgtttttgtaccagtactgtgctgtttgggttactgtagccttgttgcatagtttgaaattggatagtgtgatgcctccagccatgttctttttgcttaggattgttttggcaatttgggcttttatgtggttccatatgaattttagaatagttttttctaattctgtgaaaaatgacgttgatagtttgatgggaatggcactgaatctgtagattactttgggtgataaggccattttaattatattgtttctttcaattcataagcatagaattttcagtttctctgtgttatgtaatcatttctttcagtgtttcatagttctctttgtagctatctttcacttccttagttagatgcattcctaggtatttttttttatttttgtggctattgtaaatgggattgcattcttgatttggcgcttggtttgaatactgttggtatatagaaacactattgatttttgtacatttattttgtatcttgaaattttattgatgccatttatcagttctaggagcctttggtagattgtttagggttttctacatacagaattatatcatcagtgatgagcgataatttgacttcttttcctattttggtgtcttttataattctttctcttgcccagttgctctggttacatcatccagtactatgctaaataagagtgataagagtggacattcttgtcttgtttcagttattaaactagaagcaaaagcttctagcttttgcctgctagtatgatgttggctgtggatttgttatagatggctcttaactactttgaggtatgttctcccagtgcctagtttgttgagggcttttatgatgaggggatgttggattttattgaaacttttctgtatgtttattgagatgaacatttaaaaagacctttttttatgtggtcttttatgtggatttatcccaagaataaagcctacttgattgtggcgaattaactttgtgatatratgctggatttgggttgctagtattttgttgaggatttttccatctatgttcatcagggatattagactatagttttctttttgcattgtgtctttgccagattttgctatcagggagatgtagtctttgtagaatgagttacagagcagtccctcctccttgaattttttttggagttgtttcactaggattggtaccagctcttatttgtacatctgttagagtttggctttgtattcacatacacaggaccttttctgtggttggtaggctttttgttattactgattcagtgtggaactcattgttggtctgttcatggccaaatgtggaagcagcaaaagtgtccatgaacagaagaatggataaacaaaatgggatctagtcatagaataaaatattattcagccttacaaaagaagaaagttctgacatatgctacaacgtggttgaaccttgaggaaattatgctcagtgaaataagctagttacaaayggacaaatattatatgatcccacttatatgagtagtcaaatttatagtgccagaaagcaccaggtgtagctaccttcgtgaatcatctttgctagatcatctggataacttcctgcagcttctatatcagctcttcctgcttcacattgagcttttatgttgtggagatggcgtctttccttaaacttcatgaactaacctctactagcttcagacttttcttttgcagcttcctcatgacctctctcagccttcatagaattgaagagaattagagccttgttctggataggctttgacgtgagggaccattgtggctgatttaatcttctgtcttagatcactaaagctttctcctatcagcaataaagctgtttctcttttgtatcactcatgtgttcactggagtagaacttataatttccttgaagagcttttgctttgcattaacaacgtggctaactagtgcaagaggcctagcttcagtcctgtcccagcttttgacgtgccttcctcactaagcttaattattccttgcttttgatttaaagttagaggtatgtgactcttccttttgcttgaacaaaaggaaggccattgaggccattgtagggttgttagttggtctaatttaaattctgttgtgtctcagggaataaggaggctcaaggagagagatcggggaacagccagttggtggaggagtcaaaacacacacaatgtttatcaattaagttcaccatctcatggtttgtagctctccaaacaatgacagtaatatcatcaaagatcactgattacagatcactataacagatataatgatgaaaaagtattttgaatatcgtgaaaatttgacacacagacaccaagtgagcacatgctgttggaaaaatggtgctgatagacttgcttgctgctggggtgccacaaaccttcaatttctaaaaaaaaaccatagtatctgtgaagcacagtaaagcaaagcacaatgaaatgcagtatgcctgtcctagggctcttcccagagcctgaagggggcttctacagtgggaggttttagagaaagcttccttttctcactggtctgtttctggggatgtaattgtccagtccacccaatacactgatggctcttagagtacaaaagggtgtgtcatattccaatcttgtttcttaattcctggccaactagtaactcagttaatgttgaatatatgaattcagtaattgaccgacagactcattttaagtgattaaagggccattgaggacttcaaaagaaacatttatcttgtttcactatttggcctataagtagctctgggcctggaagttaggaaattcttagtgcttgatctgaaaaatctgtgggctctactctcctagatgctctgtcaaatcactaggtgcccagggtagtagctgtcctcatgcccatccctctccttcatcatactccccttggaatttgttcaaactgtcaagcacgaagtagttccaagtctcctcctcagatgttatacatattactaatgtcaagagcgttctctatggtttataaaatgatttatttggtaggattgagattatttttaaaagtagaggtggtacatgaaatttcttatgttacatcttggaacttaaaacaattttcagatcacatttgggctgtttattaggaattttatgatagaacgtgcttcaaactattcttcctttcccatgagaaacaaaaggaactctatrtaagtcaagaagtacttaattactttctagaaggaacttgatggtgttatcacttagcattgatactggttctggggatatcgtgattgtcacttcaaacagaattttaaaacttgaaaaggcagcttggtgctcctatgttttaggtctggattcaagagaaataaaagcaaagtgaaggccactgagttcctttccacttacttgattttctgaagtaaactttcaaaactgtagagcctcaatacaaaaaggaggtgagcattttgaaaaagataactgtcagataggacttaggcatttcttccctaccctgttcatcaccagccagtggtgagaatattaaaaagaaaaccagaaaaaatcgagccacataattttctacacttcaacttaaaaatatataaatatgtatattaaacaacagtcacacgtgttatcataggcacctcaggagttttcagaaatcactttcatagcttgaaagaaagctarggggtgagtttgttctgttttcttcatatatctgggaatacttttagcatgaagccaaacacgtgttctatgaagcaaggcaaggcaaatagttaaacgaattgagcagcagggagtattttgctactagccacaggttgaagtagatgacagtacacaggaggacttcaatctttcctctgctcagccttctcatttttcttctgatgtggttttttttttttcctctcctcatctcagtctccatgagatttctcaattattaccctggatgagatagacattttggtatttgttcgtttgtttaaacaaagtgatgccattggttttagaagttgtgatttctgtaactcctaagattctaactcttttagatttttgtttaatgatatctcaatttattcaaaacccatagaccatgggtctgtttattcttcctcttgggggtagtcggtcagccgtatatcgtaagtttgaactgaataccttcattgaagttgaggatccagtttcttctatcaaatgcaaaaatacttgttccctattctagcttattcttaaatgccactgatgtcaatgtgaaaatgttctttttataaatccaactaaaatgatagttccatgacagattacagaaatgtactaacattgtctcaccctcatctttctttttattcaaaaccctttccattccagtaagtacagtagtttccctgtatgcactgatatgcatttcatgaaccccagtggatgcctgaaaccactgataataccaaaccctgttgccatcaattggaactggtttctgtacatgactgccacccttacatgttaatgcctttctcatcttagagaagcacttatcttgtgctgcggctgtaacttgtrtagtttgaggtcggatggcaaacyagcacagatttatttttccttcttcacggtttcatggacagaaaatttgttcttactgctgatcttagcaacctcagcagacaattgttttttctttccttatcaagttgagaactttcaccatttcacttaaaggaagtgctttacggcctcttggtgtatctgaattgccagcatcactactgttgtgcgttactgtcattattaagtaaagtgagggcgacttgaacacaaacactgggataccaggacggttgatcccgtaagccagacagctactgactaaagggtcaggagcatctgcagcgtggagactctggacaaagggaaaattcatgtcgtgggcagaatggagctggccagtgtgagatttcatcataactactcggaatggtggagaatttaaaattatgaattatttatttctggaattttccatttaatattgtggttgactgtgggtaactgcaattgcaraaagtaaaactgcagatgaagggttctactgtaaagattactcttcatttgaccctacctactcatgtttggtcattttaatttgtgccctctatttaatgtccttaattaatttgttctgctctcataatttatggatttgaacgaagctgtgatttttagaagtcagtgttttctagcaacatcagagtgtttagcaaaatattttsttcaggctttggaatcagacaactttaaaattgaatttgggatctgccacttaatatttagctgaataacctcatttaattacttaaccttaacttccttgagtttgcttctcatacctaaaatgggaataaaaccaacttcataggaatgatgtaaggattagcaccggacacatggaatcactcacaaaatgatagctgtatatattaaaaactcaacctgaatatattaaaaataattgactttgtatttttctcgtgtatagttctatgaattttaacacatatgtagattcccgtaaccaccactgacctcagcatgaagaatggcacttttttgtgccgtcctttataatcctgccctccattcacccmgtccttggcaatgacttctgtgttagtgatcactatagttttgtgttttcccaaatgtcgtgtgaatgacatcatgcagtgtcgagcctttttgagattcatccgagttgctgtctgtaccaattgtgtgttccttgttattgctgagtagtattttgttgtatggatgtaccacaatttatcggattactttctaaagcctatttggattatttccaatttgggggaaattatggataatattaatgctattttaaataataytttagaatgagagatttctcttcatgggaaatactgggtcctaattgctttaactggtgtttgtgttgaactatcttgtcttatgtttttgtctctgatgaaatttgaatgataaactaaatcttatttttgatagagactgtgagtcttttgagtctatttaagacttgtaagatgtatttgtgaaaaatgtcatctatttcatatttattttactagtttcaatttcatagacatgtagtttatttactagttttctaattaaattaaaaggaagaatcagttggtggcataacttgccaggcattcactaagtttctaatatcttatgtaatgttggacacaagaggtgtgtattaaatacccatttaatgaatcaagatagaatgattgaataattcagaagcactgtaatgtgtttaatgagattttttttgattcatggtaatgtgatgaatataaggtkgtactttttagcacattatgttaaaaatatakttctttatagtaattggaagctgtattctttagagtaattatatattgcttatcacagtgaatcatttttagtattcaaggatacattgtctaaaagtaggttttattttactctaatgtggccctgttgccgtttgtaagaacatggttaaagggagtaattatgtatgtaatttaaagtaaaacatgatatttatgattatttgttaaaaatttttccctagtgattttgtttggataaataatgaggaaaaacaagtgacctattcataagccccagaagctttcaygttaacctcactcttttatccatttatgaaaattactttttagaaatatgaaggctgcttataatttgtcctcgtatgcttaacatgtgagagggtgtcagatcattaagggcttttgttctgttaggcaaataccgctatcaaataaggttttatgtacaatggtagtagaaagttctatgatgtaggtccataaaaacaggggcaggagagcctctttttgatgtgcgcgtatctttgagaatactatgactcatatattaagaatactatgactcataaattaaggaggggatttagggaggaagcatgtacataatcttttaagatgtgttttgaaggagaggagatagggaatggcatatggaaggtgacatttttgttatttttaacatgggagtattaagagactgtatgcttatgggaagtgcttcaatagagagggaaaaattgtagatggaagacggagaagagattgctggagctatggccttgaccaggtgagagaacaagatacagcactaagtgaaggggctggccttagataggaggaaactatttggaatattatttgaaaatgttctgttgcctaaggcaggatgagataaattcttaaagccaaggaaatgatattttagcagattttttatttcttatttacagtttcaccgagttcctttggagtagattgctctcttccataaatcagagaatcttctgataggtcagttttatcttgttcagtgttttaaaatataaatagaacagcagtgggttaagaaaataaatttactaagctcccccttttaaagccaatgatacagtcttaaatataagaaaataggccgggcgcgttggctcactcctgtaatcccagcactttgggaagccgaggtgggcggatcatgaggtcaggagttygagagcagcctgatcaacatggtgaatccccgtctctactaaaaatacaaaaattagccaagcatgatggcgcatgcctgtagtcccagcaacttgggaggctgaggcaggagaatcgtttgaaccctggagacggaggttacagtgagctgagattgtcccactgcactccaccctgtgtgacagagtgagactccatctcaaaaaaaaaaaaaaaaaagaacaaaagcatatatatgtgtgtgtgtgtgtgtatactataaattttattttatgataaaatgattataatattaaaccaataattttatataaaagtatacattttatgtttttatgtaagtacaagaaaatttagaatttcatgtaattatttattggatgttaatgacattgcagagattacaataggtataattaaatatagcaaataaaagcactatagaagtattgagaacatagttaacctctgaagactaacatatttatatcctaaactgtgaacttatgaccttaaaaacattttagaaacattagaatgcaaagtacaaatgtcatgggctgtcaaagcattaagtagcttctgaaaaatatagtgttcactcctgagagaatataagtaagacagataacatcttagtgttattctgaaaatagttttgatccgcatgccctctgaaagggtgtctaggagcccagaggtcagtgaactacacattgaaaattgctgctctgtagtaaaaatgaatagtttggataaaaggatttctagctaaagctaagaggagacaacaggaaatcctctccccaaaaggcaattatgaagtggaaaatatggacaaaaacagccattttagtgctctggacatcattcaaaggcaatacacaatccaagaatcattcataccttaaaaactgctgacctgcagtaaaaactgtgggcatcatggtgttatggcctggagctacttccggtaccccctgactctagtagttggtccagaggttctgacagcttctcttctgcagttgcagggactcactcaacttggagtcataagcaataacctcatcccccatcaatggcatttcgggggccagcacctagcggagggccggccaggctctactagcctgtgatttcattcaagattggggtaaacctgtttctggctgaagatatgcacatgtgcagtggaaactggagaaggtccccatctcttcacagctcccagtggtcactccttggaaagggtcctagtggaatgtaaaaccaagcaggtttacacactgawacaggcttatagtaattaaacatcttcccacagcaaacactgccttccagatcactgtactggtgaattttattaaatacttaaaaagaataatgccaatccatcacaaactgtttcagaaaatagagaaggaagaaaagcatttcaacttcttctgtgagtcttgtattaacctcgtatcaaagccaactaaggtatcacaagaaaagcaccgataaatgttgttcatgaacataaatgcaataatccttttaaaaaattagcaaaccaatgtaatatgtaaaaaatacgatacagtatggacaagtgggatttatatcagaaatacaaagttggtttaatattactaaatcagttaatgtaatagaacatactagtaaaaattcaaaataaaatttcatgagaaaagttctcagcagagtagaaggacagttgttaacttgagcaataaggcaaaagagaaggggatccagatttgataggaagaactaaaactgtcttatattttttacaaatcacaacatcttttatggagaacattcaaaacacttcacaaaaaactacaaaactaatgaataaattagcaaggtctcaggctacatggtcaatgtacaaaaataagtagtatttctacataaaaatgaacaatctgaaagaaattaaaattcacagtaatatcaaaaaataaaatacttaagacatttagcagaagtgcaaaatttgtaaactgaaaactatgaaacattgctgaaagaaattaaagaaaatcgaaatgaatgaagacagatttactctttatgaattgtctggataacaattctccccaaattgatccrtaatttcaaagaagtccttatgaaaatccccgcaggtctttttatagaaattgattaactgattttaaaatgcatatggaaatgcaaaggacctcttagaagartcataataatattttaaaatgaagttcaatatgaaggatttgcattacatgattcaaaaattactgtacaaacactgtatgttagtttattttgtactgctgcagagataggcatacaaatcgatgaaacagaattgagagtccagaaataaatctgtacacggtcaactcactttcaacaaagatgccaaaacaactgatttttggaaaggatagttggtaggggacaattatatattcatacattatataaacaataactataaagactgtatacttttctgtcatatcataagctacattaatttaatatgaatcatatgccttactgtaagagctaaattctaaaatttcttagaaaaaagtatggtctttggtggggtaaagttcttatatgtgccaccaaaagcacagtccawaaaattttaaaaaaacagtaaattgtagttcactaagaacttgtatccagaatatataaaggattcttaaacaaaataataagacaacccatttttttaaaagtcaacagatctgagtatgaatgatctcaaagagaatatataaatggccaataaaggatgcttaatctcattagttactatggaaatgcaatgagatactactctgtactcattaaaataagtataagaaaacagacaataactgatgttggtgagcatgtggtgaaatggtaatcattatacattacttttgggaaaataaaatggtacacgtatttcagaaaacagtttgtcagtttcttaaaaggttatacttaacatacaactgatcagttttcctcttgagaatctgctaaagggagaggaatacatgcctgcatcaagaaatgtgtatgaatcttcatagcagcattattcagtatagctccaaactggaaacaattcaaatgtctctccactggtgaataaataagtttgatacattcatgtaatggaatactatttgcaacccctgtcagactaataatggatttctcagcagaagaccaaggtaacaggcaaggagagagtagaatgatatattcaaagtgctgaatttttttttaaaacttgtcaacctaggctactagtattttattactattaataaataataatttattactataattactattgtcagcaaaattatctttcacaaatgaaggagaaataacatctttcaaagacaagcaaaagctgagggaattcatcattcctaggccagtcctacaagaaatgttcaaggaagtcctaaactggaagcacagatgacatttactatcgtaaaaacatataaaagtataaaactcactggtaaagcaaacacagaaatcagaaagagaaaggactcaaatggaacccctacagaaaaccaccaaaccacaatgacaaacaataagagaaaagaaaggaacaaagaatatacaaacaaccagaaaaaaacaatgtgacaataacaacttcccatgcaataataactttgaatgtgaatagattaaaatctctactgaaaaagttatagactggctgaatggaaaacaaaacaaaacaaaatgatccaactatatgctgcctgtaagaaatgcacttcacctgtaaagacacacatagagtgaaactaaagtgatggaaaaagatattcaattcaaatagaaaccaaaagctagcaggagtagctatacttacatcagataaaacagactttaagtaaaaaaccataaagaaatacaaatgagatcatgtagaatgataaagagatcaattcttcaagaggatataataactctaaatatttgtgcatgcaacactggagcacccagattcataaagctaatattactagatctaaagagagagagacactccaatacaatgagagtggggaatttcaacatccgcctgtcagaagtcagcattagatcctctaggaagaaaatcaccaaataaacattgtgtttaaactggtgtttggatcagctggacctaaggtttacagagcattttatctgataattgtggaatacmcattcttctcatcagcacatggaacagtcttcaggatataccacgttaggccacaaaacaattctcaagatattttaaaaattttgaaatcaagtatcttctcagactacaataaaacttgaagtcaataaaagaaagaaactttagaaactagacaaatgcatggaaattaaacaagatactcccaaataaccattgggtcaatgaagaaattaatatgaaaatcaaaacatttattgaaacaaatgaaaacggaaatacaacataccaaaacctgtcgtatacagcagaagcagtactaacagggaagaaaatagcaacaaacacctacatcagaaaagtaggagttcaaataaacaatctaatgatacactgcaaggaactagaaaagcaagaataaactaaatctagaagtagtagaacaaaagaaataaatattaccacagacctaagtgaaatactaaaaaattataagactaaaaataactaaaaggatcaatgaaacaaaatgttgggttttggaaaagttaaaaaaaaatgataaaccattagttagactaagagagaagacctaaagaaacaaaatcataaatgaaaatggagacattacaaccaactgataccacagaaatacaaaagatcatcataaactgttatgcacaactatacactaacaaactgcaaaacctagaggaaatggataaattccgggctgcatgcattctaccaagattgaatcaggaagaaatagaaaacctgaatagaccaataactagtagcaagattgaatcagaaatacaatgtctcccaataaagaaaagctcaggacccagtagattcactgttgaattctgccaaacatagtgaactaataccagtcctcacactattccaagaaattgaagaggagggagttctccccaactcattctacaaggccagcattaccctcatacctaagccagacaaggacacagcaaaacaagaaaactacaggccagtatatctatctctgataaacatagatgcaaaaatcctcaacaaaatactagcaaactaaatttgacagcacatcaaaaaggtaatacactacaatcaagtggaatttatactagggatgcaaggatggtttaagatatgcaaaccaatatacatgatacatcagttgaatgaaggacgaaaaccatatgatcatctcatttaataaaattcagcaaactaggcctagaaggaacatatttcaaaataataaaaaccatatatgccagacccacagctaacatcatactgaatgtgggaaagctgaaagcatttcatgtaagacctggaacaagacaaggctgcccactttcagcactcctattcaacatactactgaatgtcttagccagagagcatcaagcaagggaaggaaataaaaggcatccaagttggaaaagagaaagtcaggttgtccctctttgcagatgacatgctctttatatttagaaaaaccaaaagacaccgtcagaaaacttgtagagctaataagcaaatacagtatagttgcagggtacaaaatcaaaaagtcagcagtgttttatacaccaataatgaaatagctgaaaaagaaatcaagaagccaatcccatttacaatagctataaaaaattaaatataatacctaagaataaatttaaccaggaggtgagagatctctgtataaggaaaactacaaaacactgaaagaaagaaattgaaaaggatagaggatacaaacaaatggaaagatattccatgctcatagatcaaaataattaataaaatgagcatgttgtccaaagcaatatacagattcaatgcaatccttatcaaagtaccaatgtcatttttcacaaaaataaaaaaaaaaaatcctgaaatttgtatggaaccaaaaaatagccaaagcaatcccgagcaaaaggaacaacaccggaggcatcacactccctgcctttatattatattgcaaggcgattgcaatccagacagcatggtattgctataaaaatagacaaattatacaatggaacagaataaagaactcagaaataatttcacatgtttatagccaactgattttcgacacaggttccaagaacatacgttggggaaaggacaaccgtcttcaataaatggtgctgggaaaattggatatccatatgcagaagaataaagtagccagaagaaaggacttgaaatattacaaacacatagaaatgataagtactcgtgtaccctgactcgatcatgacacattctgtgcgtgtaaaaaatacttatatatacctcataaatattgaaaataatatatatcaataaaagacaacaataaaaaataaagagtgaagtatgaatatacgctttgacatggatgaacctgagtaaatttgtgctaagtggaagaaaccagatgtaattgactatatattatgtgattctgtttatatgaaatgcccagaaaaaaatcaatctgtgaagatgggaagcacatcgctgattgctgagctctctgtaggtgcaggggtctgatttaaatggttatgaggaactttctttgatgaggatggaagtgttttgagactggactattatgatagcttcacaactgtataaacatactaacactgaattttgtatacttacagttggtgaactttatggtatgtaaatgaatcctcagtaaaactgttgatgacaaaatgcagtgaggtatcactgcatacctcttgcagtggctaaaattaaacccagttactatagcaagggttgtcaaggatgtggaggccctggacttttcaaacgttgattgagggagtgtaaaatgctctcaccagtgtggagaatagcttggcagtttcttaaaagttatgtagacactgagcatatgagccccattcattcctctctaaggtatttactgaagataaatgaaagcctgtgttgttgcaaaaaactcatacaggaataaaaccggaaataactcaggtccaccaagaagtgaatggataaactgtggtatattcatgcaaaggaatgctactcttcaataaaaagaataaattattgatacaggcaacagtgtggatgaatctcaaaacagttacactgagtgaaggagaccagagagaaaagaggactgtactatgctactctgtttatacaacactctaggcaatgcaatgtaatatacagtgacagaaaacagatcaatggttgcttgggatggcagttggcagggattwtaatggatctgcggaaacttttggggtgatttgtgtgttttttcagttgtgtcagtggtttcacatgtgtatgtgaactttgcaaccttttaactttaaatatgtacgtgtcgttttgtcaagtatacattcataaaatcgtttttgaaaatacaagtaatggccttttaaaatactacttttcagtttcagaacagtctctttcttctgggctttgggtagaaatattccttgaaatatatctacataagttgaaattcaagtggtttgttttaatatatgtacttttgttttttgaggtggtttatttgaagtcttaagaaaacattgtttcattttagatgacattttgtatgtagcctcagaatttcttgataagactttaaaatatgtgtaggattttcaaagcctttttgagactaaaaccgtaaaatatttgtatcaccctgaaagcccccaaaacaatagggcccatcagtagaactcgataattcccaagaggtgtgtagttaagtgttagttggaaaatgaagtggagaggaagagaaaaaggggagctaaaaatcattcagctgtgattatgtgatttttgagccattcaagttagtaatagggatctggacaaatctggcgggagataggctgaaacttggatgattgtagaacttcttgaagaaacttactggacttgggcttggtgtagttggatactggggtgtctgtcttccaggtagatcatgatagtaggagtctcatgaagagtgcatataaggggaaaaggaacattaatttacaagtactgtgttagcttatttaatcctcacgacagaactaaggagtaggaagtcaggcaagtttgtcctttggtttctaaagcccttcctccttgtactgggctactgtatagtcagtctactccaaacggaactctagctagccttgactgcaggaacaaagtgagtaggacctcttcctcctcagaataacttctacccaaactgagagccttgtaagtgttactacccagcatgtctgagccctaaccaaacatgttgagatataggacaaaatttcaactccagcatgaaacacaagtacagggtagggaaacagaaataaaaacctagttgtaaggcagcagggtggcaggtagtttcagccaaccacactctttccaggatcaccaaatggtgcttttcaaaaacataaattctaaacatcaattactaaaggggtgaagactgctcaatacctcctgagctgatgattactgattagaagaaaaacagagaggctgtgcttccgggacaaagacatcagagaatgcaatgcaaagtagggcgaagagataagtctttgattgttatggcagtatttcaagtgtactagaatgaaccagagaaaccaatgtgttatttatakctggtgccagtaaaaatactctacaaataaaaagctgtgaatatgttgaatcattttataacttttttgaatgacagataaggcacctgtccttactttagcttaaaatccttgaaaccaagtgtcaaggcaaagcctatgagtgccggaagttttagtgagattgcgtaccttccaatcaaagatatattctcaagaacaatttttcttttcaccatatcagacgtggcactgttacttggaaatgtgttgaacgtgcccacaattgcttatttagccaatatgactgttcatctgtacttattttctattatacgtgatgtaaaatctcctctatagaaaagtaacctctattgggaacatttttcttttaggagaatattcaacatttttaaagtggggagaatattgaatatatacatgccaaaatatttatcacaacattgcttacagagatagaatactgaaatcaaccgtaatgcctatctaaagggaaatactgaataaattgtgatatatttattgtatgaaatgttatacgtgtattcaaaaaattgatttggaactctatggtctagaaaggaatgtctgtgaaattctaagtgacaaaattaatctgcaatataacattatagtacagtgccattttagtggggaaaaaaaccaacaaaagtacttatatagttatgttgttatgggaatggaaaaaagcgggaaaagacattttcccgacaggaatactgtctgccagtggttaccatgagtggaggcagtgtagagttagaaaataaaattgaaaaataagacaagtaatattatttttttcactatatatttggtattgttttattgtttatatttttatgcatgttacttttagaatatttgaagaattttattttttttcttggaattcagaatttaaaatgttttgtgtactgaccagcttttgaatgcaaccaatctgtagcctgatcatggtgaaatcagactggagttcatgtgatccttctgagattatgtgtaagatttttaaatgtgtgttgttttctctgagagaagctctatggctttacctcaaaagaatttaggcccccaaaatagttttgtgcagtttttagctataataagacaacagacatatttcaatgtaccgagttttaatatgttggagaccaccaaccgattaactttgcaccatcagttcaactcatttttatgcagaactcaggcaaagcttatagtgacctagctgcatatttatttgaactttttaaaaaagtatcatattagtaatattttggctctcatcatcattttatttgaaagttggatcagtgtatrtttaatcacaaaatggtatacagtggttggcttattatgtttgtatgtttcttgttataagaaatgtgagtagttatatatttattgatttaacttttaaagaaaacaatttgtaaatatatttgagccattttaaactggagtcttttgaatttgtaaggcaatgtgttttttattatttgttggctttatcatgagatgtttcataatttataacatttaaagtaaatttttactaataaaacacttgtatttgggtttggttataggtaatagaaaacaatggaaggtagaaagaaacatattaggtgacttacaaaatcattagaaggactcgagggatcatctctaggcagagctacgaagagaagcttttaggccccagaatttcacatcattggctgtgactgctgaagttgctccttgtctataggaagctcaggcgacagcaatctggtggctgtggattgatactcctcaggaaagtgggaaccgcaggccctgcctttcttctcacttaactcagttctgaattcagtctcaccttagtaatagtacatgataagatgctcggaaatctgaaaatgtagtttttagctttccagcctaagtggaacaaaagggagctcccagaggaggctggaatttatgttaagccaattatgatatctgccaccatatttcttttaatctatttaatatattaggttattattagtaagattttatgttatgttaatatattaggttattattagtaatatattagtaagattttatgaatcttacttggaaataaaaaccagtcttactgagaaacatttgaaaaatcagctgcaaaattcaaatcacagtgttcagtaccaaaagctttagattttctgataataaatgaatgactgtctctaagcacattgacttgaagccccaagaagctgttggtgtggctacagctgtgctggagaaccatcgtgagtcttagagacctcagcatattgggccaggatcatactggagatgaagaatattcaatcatttatctaagttaatgatgctgtcatttatttttaaacaattctggatatttaatgctatcacggtttaatttttttatagttttaataaaagacatcatagtattttttatagttttaataaaaagatcataatgctgagctctaatttatttcactttaaccacatgaccttttttctctctttagtggttatcttctcaaattttccaaaataatattctaaaaaaattcttcctccttaggctacaactgttttacctatctctacttggtaggattctagaattattccctgtcatcagttttatggattttcacagagccataagtcgcagtgcttttgaattatacagccttttctgcaaataaatgtttaattcacttttgtaattgattataattaacaggtgctaaaaaaagaattttatgacaataattttggctttctttgtggaaatacagtagcaagattgacttggatatgcaaaataacataatttattacgtaatcttattctgcttttgggttatatttcccactgttagtggaaaaccatcttatccataaagatctttcagttacttatttttttttgcattaatttcatttcttttggatacttggtcttatagatacttagtcttaggtaaatatctaaaactaggatttcagaaaacgccaaactattttccagagttggttgatctaagagttcctgtctttaatggcttctttctaacttttcttcattccagtgaacaggtggatatattgggaaacttagggaacatcatagtagtgaagaaaaggagcctttggcttttcaatgttgatcctctgggttcttattgaatctcgtgccacgtttccaaggcctgttatttcttgatgggcagagacctgtggctgtccttgcccaacaggcctctgcatggactcttgttgttcctgctggccccttaagttttggttaaaactccctattgccagaataactcccatcattccctgtgcagattgctttggtttgcttgccatccagcccgctgcattcttccacgtggatgttgatactgtgcagaatgatttgaagcggttttaagggaaaggaataatatgagtcacgttgagaagttcttagtaaatgtggaggaataaccttgaagttgtttgtggctgtgaaaagaatggaggggatgagggacacgtgaacatctcccctgctgctgccctcagctggtgttgaagcgtggatccaggagtacaccctagacaagatgggatcttgaatgaaaacccaagccaagaatggaagaaagaaatggtggggcttgcgtcacatcgagttcaagcctatggagaagacacacttttcttgtttctttgtttaatcagctttattgaggtataatttacatacaataaatctgatcaagtttaactatatagtttaatgagttttcatgaatgtatattatcctgtaactaccaccccaatcaacgtttctgtcatctcagaaagtccctatatacctctctgcaggtaatgttccctcctacaccctccaccctcctctagttcctggcaacctctgatctgccttttgtcattatagttcatagaatttcatgtaaagacactcatgtagtgtgaagtcatttgcgtctgctttctctcacctagcatgatgtttgtaggatttgcataggtggttgtgtggaccagtactttgttcattttcttgactcagtagtatcccattattcagatacaccacatgtttagcagtgtactataaaataccattgcttcacattcttttaattttctccattctaatgggtacttggtgatatctctttttattataatttggattttcctaatgactaaaaatgttaaacgttttaatgagtttttcatttctgcatcatcatttgtgaagaatctattcaaatcttttgctgttttgtatrtttgagtattcatcctcttagtattgagttgtaagagaattttatgtgttttagttataggtcttttgccagatacgtattttgaaaatactttctcccagtctgtggcttttattttcttaacagtgtctcttgaagagccaaagtatttaaatttgataaagtctgttctatcaattttttctttgatgatttgtgtcttttatgtctactgtaggaaatcattgcctaactcaatatattctcctrttttcttatacacattttacagttttcacccttatwtgtgcatctgtttatttcacattaatctttatgtattgtgtgaggtaagggttaatttgtttatgaatatccatttcttccagcaccatttgttgaaaaagattatcctttcttcattgaatcactttggtatctttgcctaaattcacatatatgcataygtctatttctagattctgttttggttcgttgatttacatgtctctcattatgtcagtaccacactgttttgatgaatgtagctgtgtaggaagtcttggaatgtagcataacttctacaacttatttattttcaaaaactgacattgctcatctgggtcatttgcattaccatatatattttacagataccttgtcaagttcgacagaaggccgttgagattttgaattgcctgtatttactctacagatcaatttggggaaaattggtaacaattctgatccttcaacagggtatccttaactatttatttaggatttgaagttttcttaccttgcattttgtgacgttactgaactcacatattcattctagtagtttcttgcagattcctcaggactttttttttttttttgagacggagtctcrccctttcatccaggctggagtgcagtggcgcgatctctgctcactgcaagctccacctcctgggttcacgccattctcctgcctcagcctcccgagtagcctccygagtagctgggactacaggcgcccgccaccacgcctggctaattttttgtatttttagtagagacggggtttcaccgtgttagccaggatggtctcgatctcctgacctcgtgatctgcctgcctgggcctcccaaagtgctgggattacaggcgtgagccactgcgcctggcctcctcagaactttttacctaggtgttcatgccatgaaggggtggcctgcccctccacacctgtgggtgtttcttgtcaggtgggatgagagactgagaaaagaaagagacacaggcacaaagtatagagaaagacaaattggcccagggtaccggcgctcagcatgtggaggacccgagccggcaatggtctctgagttccctcattatttgttggtcattatctctaccatctcggagagggggatgtggcaggacaatagggtaatagtggggagagggtcagcaggaagacatgtgaacaaaggtctctgtgtcataaataagttaaagaaaaggtgctgtgccttgatgtgcacgtacacaaacatccaaacatctgggtgccgtaaagagcagtattgccttsagcatgtctcaccttcagccctaaggcggttttctcctatctcagtaaatagaacatacaatcgggttttacaccgagacattctattgcccctggagacattctattgcccagggtccagcaggagacaaatgccttcctcttatctcaactgcaaagaggccttcctctttcatttatcttcctcagcacagaccctttatgggtgttggctgggggatggtcagttctttcccttcccatgaggccatcatgtggggagaaaccttggacaatacctggctttcctaggcagaggtccctgtgtattgtgtccctgggtacttgaggttagagaatggtgatgacttttaacaagcatactgccttcaagcccttttttaacaaagcacatcctgcatagccctaaatccattaaaccttgagtcaacacagcacaggtctctgcgagcacagggttggggctaggattacagattaacagcatctcaaggcagaagaatttttctagtacagaacaaaatggagtctcttatgtctacttctttctgcgtagacacagtaacagtctgatctctctctcttttctgcacaatgccatctgtgagtagtcagtttttttttccttttcaatctatattggatacagaataatatctattatatataatgtaaactatgttattwgtatgtatgtgtgtgtatgtatatacagtttttaaaagtttactgaaaaggagtggtgagaatattgaataatgttgaatataattcgcatattcagcattgtagaattacatattgttgaataggagtggggcgatcagatgctcttgccttgttctccatcttagtaggaaagcatttaatcttccaccattaggtgtgatgctacctgtagactttttacagattctctttatcatgttaaggaaatccccttaaattttagtttgctgtgagcttttatcctgaatgaacattgactttttttccctatgtgtttaatcactgggatcactgtcttgcattgccttgtgttcaatgtctaaaaactttcatttcacatattttcttctgattttctaaagttgtttattattagaaggcaatttctgtagcagttaatcattcatgagcaaaaatggaacattatttttaatactatatatagttttctttcaacatgtggataaaattgacttttataaaagtataaagttttgtcacttcaagctatagacaaagggaaatgaatattcattgatcattgccataagctgctaatagttttaaaataggtaaaaagtcttaattcagaattgtccatgagctataatttcctaactgatacaacagaaatgctgaagaagtaggatggtgttaacargagccgcattgctgaacattgtggactattcatttttttccattcctagtctttattagttagtatttgtctcaagggctctaagcatttgtctggcttcttatttctttgagtggtattgataataaataaaacgtatgtccagtgtacatttatgtattttgtagtgaggctgcattccttctggagatgtaagtgtacttgaggcaggatcctgcttcactgccatggagtaaacaacctcctcctctgctgctggtcccctggtcccctgatcagactcttccccggctactgttggcctgatcagactcttccccctggcttttttcctctgcctgccttgttagatggtctgaaggagaaagagaaccactcattatttttacctatctgtggacattaagaatgttttttaatgaaaagtactctggtcttgtaattttcagtgttcacagaatccaagaagagacttaatattataaatttcctctatctagtgcacatttgatctaatgtcagataagtggaatgaatgtgaaactactacatgcagacataatagagctgctattttaatttttcctttgaacagttttagaagagaagttctaagatgtaccaatgaagttagtagtaattagagcaatcatgtactctaataataacaaaaacattttcaaaagtaaggtgatagatttgcagacagctaggaacttttacagcacatgacccagattcttcaaaatgagacaatttaagtcagcaactttaaacttcattctaagttcttaatgtttatattccatttagtgccaagatcttctactattaacactttccagttaagatctctgctgatagagtaatgtgtgatagccaaatttcatggaatcttgtatacctcagagaattgctagaatctggaggtgaacaatacattctgggattttttttccaacttcagaaaagtaccaggtcacactttcatgctaaactcttactctgttactgattttttttttttttttttttttttttttttttttttttttggagacagggtcttgytctgtcatcctggctggagtacagtgacaggatcacgactccctgcagccttgaactcctgggctcaagtgatcctcctgccacagtctactgcctcagccacttgaatagccaggactataggtgcatgccactgcgcctggctattttttaattttttgtagacatggggtctcattatgttgccccacctggtttcgaactcctggcctcaagctatcctcccaccctagctcccaaagtgctgggattacagctgtgagccatggkgcctggcctaaattgttataaatatagtaagaaagctttggacttctcatttccccacatcctaaatactaaagcaacataataaaaatgtttctaaagagtcacaaaacattgtaagagttttaggaaggcttagtaaatttttattcataattmtaaagtttcttagatgtttataaatagccattttaaactatgaattttcaggtattattgaatatccaagttaagacagtgaatactgcctcaaatgtcgacagagtttacatttatttgtttcttctgtcatgatcatagatacgtttatatgtttcaacagctcttaaagcatcagtagataaattcagataaatataacaaaaaattccatgtcttggcctctctggggtagattttctcaggtttctgacggtgaatcttaaggttggttgcatttgctcctgggcctgatagcatctagattcaagttacagaatcaacacagttgtagatcattcagagatgactaagttctatgaagtaaactatggaaaagaagagtcgtatatacgtggttgtgtcatgatgactttcttgaactttgcttttatgtccttggtaagtcaaatccaatttatatatgatattttcttttagatatgagagaaagggatatcatcatatgtaaatattagttatactagtatatatattcatatttctcatctctataaaataaaatataaggaaggcactttacaagttgttacattttctataggagaagaacacrtgcagttcacactatggctgttttagtcatcacttttcatttatggaattggaaagcttcgtgttactctcactgatggtgatgggatgggatgggatggtgtcattctgtttatatataattaagtacaaaagattatactacaacattgtcagaaaatgtgattacaacaagttattaaaaatcattataatctctcagagaagaaagtgattgattttccttttttttgatatggcttgtgaacttatatgtaacccccattttttatttctgatgaaaaatatcacaagtatgtagttatttatattttccaaccatccagtgatttgtagtttatttcacgtgttgtcattggtaactctgcaaagtagtgggtttattagcacagatcagttaacatggtactccagttcttgattacatgactcatgttcttccacaaacgcttagcttttgatgcttaaaacatatatagtaagaatgaaaataaaaataaactgattttggaaactgtatttaatagttagacaaagagattttaaacctctggttaaaagtagcgatttctagcattttagcactcttttygtgaccaaataaaaatgttctgtatgcaaaatattattatctgtgtcttaataatcacagaatcattttggaatgattttatttttcagtaatgtaaaagaaatactagacgtggtctcttattgtcaagaaatttatatttagttaagaagttaagtccttcacgtgtgtccagctatcagtggaaggcagaagagagttaatgttaagttgaatggacaggaacaaaacaatttattgagcattctctctgtgtaagaattatccatatctcatttaatcctaacattatcctaaatcatctcattttaaaaacataagggaggcaagtttgaaaaggtcaagaaacccatgtatggttggtaagtgaagctgagatttgaagaaagatctattgactccaaacctgtcttccttatttctgtcgtattctgatttcctaacaggaaaagagcatagaaaagttctgagaaaagagagatcagtgggcttattgctcttgagaggacctctcagacagactagaagttgagctgagtctggaaggacttagtatttggaaataagggggtcatcttcggtggcaggagtatggcaggcacacttgcgtctcaacgtctttatgcaggctgatccctctgcttggagttttcttcctggatggctgctttgcttatttttgcttaccttctccaggagactgccgcaaccaccctttttttatactgcgtcctgctccctatcctcttcccacattgccttccaattccccttatcctggtctgcattctcccaaccaarcatttccaactcgctgtatgatatagttatttatcaagtttattgacagtcacctgcatttagaatacagcttcatgaagacaaggattattgtatcttttttattctccaagatattgtaagcataaagaactctgacaggcacttagtaggtgctcagtaaatatttgaagataaaaggattttgarttaatagtgagcaaaacatatttgagagtctagtgaaaccagccttatttgagtgaaaagagtcttatatattgtagattccagctggataaatagagtcaamccagattagagcaaaggaatttattattttgtaagaatgagagttttctacaagattttattttaaataacaatgtattaatttaatgatgtaaaagtaatatccttgtaacactttgttgcatttaaaaaaatactcgagtgtttttagttttacctggtaaaattgacttaatagggaaattagctatcttgcatattaaaaaagtccctaagtaaggcaggtttcaaggttggctgattaatttggctagaaatgtctctgaagactcaatttctcatttctttcccttcctctttttctccttcctgtccctttctctctccctttcccctccaccccctctccttctctctctttcccctcctgtctcccctctgtcttccttgctgtgttgttgttgatttcaggttgatgcctcttgttattacagggtggctgccaccactggctaggtctgagaagctttcttgtttgtgattctctcaaaaccaygaaatttaagtcattttcttcagtctgattggagacatttattcggtgtctggcatgaagtagacttttggtaaatacttgtggatgaattgttaaaattgcataattgttagagatgctagaaatggctggtgggaggctgaatgtgctgcttcaactcctaagatacggatatatattaaaaagatgagtggtttatgaatgttcatagaaatacttatctcccataaagagaagatacgtgtgcttcacttagaaatattaaaataactacagcctgaaaggcaaattgagatggatagtgttgaaggatagaggtgcagtgaagtcagtcacaaagttctccatagtaycagtgtgtgacttaaatttcttttcccatcctgtggaatgagcacagaaagcaggctacttaytcatggaagatttagtaaaaatgaccctatgttaaacctcaaggaaattatcagtcaattaaagtagaaattgttcaaaatgcattctcagtaactttgtagctagttcatatgaaaatcacaatttagaatttggaatgcaaaatgtggttttcaatattaatttctaatataggcattaaatgatcacctttctttattctggatttcttctttrttaaataaataaataaatatatatatatatatatatgcacacaccatggaatactactatgtttgttgtgtgtattacacacacacacacccccccccacattttctttatccactcattcattgatggacatttgggctggttccatatttttgcaactgtaaatggtgctgctataaacatgcatgtgcaagtatcttttttctataatgacctcttttcttctgggtaaatacccaggaatgggattgctggatcaaatggtagatctacttttagttctttaaggaatcgccacactgttttccatagaggtcatactagtttaaattgccaccaacagtgtaagagtattccctttccaccacatccactccaacatcagtgattttttaatttttttgttatggccattcttgcaggagtaaggtggcatctcattgtggttttgatttgcagttccttggtaattagtgatgttgagtattttttcatacrttttttggccatttgtatatcttcttttgagaattgtctattcatgtccttagcccacttactgatgggattgtttttttttttcttgcttatttgagttccctgtagattctggatattagtcctttctcagatatatagattgcaaagatttctctcactctgtgtgttgtctgtttattctgctgattatttcttttgctatgcagaagcttattagtttaaggaagtcccatctatctttgcttttgtggcatttttgcttttgggttcttggtcatgaagtctttgcctaagccagtgtctagtagggtttttccaatgttatcttctagaattttatggtttcaggtcttagatttaagtctttgatccatcttgagttgatttttgtataagatgagagatgaggatccagtttcattcttctacaattatcccagcactgtttgttgaatagggtgttctttccccactttatatttttgtttctgtgtcaaaaatcacttgacagtaagtatttcgccttatttcttggttctctattctgtttgcattggtctatatgcctatttttataccagtaccatgctgttttgaggactttggccttatagtatagtttgaagttggataatgtgatgcctccggatttgttctttttgcttagcctttctttggctatgcaggctcttttttggttccataggaattttaggattatttttttctagttctgtgaagaatgatggtggtattttgatgggaagtgcattgaatttgtagattacttttggcagtctggtcattttcacagtattgattctacccatccatgagcatgggatgtgtttccatttgtttatattgtctgtgatttctttcagcagtgttttctagttttctgtgtagcagtctttcacctccatggttaagtgtattcctaagtattttatttttttgcagctattataaaaggggctgagttcttgattcaagtctcagcttggtcgctgttggtgtatagcagggctacttatttgtgtacattaattttgtatcctgaaactttgctgaattcgtttaccagttttaggagctttttggatgagtctttagggttttctaggtatatgatcatgtcatcaccaaacagtgacagtttgacttcttctttaccagtttagatgctctttctttctcttgtttgattgctgtggctaggacttccagtactatgttgaatagaactggtgaaagtgggcatccttgtcttgttccagttctcagaaggaatgctttcagtttttcacattcaatataatgttggctgtgggtttgtcatagatggcttttattaccttaaggtatgtcycttttatgccaattttgctgagggttttaatcataatgggatgctggattttgtcaaatgctttttctgcatctattgagttgatcatgtgatttttgtttttgattctgtttatgtggtgtatcacatttattgacttgtgaatgttaaaccatccctgctatgaaacccacttgatcatggaggattatctttttaacatgatgttggatttggttagctaggacttttgcatctatgttcaccagggatatttgtctatagttttattttttggttgttatgttttttcctgggtttgctatctgggtgatactggcttcacagaatgatttagggagaattccctctttctctatcttgtggaatagtgtcaacaggattggtaccaattcttctttgaatgtctgaaagaattcagccatgaatccatttggtcctggacttttttcttggtaactttttaattaccatttcaatctcgctgcttgttattagtctgttcagagtttctgtttattcctggttttatcttagagggttgtatgtttccaggaatttatccatctcctctagatttcccagtttatgtgcataagggtgttcatagtagccttgamtcatcctttgtatttgtgtggtgttgtttgtaatagctcccgtttgtttcttattgagcttatttggatcttctctcttcttttcttggttaatcttgctaatgatctctcaattttatggatgttttcaaagaaccacctttttgtttcatttatctttgtatttgtttttttktttcgatttcatttagttctgctctgatcttgcttatttcttttcttctgctgggtttgggtttgttttgttcttttttcttkagctccttgaggtgtgaccttagattgtctacctgtgytctttcagacttttgatgtaggcacttaatgctgtggacttttctcttagtaccacttttgctgtatcctagaggttttgatagatcatgtcactattatagtgtagttcaaacccaatgatcattcattagcaggtaatttaacttctctgtatttgtctgattttgagggtcccttttggagttgatttccaaytttattccattatggtctgagagagtccttgctatgattttgattttcttaaatttgttgagatttgtttggtggcctatctgatggtctgtcttggagacagttccatgtgctgatgaatagaatgtatattctgcaattgttggctaggatgttgtgtaaatatctgttaaatccatttgttgtaggatgtagtttaagtccattgtttctttgttgactttctgtcttgatgacctgtttagtgctgtcagtggagtattgaagtcccccactattactgtgttgctgtctatctcatttcttaggtcttttataaatttgggcgctccagtgttaggtgcatatatatttaggattgtgatatttttctgttggactagttcttttattattatataatgtccctctttgtctttcttaactgctgttgctttaaagtttgtcctgtctgatgtaaaaatagctactcctgccacttgcttttagtgtccatttgcacataayatctttttccacccctttactctaagtttatgtgagtccttatgagtcaggtgagtctcttgaagaragcagatacttggtttgtgaatttattttgtaattttttggagactgggtcttgctctgtgccccaggctggagttcagtggtgtgatcttggctcactgyggcctctacttcccaggttcaaggaattcttatgcctcagcctctcgagtagctgagattacaggtatatgccaccacactcagctaatatgtgtatttttagtagacgtggggtttccccatgttggccaggctggtcttgaactcctgtcctcaaatgatccacctgccttggtgtccccaactggcatgaaccaccacgtccagccttggttggtgaattcttacctattctgccattctgtgtcttttaagtggaacatttaggccatttgcattcaatgttagtattgagatatgaggtactattgtattcgccctgctatttatttaataccttgggtttttttcattgtgttgttgttttataggtcctgtgaggattaggctttagagaggttctattttggtgtaytttgaagatttgtttcaagatttagagtttcttttattaacagcagttctcatagtgctggcttggtagtggcgaattctcttggcatttgtttgtctgaaaaagtctctatctttcctttgtttttgaagcttagtttcactggatacaaaattcttggctgataattgttttgtttaaggaggataaagatagaatcacaatcccttctgacctgtagggtttctgctgagaagtctgctgttagtctgacaagtttttctttataggttacctgctgctcttgcctcacagctcttacgattctttccttcatcttgactgtagataatccgatgactctgtgcctaggcaatgatctttttgcaatgaatgtctcaggtgttctttgaccttcttgtatttggatgtctagatctctagcaaggctaggtaagttttcctcaattgttccctcaaatatgttttccaaacttttagatttattttcttcctcaggaacaccaattattcttaggtttggttgtttaacgtaattttaaacttcttggaggctttgttcatttattaaattcttttttctttgcatttgttagattgggttaatttgaaagctttctctttgagctctggagttcttctatttgtttgattctattgctgagactttccagtgcattttgcaattctctaagtgtctccttcatttccggaagttgtgattgttttttatttatgctgtctatttcactagagatttttccattgatatcctgtgtcattttttttgatttctttaagttggatttcacctttctctggtgcctccttaattagcttaatagtcgacctgaattctttttctggcaattcagagatttcatcttggtttagatccattgctggtgagctagtatgatcttttggggtgttaaagaamcttgttttgtcatattaccagaattgtttctctggttccttctcatttgggtagactgttgtcagagggaaggtctgggactcaagggctgctgttcagattcttttatcccatggggtgctcccttgatgtgattttcttccccttcccctaggaatggggcttcctgagagtcgaactgcaacaattattatttatcttctgratgtarccacacagcagaactaccaggttccaacttgtctctggggagtgtctgcagagagtcccatgatgtgatccatctttaggtctttcagctgtggataccagcacctgctccagtggaggtagcagggagtgaaatggactctgtgagggtccttggttgtgtttttgtttagtgcactggttttgtgttggttgtcctccagccaggaggtggcactgtcaagagtgcatcagctgaggttgtatagtgagaagacaagctcgccctagggtcgcctttgggtaaatattcaggtttctacagcgatgggcagggtgggctttgtctttggttaccagggcaggtagagaaagaccatcaggtggaggcagggttgggcatgtctgatctcagactccccttgggcaggggttgctgtgactgctgtgcgggatgggagtgtggttcctagaccaatggagttacgttcccagggrgcctctgctgtgacatataggtcaccagaaaagtggggtaaagccggcagccacaggcctcacccagctcccrtggagcctgcagctcacacccaccatgccccgcaacacactgagtttatttccagacaggtggtgagcagggctgagaacttgccccagggtacaagcctccatctgagaaagcaagtgaacccacagttcctcggctgtctcatggagcctgcagctgcaatccacctcctacaaagggtctgtggattctctaggcttgcctgggatgttcctttggtagttcttggagcaaaagttcacgatgtggctttacacaggctgctctgtccaccgagtgggagctgcaagttaggcctgcctcctatccaccattttcccagattttgatttataaagtatttaaaattaatttcttcccttgaaggctatcctattaagtacttgctgtgaacgctgtgcttactataaaatccccttagcgcatttatttttcccataaactatccttgctaaggcttttaaaaggtattaaaatgaggtttggatcaaagatgctttatctttctctaaaaactaaatttctctttaacaagcatagacatttattttctgaaattatttcatctatttgtttcctaatttattcatcccactggtatgcaagtttattgaggtcagagataagttcctggcacacagtggttcctcagtaaatatttgttgaataaaaacacatgtttataaaaatcctatgctgcataaaaattaatgtcctctggaactttttttttttttttttttttttttgccaatttgttcctcatcagtgcctcaaaatttggtattcctggcaattttcttcttttccatgttcctctaactttttatttcaaagagagcttcattgctgatctgagtgaaatgctgttctggtacttcaccgctgagtgtgtgctgcaagtgtgcagggaaaagggaacattctacaccatgtgttcttaacctgaaattcctgtaagatctgcaaggaatcatgaactgcatcagtgggagggggcagtattctctctgtgttaccttgaaaatggtctttgtgctgggggagggacactctttttcagtaacaatttatattgttaacttatttcactttgaacttgtaaggtggcagaagttaggcaccttgcccaatgtaatatcrctagtgactgcaggtttgggcttcaaaccttagtccatgctctaaaccagcggttcccaaccttttggcaccagggaccagttttgtggaagacagatgtttcacagactggtcggaggagtggtttcaggatgattcaagcatgttacatttattgtgttatttgtattattattatgttgtaatatataatgaaataatggtacaactcaccatgatgtagaattagtggaagccctgagcttttttccctgcaactagacagtcccgtctggggtgacgggagacagtgacacctgaagtgtgtcacttatgtccaggctactctgtaatctcattttagtcgctgtcactgcagaaaaccctgcttcacaaagacaggttgttggacayggaagcaggcttttcagtgcttttgtggcaacctcaggatattctacctggactttcatccagaacatatggagatttgaagttgtctcaaacatatttttaaagccactgtcatttgccatctcaagcagttgatcctcttctagcacagagagtcagtttaccgggcttattcacaaatgcgtcgcggatccattccttcccagttgggggttcttttgtggttggtagtattgggtaggtgatcacgtgtcagccgtgggaaagaaggccctggctccatctctttcacaatctctgctaatgtttgaaacatgtcagaaatcccagtgttcactcgtcaccctcgtaattccactttggctttgaatgcagctgctttatctgccgacttgaacacagctgtcattctcccctgaagtgacagattgatttcattgaacaggttaaataggtcacacaagtaagcaagttttgcagcccattctatgtcactgaaatgtgctgccaatggtgactttttttctaaaagacatctctggggtggtttccaaaactctggccagcaatctacctttagaaagcatctcacttccgtgtatgagatgtgtgtgctctgcgtccatctcctcacagagctgtgcgaacagacgtgagttaagggcacgtactttaatgtggttgatacttttaatcacattctgctgaacgttgttcacgtgacatttttcagctcgccagcctttctctatggatgacacagtgcacagactcacattcagaagcgacctaaggagctccagccacacaattgtttagtatgtagtacttatatacagaagcgacctgtttgacctgagtagtgaaaccagaaagccatccagtcgtggcagctgctctgtccatgtgtataccaacacaaaatgaccaatttagtttttctgatatgtaatcattcacagactagaatagttctgcagctgtggtgttcgttggcaacaaaagtgcacataacatatcctcatgcacatccccccgaaaaatatatcacacattaacaagcattgttgccttgctgtcaacattgatagactcgtcaacctggattgtgtgccattggtgattcattaatccccttttacagttgtgtctcagtatcctctgctatttcattaattcctctagttacgttgctagccgaaagaggaacacctgccacctttcgaactgcagcctctcctaaaagttgacaacaaatgtccttagcagcaggcaggatcaactcttcaccaacagtaaagggcctgttagcttcagcaacgcagttagccactaagagtgatgctctccgccgggcgcggtagctcacgcctgtaatccctgcactttgggaggctgaggagggtggatcatctgaagtcaggagttcgagaccagcctggccaacatgatgaaaccctgtctctactaaaaatacaaaaaattagtcaggcatggtggcgggcgcctgcagtcccagctactcaggaggctgaggcaggagtattgcttgaacccggaaggcagaggttgcagtgarctgagatcacgccattgcactccagcctgggcaacaagagtgaaaatccatctcaaaaaaaaaaaaaaaggatgctgtcagtgtagacacatttgatgaagttggtggccttcaataattgcctgtgttcttggtgtacacattttttaatttttttgaaaactccaaagacttgtctttttttttttttttttttgagacagagtctcactctgtcacccaggctggagtgcagtcaygygaccttggctcactgcaacctctgcctcctgggttcaagtgattctcctgcctcagcctccagagtagctgggattacaggcatgtaccaccatgcccggctaattttttgtatttttagtagagacggggcttcactgtgttagccgggatggtctcgatctgacctcgtgatccatccgcctcggcctctcaaagtgctrggattacaggcgtgagccaccgcgtccagccaggcttgtcttttaatgcagggtgcttggtctccgtgtggtaatgcagttttgaaggtttcatggcttccttggatagctggtcrccacatayacacagtggacttgaagaatgtgcatcacctgttgcaatgaacccataatttaagtaggacttgttattttctattaaatgcagctttcttttcattggcagtcttggagtcttctgctttctcatgatgaggtcttcccccttttcaaagaagctctacagtgatgtttgtcttttactcatcttggctagggttggcttgtgggcttcccaaaactgtgactgagacaagtgcatagtgtgggaaagaggtgcagatggaagtggtaaataaaataataggcaagtcacacgtggactaaataagtgtcagattctgagttaaagctgccaccagatgcagctgtgcaattgaagcactcagctcacttgccactgtaaagcctgccaccagccagatgcagcttgtcacttgcccctcactgatagagttttgatatgagtgtgcaagcagttaatttcctgtggtctctgtgctgtcaaacctctctgctaatgttaatctgtatttgcagccwctccccagcgctagcatcaccacctcagctccatctcagatcatcgggcactagattctcataaggagcacacagcctagatcccaagcaagcaagtgcagttcgcagtagggtttgcgctctatgagaatctaatgccactgctgacctgacaggaggcggagctcaggcagtaacgcagtgacagagagcagtygtgaatacggatgaagcttcgcccrcttgccgccgctcacctcctgctgtgtggcccagttccggcctcctgctctaagccactgtctatcatatgtgttcccacagtgcaactctactctagaagagaaagtaaagtttctgtcttcaacatgcttaaatttttcttgggcaagagagttcaactaaatgaaaattccaactataagaaataggaggcaatgttcccttacacaggaaatcccactgtgttccttaattttctcagttaagtagaatactatagttcttaaatatactagacttaacattgatttaactaaaattgagtgttaagttggagacattgattttctaaatcagctcctaaggggaaaagccagaaatcagccataggtaaatttttttctttcaaatactttaaattgcccataaagcaaaaaattattgattttataaacacatgtcacaggctatcttatgcacactcaagtttgagaagtactaactaagcaagactaagagaaaaagccaaaggaacatttatttacagatgtctggacattcacactgtccttgaactaattttcagatctgtagtggtgactagcagagggtagaaaattccataatgtcatagctaggtgactctatgcggtcttgatattaaacctgttcacacattgctccttttaattatataccttttaattgtttgactttttcaaacattctcattaaatattttagatcaaaactttaaaaaattaaaagcacatatgcctctgtaactttagaatctgttaataaatttgttgtaatgattaaatagtctcatcttcagagaggcttaggagaggattaggagttgaagagtaaatgaaatayttctatggtgccacttcaatgtagaagataagatattttycctatgacarttgttacatgtgttacattcttagggaagtcagaggccgtactctaaccattatgcaacaatgataagaaaatatatgagcaagtgtgtattaatacagtaatacaaaaactaggtactgttgatttgaatacctgctgtcctatagcattgagctacattccatttttggtatgttaagttcattctgatggtgacagacaacagggtttgattgctcaagaagacacaggaaccaaaatgatagtgcttgcagatctgaagtttattacaggaaaaagacagcaaggagcctgttgatgccaggctgagctccagtggcccctcctcttagggacacacactttctcacagatcagaatcaatgacctgtgtgtgcaacactcagaactggtggaccaagaggaggtatctgccagcttgttttataccctgttggtcacacaggcatcttcttgcctgtagccagccccagtgggagagccttccagggattctcacctagaccctgtgcaaaccaccccagtctcactttaccaatcaccaatgctgacaagctggtataaacaaccccacaactcctcagacacacggaacaaagcagcactattattaatgactatgtttcatgccttgaccagagygccatgcaggtacatttcttatttcaacagaacagctcacaccagctccaggtctgctggaactaaccttcgaagcacgagtgttaaaggtcatttgggatattcatgtgggttgtattgtgtagaatattgaagtgttataaaccccactttaggtatgtgtagttgaatataccccagtgtagctattcttgcaggcatatcatatccattttagaacctctagaaaggtaaggcggtggtggtatttcattttccctgtgaaattaatgtatacttcttaactcgtaatatgttatgttcaacctttacagtttaaaaaatcaaattcatagatttcgtaagaggaagcattgcaaaaaaacccttcaagtttattgaaagcaaatgacatgttttgtattttaaaacctactcagtcgctaattgtgtttttccctcttccttctctatccccagatgaatcrgctcctaaggaagtcagcagggtaagtgatgtgaatattatttctactactgcagtataggaaatgaatctgttttgtttatctctcagtactctaacacattaaagtatcagaaagattatggcaaaaactgagtttcctctccaaagtatcactcattaatatggaataaagtcagtagagagggtgcaaattgaaggcctcaagactgagtacggcacacagatgcattttgttcggctgcacgtgcctatggggttttctgagtcagttgccaacatttagaaattgagacactgtatgtaaagaytggatttctggcttcccttgaaccagaaggtaagataactctcacagggcagcagtcttcccagggtgggaagcggaagctgccttcagctgcatgatgctctccaggcagccccagtcctccatgtagctggctttactcatgtccgctacctgcccaacctctgcctttgagttcatgcactttctttttgggagaacaaaagatgacaactcgtgttgaaagcaagatattgcttagaaattttataaatattaaaggtactgttttcatggcctagttaactttaagagtcttagcaagcttaaaaactatggcaggtgagtactgaaagcatttagtatactggttatgctataaaattataagtgattaattacatttggaaaaaagtgtcttagttttttctgtattacacagataaagatcttaagtgtggatgaaatattgaaaataatcagtttgaatggaacttaatgcaaccttagagatcagtttttattgtaagacataaattgaaaaacttaatagaatcacatatgcagatatattcctttatttttgatcatctgaagaaagaaatctctaaaatgacctgggccagcgctgggggttgggggtgtggagataggggagggaagaattccttgtgtccatagcaatgtaggattctcttgaggtctctgtgagtctcagggtttcactgggtgccttcgctattaatgtcacatttgtggaactcacaattgaagagttccttggtctggacgcttaaaaggtaccaggaagtgacagaggggyggacctagaattttggcagctgctaggagcagcagaaaatgctgaaaagtgatgcttgaggataagatggggactctgaaaagtgaactttggcagagtcataaaatattacagtgttgatattggcaaagctgccatgtgttcagacagtgtcattgacaataccacatactgttttataaggccattagaaaaaatgatgaaactttatgtagtgatttttcttcgctattattcataagattctcttacattatgccaaatttggagaaaagcrcatctctgagaaatactaaaggtatgagctgataacctagaaatggtatcagttgccaagatctctataacgtttttttgaaaaaacgtaccccgtatcttgatcaatrcttatttgactaatactcagagtttccttatgaaatagtatgccactattttcaataaagattcagatttagaaattcctcgggcaaccttttggtaggtggtgactggccagagggcttctgctctaacacatccctgacagaaggcatgctctttagttccactaaaggtgctggttacactctcaggcagttctgttttgttttggttttgttttttctttcccctttctctttctcatatactttttttttttaattgaggcaaagcctcagttcatcacccaggctgaagtacagtggtacagtcagctcacttcagccttgactgcccgagttcagatgatcctcccacctcagcctcctaaatagctgggactacaggcctgtgccaccatgcccagctaattttttttttaaatagagatgggatttttccatgttgcccaagctagtgttgaactcctgggctcaagtgatcttcctacctcagcctcccaaggtgctgggattacaggtttgagccactgagcccagcctaggcagttctaattatgatgaagtactttctcatktagaaccaagcagcctcccaaaatggccattctccagtatttgttttgacttttatttcgtatccaaaccctttgagtatagggattatgttatgtcttttctagtaaaacatcttagtttctaaactttattttccatatgcctccttaagatgtgggttgacagtcttyggacaaactatatattattaatatatctttaaaacattgcagccttaacactacagactaattgcgtcttgaccctggtaaaatgaggtgggacagatacctgtcttagtttgaaacctatgtatctgtcagtacggttttaatggagaattagttttttaaagaagctacattccatttctggttattgagctttgagtaaactatcattattttttcatgaagtcagacctgtaggttttatgtctcttccccttcccttttctctattttcctttcctctctttgtttccctgtcttcttacctatcattcaatgaccaatatttttttagcatttctgttttaggcattgttctaaggtgctgtggatacaatggtgagcaaaatcgacagtattcaggttctcatagtatagaggggagttgtggaaacagttcagaaaatttatggatgtgtatatgtgtgtttgtgtacatctatcaggcagtgataaatactatgatgaatacatggaagaataaagcagaataaggggcttcagagtgatggtggttcagagggtgcttattggcttattgcacatatgcagtggtcaggagaggttaatttcataagtgaaatttgagcgggaatctgaagggaatgagagaatcagcagaaggaggagacaggaactgcagaggccctgaggtaggccattgtgacaggtgcagagtgagtcatgcggagaccagtaagaaataaggttggaatggaattgggggtatttaggtcttctagctgtcgaattgagagtatacacagtaagagtggaaacaggtagacccagtggtagtctaggagtgtaggcaggggaggatgatggctaggattagggttgtaatggtgaactaggatcagaggttgggtgtagaagaagaaagagcagacaggctttgtttatgggagggtaaaccaaaaagtatccaagacctgttacagtctacttagaagctgattttgacaaggttaaggacatgcctatgacaacctcaggaggttctgaggtgtgtccagaatagttgggctacagcttggttttatacattttagggagacataagatatcattcagtacatgtcccttggtttggtctggaaaggtaggacagctggaagcatgggggccaggtagcatccaggtcatagtcggattcaaaaattttctgatgggcaattagttgaaagagttattatcaragacctggaatcaatagaaaggaatgtctggcttaaggtaagggttttggagcccaagcttttatcatgcaaatgaagcccccaagtagcaggtttcagagctcttatcagaccagacagctaccagaatcttagactctcctggatcagagaaaagacctggaaagggaaagggtttctctacagaatgtagattttccccaggagacagctttgcagggccatttcaacatatgtcaaagaaatatatttggggtaaaatacttcaatttctttcagggcctgccgtcatgtgatgctgctatactagagtcaggctggagtttgatgtcttatagctacaaaaagtctgtttcatcagtcttaaaaccttttttagtgttaatgctggtcagctgtgcctgaatttcaaagggagaaggttgtaatgagacatgtccaaccccctcccccccatcattgcctgaactagattttcaggtctactttggaatgcccttggctaagaggacagtctttcagtcagttggggaatgtactgttttatttttggtttgtagttgtatatggtgggtgagaagagaggaatsagtaatgactcccaacttttttgatctgagcacttgatagaataaaatttctccttactgttatgcagaaaactataggaggaatggggttgattgagattggaaaattagtaagtttaaggaatcagatacggaattggagatttttagaaagcaagtgcatatatggtcaaattaaaagaaaagttcgtaggtagagatatgcatttgggagttcgtggtgtataaatgatgtttaaggccgtgggagtaggtgacacttcttagagagcttgtctgtggagaaaagagtcaagacccaagcactaaactggacactccacttgttgagtggtggagaagatgtggaaagtcagcagaggagagaaagaaggagaaatcagtgaagtcagaggagaccaaaaagtttgtcagcagattttgttttagaattttagctgcaggactgtacctttatttcaccttcattccatcttttgatccatctcagcttattgagatgagtctcagttttatttctgttatctaacatattatttatttctctatgtttcgaagtctcaaatttgatgttttttccaagctgctttcctgtgccccctttacaataattatcatctaggaaatgctgagtgtggaaatgtcacctatgagaataatgtgagattgtgtcaaatgcacttttgaaactactgtatcttaacctactgtatttttctaatcagtcattgtcattcagtcaacaaatattaggtgagtcccaattcatctaggctcttgagatatctcgaggacaaactagacagaaatccctgcgctcatggcatttacatagtgtgtggtagagtcagtaaaaataaataacacaggcaccgtgctcagtggtaatgagtgctgtggagacagaaaagcgagaggcagggtaaatgatgtgggaccaggcaagcttggctcactgggaacacatttgaggaaaaacctaagggaagtgaaggagtgaaccatgctgagaaccgggtaggagctttccatgcagatggtacaggaagtgcaaaggccctgagacaggaatatgcttggcacatccctggaggcatagcaaggcagccatcttggctagatctgagtgagtgaaggaaggagccttggtcggagatgatgccgctgggggggatttgagggatactctgtcagtcagatctctgttggtcatttgttcccatctaatccacaatattaatcctttactttattattactattactctttttaagtggtttcagctcctaagtcaaaaagatttctgacaagaacagggagataaaaatgtcagaataggaagagtatttggatgctgagttgctagaaaatgccaaattccagccaggtctagaatttgtgggtatagactttacccccaaaatgctccagtatttttcatcacactcttgtatttaatgttttcaaggagaaatctgagaccattctgattctttttcttagtaaatgttgcctttttcatttctgaatgtatttataagtgtctcatttgctctttgaatttgttactttcactaggtcatgtagatgctttaattttgagtaatttaacctagtatgtggtgagctttctcaattgttttaaaagtcctttttagttcagggtattatgccacttgtttcttggtgcatggggttctttcacatttatttcattctcttcaaggtcactagaaatacccatgtctttctcctttcctggttcttttactacacattctagaacctctcagatttattctctttgtcattgacttgaacttctctactgtttcttgttctgcttaaattcataatgactcttttaaaattaaaggttacttctgtattttgggtgtttcttcttcatttcaatctgtcttattatactgttgataatctctcattgttaattctttaattatcttgagagtgcaaaacagatgctttctttatattcattttgcatatcttccgtctcacacgacatcccaaattcgcttctatcctctgtattctagtataatactaacgctttggatatttttggtttttttttttcttctttttgtcttatgtgttgaggagtcatttgctgatttttttttaaatgtatttatccttgagtgattttaggtctgctcttcattaatagattatccttatgtctgtttactattcatgtaaatgtccttagcatcctcctgtttagtgtgttggagggctggatagtgagcrtcggtggcaccagttcagtctggagtgactgaggggaaccccgaggaaactagagttgtggacattctcacagggggagttgatcacagtgatttttctctaggttggttgaaacaaattgatgcgctggaatccagatttcattatcttgttttccttttaacccagcatggtaaacagtatgactgtatccattttatttagtgtttctgtatgccaagtttcaaaagaaatgctcaattcagttagtgaatcatgaagtttctctggatttctattccrtgtgtttctaaatacagggccctgttgcagacatgagcatgaactcacatccaactctcagcatattaaatgggatcttgtgtcattacttcccgcagaatattttttatggacttgatgcaacagtgtaattttcttgggaaggagacgttttcattaagttcwtagtgaatgttttcaagttggcttcactggtatgtccagccaaattgtcttgaattttatggcatgcagcagccaaagtcacctcgtttcttcactaattcagcttttctccttgtttttcacttttctttgtttatttcatatgagaatggggagattttcataggatgtcaactttaaaatacttatttttcctggtgtagccagtgttttcttcatatttataaaatttctgttaatgcatttaagaaatttctgaattatctattaatacttatgaccatatattctacagattaattttatattatgttataatcagttttgttataggaaacaatattatcaggagggcaagaaggtttcggttagggcaaaagtgtgaaaaatggtttctttcagaggagtttgagaatggaaggggtttgcacatgctagtgagttccagggcatggtggaaggaattggtcagcagcaggggagtgggcaggtgggccagcctggcagatgtgtggagtagcaggggatgaggtccagggatgcgggtgcatgtgtagagcttaattttcctgttgtttgatggaagctcgaaaaagcagtagcccaaaaacacttagaaactcactcgctctatttctctctctcttgcttttttctctttttctcgatctcaatgtcaggcacttatttaaaatttttccttatggagtctagttttatttggttgaagccatacttctctgtaatagtaatgtcattaaaaatttaggatgttagatgtatgtctgaatacttacaaatactaagagtggaattagaacctcatttagcctaacaagaagttgcgtaaaatggatttttttttcttgtttctgacttttattttaggaccgagggtgcatgtgcaggtttgttacatgggtaaattccatgtcacaatgtacccatgtaaatggtgggggtcattgtaaagattakttcatcacccagtaataagcataatactcgatggtagttactcaaatttttccttcaaaatgtttttactacaaattcgaactggaagagcaatgctaagtttacacagaaggaaaaaagtttatatgaaggtgaacattacttctttaaggaatgttttggtgatttcacacaggagtgtctccctgctattcagatctcttattaatttgtatcttgtatgttatttcttctttgcaatttaactttggtttttttgtttgttttgcttaaaatattttatagtgttgggccatgagggactggatggtagaagttccttaactggcatctgttcttacaatactgcttaagaacctcctggctgcagaagacctagggtgggatgctttgttgcctcagctctttcaaatgtatcccctctcagaaagtaagagagaactctataaaagacattcccccaaaaaggaggattaacataatcaactgtatcctgtgacttcaaatgaaactttggcaacrtctgactagttgtgatcataattatgctctacaactaatcagtcactgaatatagaatttagaattttcagagtttctgtatgaatctgttcattaccttaattgagtgaatgacttgaaaattaagagtacctgagccttgtggaaattgttaaaccactgaccagataattattatacaagcacatattattctgtgaatagaattttcttaaagtagattgcagtaatgttagagaagacactcccagtrtatggttgtaaaagccatcatttctttagtgattatttagttattttatttttttctattaaatatgagctttcttggctgtttggccacagtgttttcctttgcttcaaaatacaggcttgatgagatttctttacatggcaggtgttctacattttttttctctccacttaattgtcagctgtaaccttgcctccatcactcttaattatagtggcctctatatttttgagaagacggaggttatgtgatataagcccttgttgttattctgtatatcaaaatgtctttccatggactctcttcttatttctgtatttggggttgagtatcacactggaatttaccttctgaagacgacttccaacacctgggcttggatcctgttcctatcagctttgtctagagctacattaattcagttaaaatcatttctacttgcattttcaagagatcaggactatgtctctgagaagtattgaaaccagtctaatccagtcagttatatcagttgggaatgtttatttctagtgtcttcttcacatgcatatatttacttggtaataattacaatgcacatattattttgatttctgttttttactatgctataagcatttcatgattttatgcagtctaaaattatctttagtgactaaaaatgccccattgagtttctgtgtgataattttttactttttcattctattggtagatatttagattgttttaaaattttcatagactggttatatttatgtatatagcagttttattcttgtgaaatatttcctaaggaacaatgctaggatccagggttactaggtcaaaggacatgacttatttatgacacttaacacacactgttaagttggtttaactaaattactgttacagttgaaggtttcattgtagtcccattaaaataacaattatataacttttcacgtgtaaatggtatgacactcttttaatgtttttatttaaagcaaatacacatacttctgtatgttaactaattgtatttccttttaccagaatgcatctctatttcttctatgtgttatacattcagaagaacttctctggtataatgtaaatgacacttagatttgaattcctaatttgacattctaatctgaaagaccttttgaaaaacggctttttaaacccaaatgtaaaatggggataaagtctaccaaacctgagagatatagccagaataagattaaaatttatgtccttacaattatttattagaaaacccaaaacaaatttaaaaagcacaggggatgaattaatgaaatatgagaagaaattaatggagcaaaatttaaaatatagacttgattaataatacaaaagatagctctttaaatagatcaattccataaaatagattgtctttggcaatctatttcagaaaaaagaaaatataggcattaggaatgagaaagggaatattaatatggacaccagggagattattaataattaaagagagaatagcaaatactatatactaatgtaattgcaaatttatatgaaatggccaatgttgaggaaattacaaattatcaaaattgaagaagagttaagaaacctgaatatactgctatagtgaaaaaactgaaaaaattaggaaaagaccacctaaaatgacctgaggcccaaaagcttttgctgagtaattccaccaaacattaaagaggagaaaatttctacattatatgaagtgtgctaggaaaataactcatctcaagttatttaaagctaggaaaataactcatctcaaaagggagtattatttttgacacaaaaattagtgtattaaacaaaagagaaaaaagcattaaattaagagactgttaactagttttattagcgcaaacaaaagttcagaaatcctaagtaaatgatttcagcagcgctttaaaataatttttcattgccaggggtgattggcaagtagaaggctagtgtagtaagtctaataagaaattggaccaggctggtggtaatggaggtaggggaaaatgcttgggtttgatagaattctgcatttattttgaaaggagggctaacaagaattattgattaatccagatatgtgatattaaaacagagggaagaaaggaaaggaggcatcagggttttgcctgagccaatggaaggctgggaggccctccatgggagggcctgcaggatggacaggtcagggtgtgtgttcagggggtggttcctaacagacaatcagttttggatgtgctaagttggagatgcctaatagatttccaaatgggagatgttaagtagtaagttgtatatatgagactggagtttaggtaaaygttctgggttagagatataaatttgagatcattagtaatatgatgatttaagaaccatccacatacagatagtagctagagtcatgaacccagatgagatcacttgacaggtgagtgtggctcaaccctggaacataacrtttagaagcctgagacttctaagggaggaagaagtagaaaggaagactgaacacaagaggtggaaagagaatcaggggcatatgtttcttttaaataaaaaattatttaaaataaaatagagcaatcaactatgtcaaatggtgctggagttctaagggaaaggaagactgagagctgacctttgggtttggcagtgtggggtcattggtgacctcactgaaagctgttttcttggagcaattggaatttgtgagagaagagaaattgtaggcagcaatagatacaattgttttatggagttttacctgaaaagagaggagagaaatgggtggtaaatatataggaaagctataaagaggcaacaaaaagctccggttttgttttagtttttttctcttaaaatatgggataaatgacagcatgtttatatatttgtggaagtgattcagtagagagagaaagtttgatgcaatgggacagagaggggaggatggyctaaacagagtctttaagggcttagagaggccctgtcagcctcccaggtcctccctattgcagctttacctgttccttcacaactaattaccatttactcactttccatttctcttctttctatatcatttgaaaagaggttttctaattgattaccagaaaaacaagcgtaaccaaatacaacagaggaagaactagaaagaaaacaatttgtaagaggtaatacttttctatgaatgagtagaaaatctggcttttaatttttaatcaggtgaagtataaaccaaagttgacttacttatcctctaagggaaaggcaccaatcagtctttttcaggacaaagtttttaatactggattttatgaaaatgcaaataagtttatatatctgatttacagcaattttcaataagtttcaaaggcataatattataatgtggttcastgttcaaaaartgcagttgaccgtacagaaggctggattagatcagacataagttagaattacgtggagtcagttctcgttacctgtcgctatggtttgtgtatggtttgtttggccctaacaagtctcctgttgaaactccactgcctcccttgcttcctctctggtcatgtgatatctgcacacactggttcccctttgcttcctccaggagtggaagcagcctgaagccctcaccagcagatccgtgagccaaataagccttttgtatttataaattacgtagcctcaggtattcctttgtagcagcaaacatggactaaacaccaatgccctcactcactgcagctgaaaaccacmgggctaaagtgatgggacccaagggtggaacggaaagcacaaggaggagtggacagaaagcctgtctctttacagcaccctaagtagaattttcttaaagccaggctttggctaagtggtgggctttgaatggtccaaaatgatacttataaacaaatacctggagtgcaggcaggtatcctatcttgttgatcatcaacacaggatttagaagccagaggaaccagttgacagatacagtgttccagtaaggtaaagtgaaattctgacatcttggattttgaaaatyaaagagcccaataagaatttctcacccagatggaaaaccactcattcttgatgataacttctcacccagatggaaaaccactcattcttcatgaagaagaaccccacaggaagactgcaagaaaagtccgtattcatcttattacacaagttgaaatatcttcttcaggcattcaaatttatgttttgtgaaaaccggagagaaaaattcttcgcataaattacggattggttgttttaagctaaatttcttttcaggaactttgctgctccttatgaactacagccatagcaacctcagaaacccgtgtggagcgtcactcctaagcatgttggcttcctgagcatattagtgtaaaacacttctctacctaattgaatacaacaccctgctatatggaaatagttcctactgaccccttaaatactaggaaatgcttgctaaagacagtgatctgtttgtacttaaggcaaaacccataatcttaacaacagattacagacgcgaaccgtttgtcttttaaagtctgttcccgattccataataataaagtgatgcagatgatacatagaagatgcatatcttattactcactatgctagtaggcaaggagtcattttatctaaaaaatgatatcaagtgattatgataaaaatgttaaaagtgggaactaaacacattcctctttcgcaagaccttaaattaccacctgttttgccacaccattcttggcagccacaagtctatgctagactgtagattttgcaaactgctgcaacagaggagctgttttaggcccataaagatgggtggtcccagtccataaattcaagggccgtttaaaggttgtttggggagcatttcttcattgtgtaaaaaagaatataataacaatccagtaatggagtagctatgcataaaatccaatcacacctagattgtggtttgttaaagatggcaacaaaggcatcagatacttttttggtcataagtgttttcacaagttgataatttcttgtttatctgttcccctcccccaataggatttaaactccatgagaatagtagcctcatctgataatgcttgacacactgctaaataaatatttgttaaaaaccttacatataatcatacctagaaggtattgtgggttcagtttcagactgttccaataaagcaaatatcaccataaagtgagtcacaagaattttttggtttctcagcgcatataaagttatgtttatactatactgtagcctgtaaattgtgtaatagcatcatgtctaaaaatgcaatgtgcattcactaattaaaaataatgcccaggtgcagtggctcacgcctgtaatcccagcgcttttggaggctgaggcgggcggatcacgaggtcaggagttcaagaccagcctgaccaacatggtgaaaccccatctctactaaaaaaawaaaaaataaaaaaaaattagcctagcatggtggtaggcacctgcaatccctgctactcaggaggctgaggcaggagaatcgcttgaacctgggaggcagaggttgcagtgagccgagactgtgccactgcactccagcttaggcaacagagtgagactctgtctcaaaaaacaaaataaataaaattatgtatggctttattgctaaaaaatgctaaagattatctgagctgtcggcaagttgtaatctttttgctgggggagattcttgcctagatgtagatggcttctgatgtatcarcattgtggttgctgaaggttggggtggctgtggcaatttttaaaaataaggcaaaaataaagtttgccacatcagcmgactcttcctttcatagaagatttctctgcagcatgcaacgctgtttgaaagtatttttgcccacagtagaacattggggttcatcctttcaaaccctgtctctgccttatcaactaagtttatagaatattctaaatcctttgtcatcatgtcaacaaatgttcatagcatcttcactaggcatagaaagtgggattgcaggcatgagccaccacacctggccaaggattaatattttgaaaggaattttttttggagcagtagctttcaacagtgggcttaaaatgttcagcaaactatgccaaaaacagatgtgatgtccttgtgcctttgttcttgcatttctagaacacaggcagagtcaatttagcataattcttatgggccctagaatttttgcagtggtcactgagccttagattcaacttaaagtcatcagcagcatttgtcactaataagggagtcacctgttctttgaaactttgaagccagacattgatttctcctccagttataagggtcctagatgacacctcagtgttgtaagaatgtttcgtctgctttgaaaatccactctctaggatagccactttcatccattatcttagctagatattttggataacttgctgcagcttctccatcagtacttgctgcttcacattgcacttctctgttatgaagatggcttctttctttaaacctcatgaagtaacctctactagcttcaaacttttcttctgcagctttcccacatctctcagtcttctaattgaagggagctagggctctggattacactttgctgtaagggaatattgtagttggtttgatcttctatccagacaaccaaatctttctccatattagcaataaggctgtttcttcttattattcatatgttctttagattagcacttttaatttccttcaagaactttttctttgcgttcacaacttcactaactggagcaagagacccagttctcagcctgtcttggcttttgacgtgtcttcctcactaggtttacttatttctagtttttgatttaaagtgaaacacatgtgactctttctttcacttgaacacttggagatcattgtagagttattaattggtttgtctaatttcaacattgttttgtctcaggattagggaggttcaaggagaggaggggagatgggagaatagttrcagatgattaaatatcactgactgtagatcaycttaacaggtacaataataatgaaaaagttttgaaatacagtgagaattacaaaatgtgacatagagacatgaagtgaacacaggctgttggaaaagtggcgctgatggaattttttgatgcagggttgccacgcaccttccatttgtaaaacatgcaatatctacaaagagcagtaaagcaaagcacaatcaaaatgacgtatgcctgtgctgacattcagaaatacatctgttgggtaaagtacttaaactacatcttttctttcccttaattttctcattattcagctgcccttgaatgcttaatccttttctactagcaatcttaaacttaaaaaatgtttgctgtatcagtcagtgatttaatactattttatctcaaggatcccttttcgctaaacttgttagtgtgaaaagcccttttcatcttgtgaacctttttgtcctaaatgagattcattaatttataaaaagccctttgaaaattataatgttcttttggaatattagtttttattatttctgttttattgaactgagctaatgatgtgttttcaaattagtgccttgttgatttgcagaatccctgcctgtgtgctttctacttcgacatgaattcattgtccagggacagtcctgataatcagccatgatcgttctgtcctcatgccstgcttgttcctctgctaccctctcttttagtacttcctcctgcagtttctgtcatctgtgctagcattctttaagatgcattctctaaacttcggaactatgctactcctaaatcatacctgatatggtttggctttgtgtccccacccaaatctcaccttgaattgtaataatccccatgtgtcaagcacttgaccagatggagataattgaatcatgggggcgatttccccctattctcatgatagtgagtgagttttcacaagatttgatggctttataaggggcttccccctttgctcaggactcattctctctcctgccgctctgtgacrtggtaccttccactatgattgtaagtttcctgaggcctctctagtcatgtggaactataagtcaactaaacctcttttctttataaattagctagtcttgggtatgtcttcatagcagcgtgagaaggaactaatacagtgccttgtttactctcttgtaatcctttgaaacagctctgtgtagcatttcttctgtgctcagttacactgtagaacaagtgaaggtggctgctttttctcttttccccatagtgctaggatagactcagggtgaatatctactggccctttatatgctgtttaggattttaaaattttttaaagtaagcatttgcaaagaatcagtggcctcctctgtgttacccccaagcttttccacctatacctgtgtagctcgcagatttccttcatgggtcattatagttgctcattacagaatggttagatttttagcctgtgccatttgtgtgatatagatcacctttatttttaacaactttttctttaaaatgcctaaatcattttgataactcaattcttaagaatataaagcactgaaaaaaggggggtaacttcttgtaaagttaaacatacatttatcttgcaatccaggaattttactctgaatttgctaaaggtaattgaaaacctgtgttcacaaaaagacttccataagaatgttcatagcaggctttattcataatagctcaaaactggaaacaaacatcccaaatgtccagcaatagtatggcagataaacaagttgtagtacattaatacaatggaatgttaccagtaatggaaaggaacacactactgaaacacatagtaccatggctggtttgccctgacatcctgttgagccaatgtagtaggttcaaaagagtacatattgtatgattccatttacaaataattccaaaagctggcaaaactaatctatggtgggaaaagtcaaaaagagtggctgttttgaggacagggattgattagaaaggactatgggagggagtttatgaagagttgaaatgttctttcttggtaggatgtatgttacaaggatttatgcactagtaccattaagatttgtatatttcagtgtctgtaaattttacctaaaaaactaaaaaatattaacatctagttaatacatttactatttgaagtggtatggcttagcaattctaaaactacctctgtgtattctagacttgagaaaatatataagtatgttaaggatattgacagccagatttcacatgttgggtgaggtaattacaaatatggaaataggaaatagtggaatgtatactgtagtgtttggttggaaccggaggtatcagaatgagtcatggtttttcatctctcctaatatatgtatatgtaagtagacaaatacatgcagaatgacaattatcagcttacacatacctatgtgtgtgtttgtgtgtgtatgtgtgtgtatrtatatgccgagaccagctcggttggggagaccctaacccagcagcgctagaggaattaaagacacacacaaagaaatatggaggtgtgaagtgggaaatcaggggtctcacagccttcagagctgagatccccgaacagagatttacccacatatttattaacagcaagccagtcattagcattgtttctatagatattaaattaactaaaagtatcccttatgggaaacgaagggatgracctaattaaaggaataggttgggctaattttctgcagcaggagcatgtccttaaggcacagatcactcatgctattgtttgtggcttaagaatgcctttaagtggttttccgccctgggcgggccaggtattccttgccctcattccggtaaacccacaacctcccagtgtgggctttatggccatgaacatgtcacagtgctgctgcagagattttgtttatggccagttttggggccagtttatggccagatttttggggggggcttattcccaacatgtcccccttctttgatttgcaaatcgataaaagcaaaggcagctttgtgacggtcagctacttctcgcaggagtcaggatccacatctgcagactatacaaacaacacagatttatgaaagcacaatcatcattgaaattacaaagcttccaagtgtttttatccatattaatgggttactagctgctaatttgtctgcagctcctttaagcactccagttccttgcattaagctcaggcgtgcctgggatgctttaaatatttgttcttttaattttgctgtatccaaaaaccagtttgtagattgtccttctagaagcttttttattctttcccaaattttgatcttactaagagctattaatagtttccacaaatccttatgtttagctcctacaatgagccatatcatttgaggttgaggtgccactataccaccatggttccagataataggaacttttgctgtattttttgccatttctaccgtctgactgttttgttcagatcagctgaacrtagtgtggctgtggctcgcagactgagaggtgcaattcaagctaaacatccccttaggggaccaattagtaatgattccataggaatcrttgtgcagcacctctgcctgttctgcaatgcaatcttactaaacaagtatgttcattttttctaactgggtccaatcctktttacaaaaargtttttgaggrtggtatgcctcaattatagtagcagatttattatggtaaatactgagatcagaaagcatgtgtaactgtgttatagagtgattgcatctaggcattattgccagccaagattgataaatatgcccaataagtataattgttctctgtgtcagcccttgytgaaggaatactcatggcagtggtgatcactgctatcatagctaccattaaattactcattgtgactggttgtactgctttcctcaggttttcttctgccatctgtgacagcttcttgatctgtccccatgtgggtggctgtgtttgacgggtgttgctcgtgacagttggggwcctcctcagcgtcagtctcgacatggctgcaactagggggtcctcgggatcctcccagaatctcttcctcggcatctggctcatgataaggttttaggtgtcttgatggcatccaaatcggctgttgatttggtcctggagaagcacaagcataacctttaccccaagttattttacctatttcccaacgttttgttattggatctctccaccaaatcggttgttctgcttctgtctttgcatctrgtttctgtagatactgttcaggtgctgataacatctggcctttggacaggctcaaaaaatttaaagttaataatgctagattcaattgcatctgtggggttccatattctctatttcccccttttgcaactgctgttttagaaaaagattcattctttccattatgacttgtccttgagaattgtatgggataccagtaatgtgtttaatattccacatagagaaaaatgtaactagagcttggctagtatagcctggggcattatctgttttaatagaagctggaatacccatcactgcaaaacactgcaaaaggtgacatttaacacaggcagaagactctcctgattggcctgtagcccaaagtgagaaaagatatccacacatacatgtacataagctagtctcccaaacgagggaacatgtgtgacatccatttgctaaagaagagttaggttccagtccttgaggattaactcctcctgtaaaagatgaggaatataccatttggcaagttgggcatcgttggataatatttttagcttctttccaggtagtgctgtatctgcgtttgaggccagaggcattaacatgggttaaattgtgaaagtgtctagcattagatattgcattagcaactaggtgatcggccatttgattcccttcagtcaaaggtcctggaagaggtacatgagccctaatgtgagtgatgtaaaaagggtgcattctacttctaactgctgtttgcaattgggtaaataaagtcatcagttgttcatctgtatgaaatcgtaactgagcattttcaattaactgtgcggaatgaaccatgtatgaagaatcagaaatcacattaattgacatatcaaaagcagtcaatacctcaattacagctacaagctctgctttttgagctgaagtatagggcgtctggaaaactttacttttcgagccagaataagaagcttttccattactagatccatctgtaaaacaatgaaaacgcttagcaggctgcaggttgtttactgcaggaattgtaaatgcaagccatttacagtcttgctcagctaaagggatagcaaacaaacagtcttttaaatctatgactaattattaaaggccaattttttggaattgtagcaggagaaggcagtcctggctgtaatgctcccataggttgtataactgaattgatagctcttaagtcagttaacattctccatttacctgattttttcttaattatgaaaactagagaattccaaggggaaaatgttggagctctgtgcccattttctaattgttcagtaactaatttatctaaagcctccagttcctctttacttagtggccattgttctatccaaattggcttatctgttaaccattttaaaggtataggttctggaggcttaacaacggccgccatcaaaaattatttcctaatttttggcaggaactttgtttttccacttgaagcggttttttcaaaccttgcaaatttttttttagtcccataccagggacatacctcgtttcatgcattgtatgttgattctgagggctatataattgttctggaattagaacttgtgctccccattgttgtaataaatctcttccccataaatttataggtgcagaagttataattggttgaatagtcccaggttgtccatcgggcccttcactatgcaaaatatagctacttttatatatttcaggggctttaccaactccaactatgttaaattgagcgggttgaattggccaatcggacggccagtgctgtagagaaatgatggaaatgtctgctcctgtatctaccaaacctttaaatttctttccctgaatagttatttcacaagtaggacgtttatcagcaatttgatttacccaataagctgctttgccttgtttgtttgtgcttccaaatcctcctgttcatttaatttcactttttcccattcccacatatggcacaatcaggagctgtgctttgtgcttycctggctctgctttccagggaacaaaagtagataaaacaacttgaatttccccattgtaatctgaatcaatgactcctgtatgtatttgtacctgttttaaacttaaactagactttcctaaaagtaatcctattgtacccgctggcaagggtccacaggctcctgttgggaccttttgtgggggttccccaggcagaaggctcgcagcttttctgcagcataaatctactgcggcactaccggctgtggcaggagacagacattgtacaggggtgagggaatggcctgagctggaaatgccccggtttagaatggggcccgggacgggtccctcatggcatttcccaaaatcgggttcccatttttatcaaacttagagtgacactgagtagcccattgttttccttttttacattttggacatatttcaggctcagcagttttcttttttcccctatctggcggcctgactcgctgatttttttctacattcttttttagtatgagcatgcttcccacagttaaagcaagctccaggaaacgtagtatttcctttatccactctcagtcctgccattgcctgtgctagcagagtagctttatgcagattacctccgataccatcacaggccttgatataatcaactaagtgtgctttccctctgataggtcacagagcagcctggcaatgaggattagcattgtcaaaagctaataactgcagtactatatcctgagcagccaaatctgcaatcattatctatattatatatatatatatatctatcattatctatctatctgtctgtctgtctgtctgtctgtctrtctrtctatctatctatctatctatctatctatctaatgcattagaagcattgacagcagtgtgatatagcttcaactcttggattttaaatgccattttctactaaggggaactgggatttctttgaattagaaatggctgattcaagggctggcaaagtatgtgacaaaaaggtaaggaagtgttgaaggaatcattaggacgtgtgaaaagcatataggagctatcttgaaggggtttctgcttgccaaatctgggccaacttgagcatcaaattaaatgacagtaatagcggatcaagataagtctttgatctcatgttcacatggaggaagtcagggaggcagccaggcatgctcactcttcttcrgattatggctttctagcttcatcacttcattgtttcgctgaaaataattctgaacctcaatctgatatttagaaaacatcagacaaatcaaaattggcctatattcttcaaaagtatcaagttcaggaaacacaagacgggctgaggaactgttgtacgttgaaagatgctgaagaaatgtgatgcctaaatagcatatgtgatctgggatttgaacttagacgggtggggggtcataatcctttataggacatttttgggacaacaggtgaactgtgaatgtgggtttktatttagctaatattgctgtagaaacgttaamttttctgatcatggtaactgtatttaacttgtaagggaatgttcttttacttgggaaatgcacactgaagtgtctaggaataaaggggcacaccaacttgctcttaaaatattaaaacatatttataaaacgtgtgwgtgtgtgtgagtgtgtgtgtgtgtgcgtgcgcctgtccatgtgtggagagaaagattgatagatacaatttactgatagaatgmtaaggcaaataagaaaaatggaattactggtaaaccttagtgtcctggtttagctgctgtcacaaagtcccatagactggtggcgtaataaacatcagaaattacaactctggaagctgtgaagttcaagatcaagktgatggcacattcggggtctgctgaggaccctcttcctgataaaaggcagctgtcttcttgccgtgtcctcacagggtggaagtgtcctgtccctaatcccattcatgagggctctattctcctgacctaatcactcccctgragctcccacctcctgattgcatcacagtgggggttaagatttcagcgtaggaattttagggggagacagagatacagtctatagctctgggtaaaaggtatacaaggtgtttcttgtactattcttgtaatatcgaaatttttctgtaagatcgaaattatgtcaaaataaaacattataaacaatataaaaaggaacaaaggaataatataaaaaatgatgagaagatatttttccaatattgaagtttatattagaaactgaggagctcctttttatgctgttaaatatttatccaatttaacatttgtctcattatggcttcttgtttattgttggccttctggatatgttggtgccacctcatacaatcacagactctcgggactaacagaggtcacagtttccatgtgattactgaattgcctctaaacttttttggctaagtagctgtctaatgcatgtttacataactaattcattttagcagtcatgggaacatttgtcctcccggtgaaactagcttttacttttctttctgaaccaacaattaacactgatttgttcattaccattttattttgtaaaatattatttccccctaggcaagagagtggctttcccctggttcccaaactgtgttccaaatgccctgaggcaccacagcaaatgtacaagagtaactcaggatatattaaaatgtcatgggaaacacagtggcatatgttggacagaacctgatgtagcttgacrtatgttatatatatacatatatatacatatagcttgacaatgttagcttgacatagttcagttttaatattagatcactacagttctrtcgttcaggtcttatctttgtgaagctgtgtttttggtggttgctcaaataaaacgcaagtactacatgaaatcagcgtggaacagaatatgaagatggtggtatccaatttgatttgggaaaaatgtgtagctcccagcttaactctactttggaattttaactcgtctcgaattacgaatgctgcagtgaygcccagtataaacttgttgtagtttctcttaggaaagtcatgaagggactttatgaagttaaaaatgctgtaaaaatacaagttcttaacatctttattagtatacttattgtaattgttattagtcaagccatagaattcatgtttattcagttaaatagaaattgattcctttatcatggggtttccatagaagtgtcttacaagtatgtgatttgacattcacgtaatttgtctcctcagctttgcctttcataacagtcctgataaacaacagaatgaccagaaggctaacaaccaaataacaattttgcttattcttgtagtacatttgcatgtaattttacattttacagtatattatggtttgagtgatttgttaactatgtagatagacctttaatatttgagttaatatgtcaatatagaaattatagtaaaaacattttgctgtcataatacttttgcagttataatgagcaacaaaaggaaacaggatgtgctaacattctattagatgaaatattagaatttgaagcttaatataaacaagaaaaaattttaaaacctaggtcatagcttatctcagaaatttagtsttggaaagggaaagcattttacagacagtataattcagccttcttattatacaaatgagaaaactaaagcccagagacgtgaaatgaaacctcatgataaactgtccacatcccagcatgtcttcttgttctcacttatttgtaacaacccatttcctgtccaaaagagatggagaacagctggttattgatctcagcactgcacacaggtcattattaaagagcctgttctcagaattatatgctaagaggaaggagtcagccgtgtatcatttgtgtggagcctgaatgactgaaaactccccttaagctggctaatgcttctttcttccacgtggaaaatgaagaattcagagaatgtattggtttatttaaaagaaatatctagtgatttttacacatgaagcttttgcttggctggatctaggtgttcaaagttgatagacttaggtctctcactattgtttggctcagctttcttttaggctagcttcattctcatagaagctccttttaaagactgtggggtaaagaaaatacagaactagtggttggaataagtggaataagtaaggaagagagagggtatgatagagtagcatattttatctgaagttattcagaacttgaaatagctcgaataggatctggttacagatgataaagaaaataacctaagttttggtgacctcaaacaatgctgtcatattttagagtcattagaatttcaagtgttcatgatttttatgtaaattctgtaattatgtaaatacctatcaacaggtacttgggtaagaacaagacttggacaaaaatctggagctagaaaataactgagaagttttggctgttaagattacattttagcaataaaaagtcacaaaactgagttggagaccaatgacttactatggtcaagtgtgcaacaaagcaagtagggcccacaaggctaatgggagggggaatcagcccttagaaatgttaggcaccgcccaggaaggcagcagacctgagaagggaatacacacaacctaagagaacctcttctacagccgaggctctcagtgcttgggaagagagcagggagtggctaccacaggtaaaagcctaatagtagcagttagtagtttttgaagtttgaaatgcagcctaagaattgcttggcaggtttctattttgccgcttttggtcatagtaattaattgatttatcctgttctctttacttgggaagctcttccctcagatttctccaagtctcacttcttctgtcccttcctacgtggggatccttcagtgcggagttctgtctgctgctgagtatgtctgttccagaagtgtattcccaaactgcagtcaccagagggtgtgttggagaccccagtgtggctcatttttgagacaaaccttgagctaaaacttcattgatcacctgatctccatgaaccccttttgattggtactcctcagtggagtttgggtctcttaatagttagtgctgcattccagcctgggcaacagagctagaccctgtctcaagataataataataataaagaattaatgtcagggtggagctgacgtccagtagtcccccaaatctagtaattctgcctgcccccgtgatattcagtcacccaggcaaatggctgccgacctctttgggaaaggcaggaggaagatctgtgctatacatttttggtggcatagtaggattcttctccaaggggacctgctttctctttccttatttaaggagttctgggcctgtgaattggctcatgtctgggaattcagtgaaatattctgactttctcttgtggtcatcaagtcagatttttgttcatttaagccacaacttttctgtttagacaaatgaaaaaaaatatgtcaatagyctgcgccgttcagttccagggacactgttatctttgttttgtgttgctataccggaatactacagactaggaaatttataaataaaataaatttatttcttacagttctggagacagagaagcccaaggtcaaggtgcctgcatctggcaaggaccttcctgctgcatcatcccatggcagaaggtggaagggcaagagatcacgctttagagagagaggaaggtggccaaactcatccttttattcagaaacccactgctgagataactaattcactcccccagtaatggtattaacctatttatgaagacggggccatcatgacctaatcatctcttaaggtcccacctctccgtactgttgcgttggggatcaartttttaacgcaaactttgggaggtasatttaaaccatagcactccacccctggccaccaaaattcatgtccttttaacatgtagtgtacacatttcagtggcctcaaagttcttaagttgtacagcatcagtccagggtctcatctaaatcaggtatgagtgagactcaagggacaattcgtcctgaaacaaaccttcttcagctttgagcctgtgaaatcaaaacaagtcatctacttccaaaattcagtggtagaagaggcataggattgatattcccattccaaaaaggagaaatagacaagaaagggggtaactggtcccaaaagtccaaaactcaacagaggaaacaacattaagttttaaagctggagaataatcttctttgactcaatttgtcccattctgggcacactggagttggggttaggctccctaggccttgagtatccttgcccttatgatttttgctggggccagcccacacttcagctctcacaggttggtgtctcatgcctgagcttctccagagtwgtggagttggtaactctacattttggagtctctgagatggccttgctcccagggcttctctaggtattggcctactgggggctgtctgtgcggkctccactgctgtaacaagtttgtccgtgggccccaggctgactactacatcctttgaaatctaggtagaggctgctgtggcaccacagctcatgaagsctgcaagtttgcagttagtattatgtggataccactatgacttactgtttgtgccctctgaaggtgtggcaggagctgcacttgaactcacttgaaccgtggctggggctcacattgtgaaggaatgcagggagtagagtccttaagttgcctgggcagcaaaagctgaggttccatggacaccttctggaaaccttgccctcaaggccctgctctgagcctgtggtgggagggatggcctccaagatctctgaagcagctttatggtctttctcccattgtcttgatgaatagcaccctgctactttctgtctctacttaggtttttagaaaatggtcagttgcccataaacccttggtttgttctgctaaacatgtcttttcacacttaacgtatctaggctgcaaattttccaaatctttccattctgcttcccttttaattacaaattccacctttaatttctctctactcacatcttactatgtgcagttaagagtagtcatgaagatccttcattattttgcttagaaatttctgccaccagatacttgagttcattgcccttaagttctgctttctatatagccctgggacatggctacagatcagtcaagttctttgtgacttcataaggatggcttttactccagttgcgagtatcttgttcatttccatctgatacctcatcagaatagcctttattgtccatgtttctatcagyattctgattgtgaccacttaagtaattcctaagaaaggtaaagcccttcctacagctgttttttttttttctaaaccctcaccagaatttcccttgatgcttcctttattgcagtctaggttctttacagccatttcctycaagttcttttgtcctctactcatttcccagttccaaagctgcttccacatttttagatatttgttattgccacagccccacttcctggtaccagttttctgttttagtccattttgtgctgctgtaatagagtatctgagactaggtaatttataaagaacagaaatttatttyttacaattttggaggctgggaggtcctgggatgaggggccttcatttggtgagggccttactgctgtgtcatcccatggcagaaaggagaagagcaagagagaatgtacaagagagagaagggaaggggaccaaagatatcttttatcaggaccccactcccgtgataactaattcactcccccaataacatcattattccattcacaagggctctgccttttaaaggtcccacctctcaacacttgcattcagggttaagttttcaaaacatgaactttggaggaaatgttcaaaccatagcagttgtgatcaagcagccatgctgaatatttctgtgaccaaattcctctgcagctttgcttctgttggttgtgctgacaatacccaccttgtctctggatgttaagtgctcccacttgtcctctaccacatcaatatcccatcttctgggtgaattcaaggaacccagccatatggcagcagttycctcattaattcctggcctgcaccagagccaggtatatattcacatatgccagggctccccctgtaaatgtgtttctcatggccttggtgaaggggggcatccctaggacatagccaggggattgcgaaactagtctcccatcatcagccaaatctagcattccaatcttgctaagcctttgaatatataccagggaagttctgaggtttcaacttcattgagcattggccacttttgggaacagatttcagccaacctagcactagcatactgaacccaagtaggtgctctcatataaaaacctgccttatttacgtattgattctcttccaactagaatgtgagctcattgaagataatatctttaatggtttgttccactgttctagggtctctgatgactagaagagagcctcctctagtgcattgtcaggatggtcagtggtatttgtccaatcattggttggttacttacttgttcattcaacagatatttattgagtatagtgctcaagaaaacagcaagtaatagacctttagaagtggaggttatctgaatgatcaagaagcagaaagatggccagggttgtgacagtgagggtagacagagtggggtgtgagacgcagttttgagctggatagtaaccatgctttgcagcacatggtgtgttactgtgcgaggcgtttttgtttattattccaagtgcagtaggaagccccaggagtgtttgaagccatggagagacagaattttatatttcgagtttacagtgcctgttgttttgagactaggtttagtaagacaagtttgggagcagggagattagttggaggactgttttttattcctttagagaagacacattatagcttgaactggagcagggtgggggttgacatctccctgtccacctgctgtttccactggtgccatgatgaagccttgtgctgtggacatgctgtggggctgctgctgtggggacagtggctgcagtgcaagcgcctaactcttgctatggtggcagggatgagagcagaccaaggtggagccatatagatggaaaggaatggaaagttagagtggcacagagggcacttgtttcacccagtgcagcgactgcagcagactttcctagcatcttacagaggtgcactcagcaagctcttgtatgatattatttttactaatcaagttacctaatatatataaaactttagaaacaaagttaaaatttgtaacacctactattttaatatatataggctgcatagacgcagtctatggataattctaaataagaagtcggccgggtgcagtggctcatgccttcaatcccagcactttgagagtctgaggcagagggatcacttgagctcaggagttttcgagaccagcctgggcaacatggtgaaagcctgtcactacaaaaaatacaaaaattagccaggcatggtgtggtggtgtgtgcctgtagtctcagctgcttgggaggctgaggtgggaggatgggcccaggaggtggaggttgcagtgagctgagatagtgccactgcattccagcctgggtaacagagacagaccctgtctcaaaataaataaataaataaatagtcatagcaattttaattttcaatctacttgttttataaaatagattataatatttaaatcatgtgctataaaagcataatgaataacttagtatattaagtcacatatattaatagtatgtcttacagactaaggaatttttgttatattttatttaaactctgtttttatttttgttatttttaatccaaagtaccaagatacgaatatgcagggagttgtatatgaactaaacagctatatagaacaacggttggacacaggaggagacaaccagctactcctctatgaactgagcagcatcattaaaataggtaagaagcattttgtgttcctgttagaaaaaattgggcaaagattcttttacaaaaagcagcaaaaactacttactaagaggcagatgaaagtcatttatatttacttctatttctggactaaatttcaagtgaaaatattttattatgaaactaccagaggtgagtcaaacctaaaactttctaaattgtctaatcccaaataagtatctgcctgatatatacaggtaatatactatgccttctaattaacacctagtttcctttggaaagcatagttttattgaattaaatcacatctttataaaatatattaattttaaagagagactaagcattttaaatgtatttgggtaaatgacaattttatataccatttaagaaatggtttatgttgtgaatagaatggggaaagttagaaaagtactattttagaaggatacacttgtttttaggacatgatttttcagaaggatacccactatgacaattgtatcttttgttttttaatttgaaaataaaaatataaatgataccaaccataataacatttattttgtatttaaccatatgctaggcacctgtctatgcatattatatgcattaactgacttatttttattacggtctcaggaggttgtttttattattgccaccattttactgatgaggaagctatagaacagagaggttaracatcttacccaaagtcacacaggtaaaaaggagttaagtaggggtttaattgaggcagtccctccaagacttatgctattaactattatagttgccttcagatgaccctgaggcaattttaggtaagttaaattatgtttgcttcagtgacaattatagatgaatacatcagctttttgggttgatacttactttggttatttaatattataaatatcacttgtggtattttaaaaacttaaaaaattaaacacaattctcaaatttaaaaaatattcaataattctgaataaagttcaacaaatatgttactatgtggtacgttgactgctatatgcatttgagcatatcgtcttaaattttatactcactgatgaaaaatgtagaggatattttaattatgctattaagtaaagccataagtgattttgttccatttactgcatgaccattgattctgttaacaaatcaatttgaaagactcacatctgcctctcaccctggaggatgcatacatgttagattctcccactgagcycagtttcttccttttcttattactttggcagccacaaaagccgatggatttgcactgtatttccttggagagtgcaataatgtaagtatctaaatttagattttggtgctctagataagaaaatatcataagctcctttaaaaaagttataaacaaccgacayttcatgattaagtacttttcatttaaatcattttgtgtyttgtttctatatttggttattaccagtcaagaattttactgacatggcaacatttaggcataaaatcgtgtgtgtgtgtgtgtgtgtgtgtgtgtgtttcctttggctttggtttgtggtaccctatgttataaatggcatttctagatttagtgttgtgtacaaaaggtatttggcactgtgagctgggatgttgtagaggaatgcctgtaccctctctacacatgatctacagtagaattaaatgagaacagaaagttgaacattttctgggtgatttttaaagttttttgcagatgactctaaaagtcctagggctttgtgtctagatccctaagctgccttactgtagtaggctcaggccagtcaaggaatggggattctcagctgtggctgttccagtcttctgccaccaggccggatcctgcgtttctggtctaacttacctggagcacagcccgccggaaaatgcaacatagaaaggcactttcaaaagtatttcaagatgttcaattactggcatttgatttttgatacagtattaaaaagtatacatattttagcataatctgagccaataatgctaatattcataagtttaatgtataaattccctcataagtttatttcacacatttttgcttcacatttcttatgtgttaggcattgctatcttagatttggaatgtatttttgcaatatgctacctgtattcttgagtaatcaaaatatgtattatgtacattatatacaatgttactaggaatagagacaaaagcattctgagatttttaataggactcttaaatataacagttttgcaaagtgygaaaatagttgcacaaaaatatttattggctgatttaattaacttacagcttcttattcatttccatggccactgttttcccttgtattgtaacaaattacgcttgttacctcaaaaatgaaaggcttatttagggcaaagacattttcttgttcattcttgtatttcccaagcccctctcctagtgcctttcatataaaccgtcagataagaatgtttattaatttgcattattcagatattactaccacttctaaataaactatatttcagacactggtagtattctaaaatggctaagctacgaaaataacaaatggatattacttyttttcggtgcattaaaaattatttttaaagtgtcaaagtttttattaaaagtaatttcttttagaaaaatattctacagtttgccattattttttaattggctgatacgtgtggaatgcagtytgttgtggtccacgtcacattactccttctgagccgcctccagcagccccccagttggccacgcagctgtgctcacctccarccccttatcctcgggtctctagttcagatcggggtggacatgtggcccatgagggccccagcagattctttgctaaaacctgtatcttggactcagcaattctagccgttcacctgaacaaaagtggtaacaatcctgaagttgaggctgcctctacaggctggtctctcctgccctgtggaaagagaatagagacagctgcgggcagagactgagaggtgcaggcagcaggaaccctatggctacagtggacgggagcccaaaatgctgactttgcgggcttggatttaggttacaaaacccacattcttaatcacttggcttaaaaaattttattttttttttttgctttatttgcagacttctttatacactggcctcaatgaagtagttcctcttaggattcagcaaaacgcttttctatctacaatatctaaattgtaattttatgtatcaatttgaattatttaatctttacttatcttttactttagtaacttaaaggactggtacaatatcctcttagttttattctggctccttattctaaactcctaaggtcagtccatttactgggcatgcttctctctaggggcactgattccctgttccttctttctttcccgcatctcagggactgagtctgtcttcttcaacttaatatccctatgaacagcagggtacmtagcaaaattgtagctgtctctgagcttcccaagtcagatcccactgtacactgtattttgctttctcaacattatataagtctccttcatggaacatagctgagtctgtgattacatgtttatctgtgatttgagtggttatttgtttatctggctttcttgctagaatgtcagctttatgaagacagataccttatctgcctgggaggataattcttggggataattactgtgttttgctcactctattttgccctttatgcattccacctagatagctaaggccttgttatttccttgacccagggatttctgtgggtaggaagaagactttggctgagaaatcttaagttcactcaagtgtttttttagatgtatctacatgattactactttccttgttcttcatttcttcttgtatctcaagtcgtccatctgggatcatttttcttccatctgaaatgcattctctagaatttcccttagcgagagtctgctgatggaaagcactctcagtttgtgtttgtgtgaatttgtcttcatttcacccgctccttggaatatatctttggtagataaagagttcaggttgataaattatctctctgaatattgactaaaataaagatactgtttttaaatttattttggttttcattatggttttttatttcctgtacatattttcaaacttgtcttttatttcttgaaatacattaactatacttcttctatgttcctttgaatttacagtttcttgggctttgtttcgtccaactctgacagatggtgacttttttgctwatgtgttttatggttttctttttatttttcctttctctctctctctctctctctctctctaactgtgaattctattcttccatgggcctcttaaatggatactctcgaggcttgttagaagtgcctttctagtttctttcttggagatagacatgcatttgtttctgctagtcacttaaggtactaccaatccaaaaccattttaaactaaattatctggttgagatgaattttcaggctataaagtagtatggcttcaagagtccaatccacatgatgcacaattatgacttctcagaggagattgttattttccctccagtactaatttcaaaataatctggtttccttgcagcctctttgctggggtaagtgtatttgtccttcaacccaagatgaatgtttggcctgttgcctgtcctggccctctaaaggggtctctatttagacttcctcacagaaaggccccaacttttctctcctgtctctcaatctccgtgtggctttcctgggagaagatcagtctattcagtcattagtaattccctcaagagaaagacagctttgggatctggttacctcccacagttcctttatttacttccttttagatttctgtggattccttccattcttctcagcccagcaaagcaatataaaagatgggtaaaatatattttatgcagcctttaaataaatttcaaattgttttttcaaaagtgtcagccaaatgatctaatctgctgtatcgctggcaatagaagatacacttctaaaatataaccatattaaattaaatgaaacatcttttgcacaggtaagcagatacatgtatatatttttgtatttcgccttttgcacatgaaagacagcatagtctacataattgtcaatctttaaaaaattgtctcgatttggaatcatagcaagaaagtcttaaataactcaatttcacaacaattatatactatagtgacaaaattataataaaacacaaatagactgagaaaattttctgtccctatcaacaaatactaagggttaaaaaaagaaagaattatacagtttttatacttattaaagtatgaatttcttcgcagtagaaataattaaatttctgaaattgatgtaatgagaaatataacaaataacatttaaatatgtcagaagttctaatagaatttaaaaacgtgcattcatataagcaaggaggaaaaaagttctatgtgtttttttcacatagaacatttagcagaagataaaaacaaaactaaatactaaaaagcactaaaattaaaacataaaatattattatggaaatcattatgtgattataacaaaattacttgtaaagaagatccaactgttaaaagaaaaaaaacttagatcaggttaaaaaaccaaactgtcttttattctggtacattgaagtttctgaagcaaaatggagaaaatggacagaaaaatagtagtatttttaattattgagagatcaagaaaacagcttagaagaggttatcaatacattattatttatccaaataatacacatactaaactcagtatattaggttaggatttaccaacttgtgattccttttcttttctgggctagaccctaactttaatgtatttaatttctgtctaagaattcttcatgggattcctataatgactaaaaacaaaggaaactggagggctcaaaagacaggaagatgaaggaaagtttgaaacttccaagagacttgttgaatggttgtgacgaaaatgctgacagtgatacggatagtgaagtccaggctgatgtggtctcagatggagatgaggcctggctgctcctagccttgcacagtcatatgtgttcatgaagagaaggttttgtgtttaaaagggaagcagaacgtaaaagtttagaatatttgtagcctgaccgtgttgtagaaaggacaaaccgattttctgtggagaaattcaagccactggctgcagaaatttgcatacgaggagccgaatattaatcaccaagacaatagggaaaatgtctccaggacatttcagagatcttcacagcagcccctcccatcacaggtccagaggcctaggaaaaatggtttcatggaccaagcccaaggccttgctgctccaaacatggtgtcctgtgtcccagtcacttcagctctagccgtggtacacagaaggcaagagtgtgggagcctccacccagatttcagaggatgatagaaatgcctggatatccaggcagaagtctgctgcaggggcagagccctcacggagaacctctgctagtgcagtgcagaggagaaatgtgggatttggtcccccacacagagtccccactggggtactgtctagtggagctgtgagaagagggccactgtcctgcggaccttagaatggtagatccaccaacagcttccaccatgcgcctggattagtagcaggcattgaacaccagcccatgaaagcagccacaggggccataccctgcagaaccacaggggcagagctgtggctgtggacttgggagcccaccccttgcatcagcatgcactggatgtgagacatggagtcaaaggagattattttggggccttaatatttaatgactgtcctactgggttytggacttgtacagggcctgtaccccatttgtttgggccagtttyttccttttggaatgggagcatttacccaatgcctgtaccccaaacaagtaactaacttgtttgtgattttagaggctcacaggtggaagggccttgcattgtctcagatgagactttagacttggacattttttttttttttttttttttttgagacagagccttgctctgtcacccaggctggagcacagtggtatggtctcggctcactgcaacctccacctcctgggttcaagcagttctcctgtctcaacctcctgagtagctgggactacaggtacatatcaccatgttcgactatttttttctgtatttttagtagagatggggtattggcatgttggccaggctggtctcaaacccctgacctcagtcgatccacccgccttagcctccccattacaagcgtgagccaccatgcctggcctagacttggactttcaagttaatgctgcagtgaattaagactttgaaggactgtggggaagacctgattggtcttgaaatatgagaaggacatgatatttgggagaggccagaggtagaatgatatggtttgactctgttgccccaccaaaatctcatgtcaaattgtaatcatcacatatcaagggaaggacctggtgggaggtgattggatcatgggggcggatttccccattgcttttctcatgatagtaaatgtgttctcgtgaggtctgatggtaggtaaaaagtgtgtggcacttccygccttgcactccctcttctgccaccatgggaagaagttccttgcttccygtttcccttccgctgtgattataagtttcctgaggcctcacagtcatgcttcctgttaagcctgtggaactgtgagtcaattaaaccaaacaccgcatgttctcactcataggtgggaactgaacaatgaggacacatggacacagggtggggaacatcacacactggggcctgttgtggggtggggggagcggggagggatagcattaggagatatacctaatgytaaatgacgagttgatgggtgcagcacaccaacatggcacatgtatacatatgtaactaacctgcacgttgtgcacatgtaccctacaacttaaagtataataataaaaaaaattaaacctcttttattcataaatgacccagtctgaggtagttctttctagcagtgtgagaacagactaatacacaaaccatttactaaactgacaaaaaagaaatatatatgtttaataatctaaaaacaaataatagatataatgaaaattagaaattatgagggattatgtttactaacaaatgtgaaaacctagataaaaatgaacagttttcaaggaaaatataaattatcctattaaatacaaatgataatagaaaacttattagtccagtagccaaggaggaaattgaagacactgttgaaatattacctttctgcaaaccagtagggcattgattcatctgactgttcttgagccccagtcatcaccaggcaccatgttaaacccggggagacagtgatgagcccgacagcctgggctcctgtacccgcattgttcatttgctactgaggcagccctttaagaaggagaattcctgtgctcgttatactttttcagaacttgggaaaaaaggaaaacttcctagtaagtagtttagcattgaaataattttggatctggagttagattgtgtgagttctgttttaccacttagtaattgtgtaattaataattgtgtgacttgacaagattcttaaactttctaaaccttaatttaccatttaccctccattagttaaatgttacaccataaatgctgtttgtttaacaaaccgtttaaaacatctgctaagtaccaaaaaactgtgctaaattgctgagcatacaaaaacaaaattatttctcacatcaaagaatgtataagcagtaggggagatagaaaaatcagcagctagttacagcacatgatttttatgtgctaacagagaggagctcaaaggctctgtgaccatgaattcgatggggctgcagcacataaaaacagattggatgatgagaagacaatatttcagtggggatttaagacctctcagtagatgagaggggaaagtaaaggatgtctcttgggcagaagaagcaatttctgagaaatctggggttagcaaagaaaacaacttatgttgtatcctggcccatagcaatgtctgctatagacaaagtgctcttgagatgtttttgggaaaaaataattttttcatgactgaatttttgcttaattcaacttttattgtttgtatggctatgcttagttacatgtataacatacctgatgatagtatctttatagtttttccactgttatctatcagagttgtttgtgaaagctgaaaaccttatgtactttatactttaaaatttttaattcaaaagtaaatttattgtatatatatatataggttattttaaaaacaacctttccataatttacaggtttgataagttagttaaacagttgttttgttatttttatttataaacatgagcaactagatgactctagagtcctagattcatagagtgttaaagctaaaagagacacttccaaattatttaatctaatcttttcattttagtgatgaggtagccaaggtctcttatgggtaatgactgtccgagttcacacagctagtcaacaactaaaggctaggctcccattccaaagttactgtgctttctacaaagagcagctatgctctttccaccgtaatacaacacgtcttttaagaacatagcttccccctgcccctttgttacttgatttttattacccacatactgggaagaacacattttagttttgttacttgggatacaattgggaaaaatggaagagcagaagaatcttaagttttaccttcagtatgtatacattaaacattcaccagaaatactgcattcttcatatccagagctggtagtttatagtaattgtttgccttcttcaagtgcacagtgaacttcagcagatttatttttaagaattatggaaacaaagttagtcatccatatatcaagttccaggtaaatgtgggagctatttacttacggccgtctacatagatgtaaatttgtttactatccagtgccatctagtgtctaaaaggataatagcttattggtaaacctaaatactttttttttcttyttaagaagtgtttccaaaatttaactggttgtaagttgaagtcttaacattgaaatgaagtctcatgaataaagtgatgtttgaattgtgcatggaaagaaagatgaaagcaaatgttaaccaagtgaggtaaacatctatttggctgatatcaatgaattggatttttctatttcattaaaagatggtgtttttataaattgtactagtctattctcttgttcattttccaccaaatctatttatttcccaaaatktacatttttgtaatttgaatgctttttaagtcctttactgaaccaacctattgattatgacttgtgcgcccaatcttttctagtttaaattatctcactttagaaatagatataaaaatttgctgttaccacaaaaatattagctacttcataatgagtttcttagaaaaatttaaaagctgattcctcccctaggacttcctggcctctgataggattgattttctgctctttgggcaatctcatcgatgctagttgagaggtggagggactagtggtcaccatcacctctggaactctcaagtrctaaagaactgcagcggcctttggtcgagtagatatcctgaaggcagttactttcttctttggaaatgatagaggtggctaatgtttgaaactttaaagtttttccttgttttttagttgtggtttttatctctagcctctaaaagatgcttgtcctaattaaagtttttatatatttatacagtagtagagcaggaattaatcttagagactcagttcaacactggatattatagataaatttgatattgtaaacatatgtataagagccttaatacttcttaaaataatgtctggtgtttccattcatccttctatgaaaatagcataaggttttttatcttattaatctgaatatcccagttaaatctttaagtcaacagttatattgattttgaaaaatgaagtccctatttcctgtgtaaatgtctttagaacttatttacgttaatcatttattaatgattaatgccttcatgtagatacttcaccaatgagaaatgcaaagtatatatctttttttttttttttttaagcagggtctcactctgtcacccaagctggagtacrgtggcacaatatcagctcactgtaacctcaaactcctggcttcaagtgatcctcccacctcggcctcctgagtagctagtgctacaggcatgcaccacctcacccagctaatgtttttattttttgtagaggtcagatctcgctatgttgcccaggctgatcttgaactcctggtttcaagctgtcctcctgccacagcctccaaaagccctgggattataagcatgagttactgcgcccaggccaaagtgtatagcttataaaataaatcatgattattttgaaatactaagaactaagtcaggatttgccttgccaagtcataaaatgtactgtaaaccttttataataattaaaacagtgtggtatacaagtaaacctaaagatacagaattgggaattcggaaacagacccaagtatatttaaggataggccaggcacagtggctcacgcctgtaatcccagcactttgggaggctgaggcgggtggatcacctgaggtcgggagtccgagaccagcctgaccaacatggagaaatcccatctctactaaaaatacaaaattagctgggcgtggtggcacatgcctgtaatcccagctactcgggaggctgaggcaggagaatcgcttgaacctgggaggcggaggttgcagtgagccaagattgcaccattgcactccagcctgggcaacaagagtgaaactccgtctcaaaaaaaaattaaaaattaaaaattaaaaaaagcgtctttgaggatgaagtgtatgatgaaggtggcagttcaatgagtggaaaagtgataatgattcagcccatgacrtcctacttgacagtatctgtggaataaatggaatgtaaattaacgtttccctagcgctgagtatgtgtaaacttcaacctctattttagactttttatatttataacaggtagctacctatcaatgcattcaactgccaaaatcatttaaaaatatgcttctgcaaaacatgtgattctaaccagtgactgatcctcaattagaaatggatattaaaaaggagcttttgcaggtaaattgtttggaggcaaacaaaacaaaaacaacacagaagggaaccactaatataaaggagggaaagtgtagccatgaaaacatgtcagaaacaacaaacaagtgtgtgttgtgaggttaggcttcattttcccttctgctggagttttgggccttcatatcacaatgtattcaatgtttggttagcatttatcctcagctctcattggaaacatttctgttrggttaatgtgaacaaaaatcatgagctaattaggaaaataagtataaagtttccactataaagtattactcaatttttgataattttttttaactacatagagaagtttttcatattctagcaagtagttgaaagacttctaaaccttttattttcagcaagcgtaataaatagaagagctttccatacactcttgggtacagtatttgcttatctgttacttgtgtattgtatgaaacctacacagaagcaatacatattttataatactractatatgatcatctaataatgtaggaatgtataagatagtctgttattattggattatgaagctatgtataacttaaacatgtgattaaattcagccttgaagggcctatggctaagtcataaaaaaaaaagatgtgcgttttacattttcaaacaaacaaatgcagccaaaaactatgactccctccacaccccccgcaaaaaatacagagttactgttggaagcttgctccagagttcaccttctgtttttattatgacatgttcttctttaagagttatctaaaccactcagttcaatttatgttcacttcctgcagttccgtctttggtacagaaaagggacagttgcttccttatagtttgagaaaatcrttgtcaattccaatttttcttcattctaaatataccacattttaaattttttttcttgcatttatctattctttttgttcttgaattacctttctactctttctgtcttaagaaagggtgacaaactgaattgtatttggacaatgatagatactgaatctaatgatagtcttactctatgccatgtgtatgttggtgcctaatgtaattatagtaactagaaaatggtttttccagccttttaaggaataactaagttgaaactgtctttcatcatatatgtaattttttaatccataagtgtatactttctatttaaacatattaaatagcttagttctttttaaaataattacttaaatttttcacatgcatygtacttaatagcaaatacaatttaagcacagccctatgtrgatatacttggaaatacaagtattttgaacttagcttctaatcatttataattgttattaattkcaagtacccaaggttaaagcaaagctttgcttttctctcccttcctccttgttcatttaaccaagtttatggggtttattagtcaagttaatggggttcattctcttttaagatgtttaaagaaagagttytgtaattttacaaggcttaaaaaccacatacctgataagttaataaataatacctgtctcatccttagaactaccttagtaataacaagtattgtagaaaggtgcttaggttaagagggctgtctaatacttattgcttcaagtagtcttcattctttgttagagtaatccaacataagataaaaataaagtgaagtctgtgggaaatttatattttcaaattttgtagataatcatgatacaattatgtcaaaatattgcccccaatttctacatgattaaagtagcaattcttatttagtagaaagtaattttaaaatatgtttggatttygtcaaaataactgatgctatttttaaaaaacaatttattttaaaatagtttcaggacattaccttcccacccagtcatttgaaagggaaagatccctcagatttttcaagatttttgctcagagaacagcaaatttttcatctagagtattctgaatctgcaattttataaactagccagtcgaagtaatgtgagtgagtcttagaaggttctcagaagggaagatttctaatgaaaatgaaaaatgtaaccaaatcacttgacttgcagctactgattctrtcttcaggtaacrtgkgtcaagtctgtagggaggttggaccctgtgtgtgtttgtggtctgatagaatcttgatcccaatgacaggatgcattttgtctcatttcattattttctgtgtatcaaaataggaggctatttgaagagtgtttctgtgcctgtacattcatttaagttttaaatttgagtgtgtattttttgtgaagtggaaatgtgagatagtttcactttaggtaatctggtttgatcatggcaaagcacctttcctcattttatgactcttcttttaattggctcacagatttattatgactgttaggattcacgtgtgtctttttgtactatgcacatgtacaggaaagtctgtaaaacatcttttcttctccctagagcctgtgtatattcacgccacctgggataaaggaaggaaaaccccgcctcatccctgctgggcccatcactcagggcaccaccgtctctgcttatgtggccaagtccaggaaaacactgctagtagaagacatccttggagtaagtggctttttgattctttgtgacacttttgacctaaagtatttaattaagaaagatggcatatcattttgatgttataatttaaatagtttcattttaaaaagcattaaagctagttacagatcaatatattaatgtgtragttaattttttgtactcagaaaattccctttacccactaacagctaaatgtgcacagttcttatttcaacacatgccagtacagttaaacacaaatatactgtgtatattcatatgaatgtaaactaaataattactgttttatgattcatattttgctgggatgcatatgaatgagttagctattgctgtatgacaaactacctcaagttttactggtatcatacagtagccacgtgtgatttcttatgaatctaaggactgggttattctgctggtctggactgctgtcagttggatttgcctatgcgtctgaggtcagctggccatgagttaggtgctggctggcctcttatgccatcgctttccctgtgtctctcacccscttccagtaaggctatcctggtgtgtttttgtgaggtaacaggagtctgagagaagtagtgggaaacatacaagtgagttttcaagccactgcttacatcaaatttactaccctcccattagccagagcaaatcacgtagacaggcccagactcagtatagatcactaaccatgcacatagatacagagaaactagacaaagtggagccctcagtctagtcctccacagtacatgtggacattttaatgaaattttatgacatggaatatagacttcaaaggtaacaagtacacaggtgtaaaaaaattgctctaagtgctaataggagccatgaaacctgggttttaattttggtttttccaccattatttgtataaccttgaataaatttggtagctagaggaaggaaggaagagatagaaggacagaagggaaggaagggaggaagggagggaaggagagaaggagggcccatgctgtataagttctcatttgaaaatgttctgttgtgtatgtaagctttcaaaagatctgtacattacaagtacagrgttacactatttcatgaagttctaattcatcctgatagcttcttacagacagtagaaattgaagaaatagaattgatgcttttgatattaattcattcaatttccctgtactwcttctttttttttttttttttttttttgagacggagtctcgctgtgtcgcccaggctggagtgcagtggcttgatctcggctcactgcaagctccgcctcccgggttcacgccattctcctgcctcaggctcccgaatagctgggactacaggcgcctgccaccrcgcccggctaatttkttttgtatttttagtagagatggtgtttcactgtgttagccaggatggtctcgatctcctgacctcgtgatccgcccacctcggcctcccaaagtgctgggattacaggcttgagccactgcgcccggccccctgtacttcttttgagtaaatttgcyaagctagaaaattttaaaatcaaagaaccaatttcatttcttatgataagtaattgatcattattagttgattcaaatacttaatatgggcctttgagattcagttagaatgactgttattaacgtacacttttgtgttactctaggcttaaaaatagaaaaaaagtttataaataattttcttcacatagtgtttacattttgagtaattttccctgcggcattgtacctgtaaacaccctaagactgttccggcacatagaagacgatgaataagtgccagcatttatgattactttttttattrtcatatgaaattaacatatgtcattcgttcattaaatttatgctgcataaggataaagaaatattaaagcagtatttgggtataagttccatgaaaaagtaagcattttcttacctaagatttatggtggctatcatcatttagttttcctttgaaaagtactgcttattattgattacaagtatcatggcaatttctgatagaaataagaatcatcacttaatgatcrtttcactgaatttatgtctttttgtctttttgtttttcaggatgaacgatttccaagaggtactggactggaatcagggactcgtatccagtctgttctttgcttaccaattgtcactgcaattggtgacttgattggtattctcgagctgtatcggcactggggcaaagaagccttctgtcttagtcaccaggaggtaaggcctttaaatgctgcatgttagaatttttagttgtacctagctcattgaaggtgcttgttagtattgctaagtaatactaaactgaaaatacatgaattaatatttaaaatcacaatttgcttaacagtgttttgatactaatgataatgattttaaaacctgtttctgtttagagaggaaacaggttacataagagatatggtccttttgttaagtaaaatccagtgtaacaataaaaggtatgctgtactctgagtcatagaaagtagtagaaggactttggagacttttcacactctggttgtctttatgtcttctttaaaatgtctttttcttagcttgtgtcctgcataaaagactctagtgtcaaatacatttgaattccattcactattcactcaataggctcattamtactaaaagcaaatattaaaatgatacatttatcacatccagtataaaccagtttccttcagtggcctcactcctgttcacttgcctgaatgaacccatctcctgcgaccccacctgtccctcactcgctccagccacgctggatcctcaggcaaggctgacaggctacttaactgaggcctttgcattttttcttctctccacttatccccctcacagccacatccttcagaatttccttaaatgttgccttctctataaggccctccctgaacacttcatgtacatttgaatggctcctatccaatgtttctttctctcttcttctgctttttctctatagcacctgtcactatctaatatattatatgctacacttatttcatttcttgtccttctccctgaagtacactgaaggccactccatttctgttatttactacagtatctccagcacctagaatagtgcctggtacataatagacactcatgaatatttgttgaatgagtgaataataaaagaagtagaaaagctagtaattttgaggaacttgttagcttgtgtataaatatatgtgtatgatttttacattttagaaatatttcattatttaaagtggtcattagattgcttttcaatagtatttttgttaaaccgaaaagtagtaattttgtgaaaatcattgggctacagctctcttaacaatcagtttgttttccattttatccaaaattaagatgaacaagagaacattaaagtcagttaaatagatggggaaaatataaaagaaaaaccttgtaaatatttggtgctttgtgtttggaaaatgttcaaaagctcagtgatgtcagaaaattcttcatatacatgtatccccgagtcctttgttgagatgactacawgtaktgtgtgtgtrwatatatatatatgttatgtatgatatatattatatatagtatactatatatagtatatrtatgtthtrtattatastatkttatatatagtatatatatatacgttatgtattattacttataggtatgtatttcttgttttttttaggttgcaacagcaaatcttgcctgggcttcagtagcaatacatcaggtgcaggtgagtctttggggtgtttttgcaggggcttcctaagggagaagaggtttttggagtgaggcattgaagaccggaatagaggttaagtcacccaatgccttattttgggatattacaattttctgttatttctagaaattttaacttaatcagttatatttacttactccctgccttaaatattttgcaatayatgtgtgtccattcacatacatatrtatctatatataaaataaatacatatataattaatgcaataaatggcatatgtcctgctgtagtatttgttttccacygaaaacctaggaacaatctcctactggagttgcattgatatttttatgattccatttcctaaattaaattttcctctaagtgatctatgaaacattctaactttaagatatctggttcttttgaagatatctaatttaaaaatcaccaactacttatagttttactggtggttagactttaaagttcaagaacatggtagcaatatagcgttctttgtatcttctccttctctctttttattttttttggtggtggttttatttttctacttctgtttcagcaaattgaggttgatgagggargaactgtatgctaggaagaaaaatcgagctgtaggataatagaaggagtagaaaggactsgaattatcaggtgtaggtggaatatgtgctcaactacagtttttagaaatacagtgtaaagtagttctaaagagagacttgggtcgactatccagacctgaatgctgcttctatcacttattaattctgaagcctcagtaaggttcttaacatcttwakaagtccattatgaaatgtaaattccaaacctataatgttttgtggtgcttgagacaataaatagaaagtgcttaaaacaatgtttagcacatttaagtattcagtaaatattaatggttattgatattattattacattataacccaagtgattgtgttaggccttctttcaataaataaggtaattagtattctggaagttttattttgaaataagcagaaatctcttgtaattgtacctattattttatatggtaggtatgcagaggccttgccaaacagacagaattgaatgacttcctactcgaygtatcaaagtaagtgttcatttctagggatagtagctcttattaatcaatggtttaaattaagggcagcctgtggcagaaatagaccattgtctattgcagctgataactgaagatccgtctttacaagtagtctgggaacggttaatcatattatggattgtagagttatattctcattcacgttcactctaaagtgaaggattgcagatatatatgtgatgatgttaattttccatttgatgtatgttttctaaatagactgagaatatgttaaagacactaaatatctctatttatgcaggagaatactggctacagtaggagggaaaatattctggtttattttcttccaaaaagtcctatttggtttttctaacaatgtcagtaaattaagcatcattattattaktatttaaattttcccatgtatagtatctcagttatcatttctgagaaaatgttttatttcgctggtttggcctagaaaaaatccctttggctggcagtggaagcaattatataatagatatttattaaatcacatatttttattggttttatttactacaggagtctgcatctatatatctgacccatgtaattaatcactgaaatctaaaatatgcgcygggatgtggtaactttagggtcatgtcctcctacaagttcactaaaggaataatgtagtttttcctctgtggcctccagcaacaacgatgacatgttatgtttcacatgtcactgtatatgcacctaacagtttacccatcagtaattattcttgatgctcattaattagtttgaagttactagtttatgttacatttagtttttgaaataataaaattaaagaagtatgggactgaaaaagctccccttggatacctgagccaactaggttaaacactacctagccagtgcagtctatcttaagagtccttytttacattttccatacgttacatgcatatcgatttatcttttttcagattgacattttagtatatgcactatttgcctctgaaacatttactcgctgttcataacaatgaatatatactcatataaagtcattagatccatagcattacttgtattctgacatttcttctcaaattaattacattactttctcagtacactttaaatgctaactttctccagttttcagtgataatttatatttaactattgatgagatttagcacatttaaatatttgtattttagatcagagttattaatgaaaatattaaatatggtggatgcaattttatttctgcatactttgttaaatgcaacagactttctctctacactgatacttatcaataaaataaatactgattgcattctctggaattatagagccctcatgctgaggtcaatcataaagtttcatttatctctttaaaataatattacagtactgatttttttttttgccaaagcagaaaaatcaaatgacatttatctttatggttttttatttaaatgtagacaaaaccaggaaatgaattcaaagtgtaatatgtactgtgaactaatgaaattacttacaggatttatgtttctttttttcagaacatattttgataacatagttgcaatagattctctacttgaacacataatggtaggttgtttttgttctgagtatgattctgtttaacccttaggcccatggtgctartatatggcataacatttaaacttattcatccacaggcactttcaatattatgaaaatgtggtggcttaggaattcaccttgatctgtttgtcacttgcgttaattttgggggagtaagtttgaataacatttttaaaaatctcagagcttttctttattaatggagagctatacttagaaaagacatttggtttctttttatgttcttcaaaacacctcttacatatgggacatgtggggaattctcgattgattttttcctgatcttcaagttcattctacttagttctagtcttaattattcctctctcctagatggctgtcaggcacttttgagcctaaagctgtatgacgtagagttataggcatatttccctatgctactgagtacttttaggtctctagtgagacttctttcaraagtggcttctagttgtcagaatgtatgggtggatgccatgcatgcccaggccttcttgttaccatttgtgccctgttatgtgctttaataaatgttctttctacagtactcttctgcaataaagagttttctcatctagagattttatgatgcatactgataagttttttttttatttaacatagtaaaagacaaatatgaagtgtgctttgtgcaacatcttgtagagacaggaagtttactaaaggtaattagagaataacataggttattaacttcagcacattctttatgtgataagttatttctatggttttatctagacaaaaataaaataattgtacattaaaataacttctcttgttatgaaacaactgaaggaatttgtaaatcagtgagtagctttaagaaaaatataaagttataatgtagactgacactgagcttatgctaggggtacarggagcacttactgctcgttctttgtattattaatatkttcttttaaaaacagctttattgaagtgtaatttacatactatacagttcatccatttaaagtgtgcgattcagtggtttttactatattcacggatatgtgcaactatcatcaatcaattttagaacattttcattacctcataaagcaacttgatacccttttagctatcatctccttagcttatcacttccttacgcccctatttccacttgcctcaccagccctaagcaatcattgtctacgttctttctccatgggtttaccaattctgggcattttatctgaaaagaatcacataatatgtagcgttttgtgcctggcttctttcacctagcatactgttttcaaaatcatacatattatgcatgggtcagtacctcattcatttttatgaccaaataatattccattttgtggatatacgtaccagattttaaaaaatccattcatcagttgatagacatttgcattgtttccatatcttagctcttgtaaatagtgctgctgtggacatgcctctacacgtttttgtttgaatgcctgttttccattgtttggggtatatatctaggagtggaattgctgggtcatgtagtagttctatgtttcactttttgaggaactgccaaactttccatggcagttgcaccacttttcattcccagcagctgtgcacaagggttctgatttctccacatcctcaccaacacttactattatctgactttttcattatagtgggtgtaaagtgctatctcagtgtggttttgattagtatttctctagtgactaatgatgttgagtatcttttcatgtgcttattggctgcatgtatattgtcttaggggagatgtctattcagagccatagaccactttttaattgaattcttcgtatttttattattgacttgttaagagttcttcatatattctagctgtaactcccttgtctcataattgctttgctaatattttctccctttttggtaggttgccttttcactttcttgatagtgtcatttgaggcacaaaagattttaattttgatgaaatccaatttagctattgttttcttttgctgtttatgcttttggttttatatctaagccaaattagagatcatgagaatttactcagatattttcttctaagagttgtagggtttttaactcttatatttaggtctttgatctgttttgagttaacttttgtatatgatgtttggtaaaggtccagtttcattcttttccatgtagctatcaagttttccccagcacatcagttgaacataaaatgccattttctttctggacgctggatgctgttctgttgctctatatgtctgtggtaatgccagtacacttccttgattactgtggttttgtagtaagttttgaaattaagaagtgtgagttccctaacttttcaagattcttttagctcttctgggtacctaacaratacatttaaattttagaagtagcaggtcaatttctacaaagaaatcaggtggaatgctgataggaattatgttgaatctgtagagcaatttgaagtattgccatcttaacaactgtaacacaattaagacttctaatacacgaacgtgaggtatttttccatttatctagatcttaatttttttcaatggtgttttgtgttttttgagaacaagtattgcttttattttggccaatttattcctatttttttaatgctattataaatggaattgttttctttattttttgattttatactgcaaatgtgtagaaacaacattggtttttataccttgattatgtatcctgcaagcttgatgaactcatatattagttccaatagtttcttagtttcttagtggattacatacatacacacacacacacacacacacacacacacacacacacgatcatgccttctataattagagacagttttactccctactttctaatccagatgtgttttctttctttttctggcatgattaccctggctagaacctacagcacaatactgaaaagaagtggcaaagtgtggactttcttgtctcattcctgatctcaaggaagaagcatttagttttttgccgttaaatatgatttttttgtgggtttttcatagagggcctttatcaggttgaggaaattcccttttttcctactttattgcgtgtttttatcatgcaggtatgttacagtttgtcaatttttgtgcatcagtgtagatgatcatatggtttttattttgaattctattgatagtgtatattacatcaattgattcttggatgttaaagtaaccttgcactcctgtgatgaatctcagttcattatggtgtgtaatttatattggaattgtcctaaatttatagaaaacttgaattgatatcttcagcatatggcgtcttcctagccaaagacattttcttattttcagttttttttaaaaaattgttgactgaatgtattgattatggtcccccatagttaacttatttttccagtttatagtctttagttttcaagatagtgatttataatgcacaatagtagagattctagtggttcttcttttccagtttttacagtacttatttctttgtgtttgttaatgtattagctggaacctaatgaacactgttgaatggaaacaacagatatcaacaggagaatatatttattttccttgatgtgtgtacttctcacatttcattgctatgtatatttgttgtgggtccacaacagatataatttatcaattttaaaacatttccttctattcctaattttctgtgagtttgcatctgatttggtgttggrtattrtcaaatttttatawgctatttcaaaatgattggagtagacaattgtattattactcaatgttgaaccactcttacattcctggtataaaggctatttaattgtaatattttctttattcctggattggttgttaatatttatttccaagtttgcatctatattcatacatcggattgctcaatggttctttttttctatctttggatagtactggtattgggttatgctacacttataaaatgagctcagaaatgttccattcttttctatggactaaagtggtttaaataatrtacatattatttgttcacctgatgtttgatataaatcagctaagaccccattagagtcttattggggtagatctctgattctcttttcaatttcttctatgacattggatccttcaagttttcattcacccttttcttttataatgtttcttgggaatctgttatattcctataatacatagtaactggagttatcaaatggtgagcaaaacccttcacagcctctgtcctcattgaggttctartctgtggggagacagacatgagccaaatatmaacataactatgaaactagtcagagtcaggcctattaaggagcataacmgtgccctgaaagcttgtgatgggatctaacgtagctggggaggctgtggcaagctttcctgatgctgtgactttggtctggtggatgtgtggaagttacacaggcaaagaggaaagagggttctactttgggggatgggggaacagtgtgctcctgtgtagaaaggtcctggaagggccaagtcacccaggcctgggagggagtttttaattaaggcttgtaagctagaggtgcaagatcagatatgtgttttgaaaagataaccctggattagaggaaacaagtggggaatkaggttagacttttttgaggatcttttttataatacggaagatttattattttcagacaagcaaatctgggtaattttttttttttttcctgagacatagtctcgctctgtcaggaggctggagtacagtggcatgatctcggctcactgctacctctgccattctcctgcctcagcctcccgagtagctgggactacaggcacgcgccaccacacctgcttaatttttgtattttagtagaaacggggtttcaccatgttggccaggatggtctcaatctcttgacctcgtgatccacccacctcagcctcccaaagtgttgggattacaggcgtcagccaccgcgcccggcctaatctgggtaattcttaaattactaggtgatcagttcatctaggtcagtgcttctcaataggttgatgctgacatttaggcagagcagttccctctggcacagtgttatcctgggcaccgcagaccygcagcgtctttagcttgtgagaactcgtaaccaacaaacatacctgcactcatttccagacgccctgcggccaggtggctcagctgctggttgggaatcaatgaattagattttcaaatcaatttttataaatttgtaggtactttatatttcctttctkatctgaaaacatcaactacttaactcaaattagtgtgagrtaataaaagagaggatttactggctcagactgctgaaaagccattgaatgttcaggcttatataattagcggacatgggggctcaaataatcttttcatgaatatgtctttctctgtttctcagttcaacttacttttgtgtagtccttagtctcaagcaatttctctttacatgatggcagcaatagccctgacagctgtcgtcttatgtttaaaatgaagttttatatcaaaatcaataaataatcagtgtttatatcawatcactcacttcaccaacaagataataaatgaagcacatttgtttcctaattttttttactcttcttacctactacccttacatagttttagatatataaatatttttatatatttcatgtttcttaaattaatttttcatgatgatgcctgtaatttcttagatatcatttactaacaagtgttacagtttyagtatagttttaatgatttctttgctcctcactttttcttgaaccccgagtcttcccatgtgtccttgaatttatctatttcttcatttttgcttgagcccatctccttttctaaaatagttcaaagatagtacatttctgagtactgtacccttcttaaatatctttattttcctttatgctagtttgacttggtaaatacatttaggcttaaagtaagttttccttagaaatttgaagatacattttaactgaatttaaaatctactgttgctataaagagtgttgtttcacttataggtaaacgtatgcataggtgtgtatgcgtatgtgtgtatgcctgtgtgtgtatatgcgtatgtgtgtatgcgtatgtgtgtatgcatatgtgtgtatgcgtatgtgtgtatgcgtgtgtgtatgcctgtgtgtgtatatgcgtatgtgtgtatgcatatgtgtgtgtgtatgcctgtgtgtgtatatgcgtatgtgtgtatgcgtatgtgtgtatgcgtgtgtgtgtatgcgtatgtgtgtgtataagggagtaggggtggcttttagattgacctgatgtttggactttataaatattaccaaaattttagatatttttaactccttttcagcatctgagggtcatttcaaagttaaacattaatatttggggagagtgaaaaggtgaacataygtttagaaatgctcatcttaaaacagaagcctctttttctttctttagacagggtctggcactgtcaccctggctggagtgcagtggcacaatctctgctcactgcaacctctgcctccctggctcaagccatcctcctacctcagccttccaaaagtagctgggacaacagacgcatgccaccatgcgcagctaatttttgtatttttagtagagacagggttttgccatgttgcccaagctggtctcaaactcctgagctcaagcagtccaaggggcttggcctcccaaggtgctggaagtacagcgtgagcccctgcacccagccacagaagccctcttactgcctataattgtttgtcagttgatttttttgacatatgaaataacattatcctcaaacaagaaaaattttatctcttcaaatatgtatacctcacatgttcttcttgcctactagcatgctaatgattgtgataacatacctttgtcttgttcttaactttaatatcttaaggcagcgattttgttattttaccgtttggtataatatggactgttgttttgaggaaaacattattacgttttctatatattcttttattccattttactaaagtttttatcattaatgattgctgaatggcatcacatgtttttgtttttgagacggggtcttgctctgtcgcccaggctggaatacagtggctcagtcatggctcactgcagcctttgcctcctgggcttatgaaatcctcccacctcagcctcctgagtgtttgggacttcagatgcatgctgccatgcctgactaatttttatattgttttgtagagaaggggtctcgccatgttgcctaggctggtctcaaactcctgggctcaagagatctgcccatctcagtctcccaaagtgctgggattacaggcatgagccaccacacccaggctcatcatatgctttttgacaaccatgacgataatctcgcagatttttctcctttgtcttattgctattatgaattatgataatagactttatgctactggacagttcagaataaactctgtttttaatattgtcatatttgtttaattattgctaaatttgattgggttgaatttttatttataacttttcttctgtttcaaaagtaaatctgtgattttcttttttatagtttctttgtcagttttcagtatcagtgacgcagcatacattgtaaaaacaactggaaaaaattgttcttttctgaatgtagatcagtataaattgtacgggaatttgttgaagatttttaaagaattaatatttgaagccattttaggctggtgccttttttgctaatattttttgatagtttttgaattatctttatgattctggttggatttatatttttcarcactttctaagcttattttattttctgaaacattgtccatttgatccagattttaaacaaatattaacatatttatgccaaaatattaagcaactgacattacctcaaacactgcagatacagatttcactgaatataatttaatgtttaataatgcaggatcattcttgttacttaataatttaaaatctcatgggtttgtgaattagatgagtgattcttctgtatttgccaacgactcagccccatcactctcgctgtgcctttatgtcattcatttttcctcaaatatttattgagagttttgggttatggagatcctatatgttctaagccaggggtttgttggcaaacttttttttgtaaagggccagatagtaaattgttatgctttgtgggccatactctcttgcagctactcaactctgctgttgtagcagccataaaaataaagaaatgaatgaacgcggctatgtcccaataaaaatgttatttacattaacaagcagggagcagggtttggaccacaaaatttcgctggccctaactcagccttgttctgagcatttggaatactgtgggaaaagagaagtggtttctgctgtttctgyagctcacaggctaagggaggtgagaagtaacctasaggtcctgatactaggcastatactcagtccctgcgtagtgggcacagccagtatttgtttggtgtatagtagcagtgagtacaaacatgtaatagtgtaatagttctatagtagtagtgagcacaaacgtgtaataggatgaagacagttacctaacttagacttatttctattaaatctatacattttatatgagatgctatattttgccctggctgcaaggttcctcttgcagagactttgtgatggctgttttactgtaaggatgaattctttttctccgaggaataatttcatggctatgatctggatagttgaagttaccagaattctcaatagaggtaaatactgtattaatggtgcagctgtagccccaacccactcaggacagtaggatatgttaggcattgaagacatatttgttgaaggaaatggaagaacaaatgagtaatgaaatgaatacatggtttccatttagaaatggaaaagcatatttgttataaaagcatgggccatgggaacagctagtatcagttcaaatactgctaccatttactattcatgtaataatggggcaagttacttctcagtgcctcaattttcctaataygtacaatgggaaaagattttcctgcgttaatattgttattgtgaggagcaggcaaatcaattcatataaattgtataaatgttcctggcacatagtaaacacttaataatctgtacaaatttttattagacagtacatcaaataaaactcagctaatgcaaatatgaaagccatgtatctccttagaggttatatttcatagcttttacacctgctgcatcacagacttcaactaatcagaatgagtggtggtygtagtgctgacagaggctcagatctaggcaccagggaaggcctgagaggttctggaagagggccttggatggcagaagggcactgggaagttaggccagcagctgcttaccaactaaaacagaagtgtcagttggtgtcagaatacacgactgatatgcttccctccagcacagcagtatggatgcatatccgctgtgtattctgttgggatctgttagtattagcatgtaacagtgacttttatatcatatatatgaaatrtttatatacttgtatatttatttacttataatgctaataccaaccaatyagagtataggacagctgaaattaatacttattttatgataaagtttacctgcaagttctttgaatgtctcattgtcttcctcttattttgtcatttgtctttagatatatgcaaaaaacctggtgaatgccgatcgttgtgcrcttttccaggtggaccataagaacaaggagttatattcagacctttttgatattggagaggaaaaggaaggaaaacctgtcttcaagaagaccaaagagataaggtacagctagaagtagaatgtcctatcctcttacggtagatgtgcaggcgttccgttacccatttttctgtgcctattcacaggtatgctgacaatacttgtcatactgtgatatcattcccaccaggacccgcctcctgaaggtagtacttctgggaatgacattgcaggcagtgcccgagaaaccgcgcctaggaagccttagcgtcactcctggaaatgccgtcttccggaggcggtccttttggaaatcatgttggaaaaactttctagtgctcccaggtaggtaaaggtacactccacctggaatctgcaggttttcccatgtccaagagaaaaggtgtgcttatgcaattcggcccctacttcttcccaaccggtggcctgtctcgcagtccagacagtagtagaaattgatctggtatatttgatgacttaaatacactctgtgactgaccagctgttttaatcaatcacatagcacacctgtgttgcatcttgaaactgaagtctttgtttttttaagtggcagccgttgtcacttaaatgaacagaatggagtttattttgttgatggaggcatgggggcttgctcatatcgcacctggaaacctacacaaggagcactctgrcaaaacgtttaagaatcgagcttaacattcagaagctgagaaaataattttagacatttgcatttcwtttgctgtatgtgtctcgtttaactcatcttctgtataacaccrtaaagttctctggtaataacaccattctggyaaaacactgtgtcttcttaattaaggattgctgtttatttgggcgttctatcataaaaggagactgatgtcagggaaactcraggtgtgcstcaccrtggggccccaccactgtctgcccctcrgcgcttcctgtgtattccatgtccattaactctgatttataggcactatattggtacttgggttttaaaatttttttgtctgtttgttgttggtttttttgttgttgctgttagacctcagtatagcatctggatatagtcatttagataagtcatttctcttgctgaagatttgagtgtttcctaacactgttggcattgatttaattttgaaaataacaactttaaagcctgtgtttataagcgtaagaaaaacagagtgtgatttactgtaactctcagatgactggttaatggcagccatttatgtaagggcggcttcttaattatggcttccattgaccacagatagcaaaccacagagagcatgaacaaaagttatagttcagactgctctcagaccaacgcaaagaagcataaatcatcaaatggattctgataccctttgctcatggcaatctaattcattgtgtttatgttgttcaaagcacaagaaaaccaggaaaaagacaaccatgagttttatgcagtgtttggttcactctttggtgttttaagtagattctcttttgtgtgaactatcttttgagtttttctgatagtcctctagctttatttcaataatggtgatttcctataatgttgacaatgtaataatatggaaattatttttgaactatgtaaaatgtagatattgtgacttgtagacatctttgttaattaaggaagttttgaaatgagtgcctgtgtgatgatggtatagtaatgagaaaaatataagtatgaaaatatttttgcaaaggaaaaatactgatattagatataaaaaacagacaatccttgtattttgattattttaaaatttaacaaatkaggtaaaaatactagaagttgtacattgcgttatttctgtatagtgcttgaattgcaaacaccataaaattcagttctgtataatatctcaagctcacgtgtaacctgtgagtttggttatatgtgtggtagaaagcacgatggtagagaccagcattctagtgttccttgtgccactgatattttatgaatgttggcaaattactgaacccatataggccttcgttcacacctcattgagaatccactaaaaaaatttatgttgaagcgtcttgtaaattataaggtgcttcgcaaatagaagggattattattgttcagagcaggaggatactagttgattgtttgatctcagtttgtgagttaatattttaaggttctcaggtgattactgtgtaatggttttctgctttatttttacgtayttcataaggtgatttagaatatgtaaacgtaaaagtaatacacgcatttaagtaaaacagtgcttttaattcaatattattaacaatggaatatttttgaattattctacagagtccatattttaattagcatgtccttctcttttacatatgcagattttcaattgagaaaggaattgctggccaagtagcaagaacaggggaagtcctgaacattccagatgcctatgcagacccacgctttaacaggtaagaaatagctgatgtcgacactccattgatttcttctgtgatgtcccactcagctgaaacctcttccgtggagcctgagttctccacgtcccaattcagttctttcttccttagttttcttctctgaaccaactctgctatcaatagtcagtatattcagatatttataaaatgatggattctaatccactaatgtatcatgatatctagatacaggagtttagaatgttataaaaacaactgataggcggtagttttaatttatagagctactgtgggattttttttccattatagtgtcatgattttgtaacaaacatgttctccgtcaaatcatatgctcaaaggctgcaacacatagtaagaaatttgcatgcttttgagatgagtaggtctagctttgaagcacggttctgtcatttcttagctctcaactgacctagcataagttacttaatctctctgagcctcagtttcctcatctttaagatgagtatgataatgccaattttgttgctgttgttttaagatcacagataatattcatgaaaggtctggaaaatttacctgacccaaagtaactaaataagttacatcttttattggatattattaaagatggatattaggaaggcttataaagattttttgttttgttttgactttctttggagagttgcaaacccaattatgtaatttgattttaataaatcgctagaaatggaaagtctcaggattgatgctgtgactgttagagaataatatttacagtagtttgacagcagtgtttagttaattccaactcgtggtttactttaagagacaaataacataagcaataggaagtttattcagttatttgatcaattgatgtcaaatatacacaactcctataaaaacataggaatattctagtaatgtatattgtcaataaattaagggtacactgaaagtttttttccaaaagtccaaactcatcatttagtacttaaaaattaaatatatttgctcatccttatgtccaatctttatgtaaaaatgtatgagtcagactattaagaaaatgaaaatgcaagcaccagattaggagaaaatatttgtaaaacatgtatctgacaaaatacttatatctaatatataaaaactcttccagcataacaatgagaagataacccaatttaatacaaagggcaggtgattttaacagacagtccacaaaaggagatatacaactgatcaccaaacacatgaaaaatgctcgaagtgaggggaatatagatgtagttgacatgagacctcactgtacagcagcttgaatggctgggactttaaaacattggcattagcaaacattggccaggatgtggagaaacgagtaccctcatacattgttggtgggaatatgaaatggtacaaccgcttgggaaaacaggtttgcagtttcttgaaaagttaaacatacacttactgtgcagtccactaatcagctccgcttctagatagtactacaagcaaaatgaaaacatatggtgctacagtaggacttgtatgcaaaccttcaaagcagaattatttataattgcccaaactggctattaaaaataatattgtccattaactgggaatgaatgaacaaaatacgatatgtccattcaatagaggtataactcagcaataaaaaggacttaaccactaagacatgcaacaacatggatgaatctcaaaaacctttatgctaaatgagagaagccaggctctgaagactcccatgtaactacctaccgttagctatgtcactgtttctatgcaccttagtcctgttttccaaaaacatgtcctcacaataggagtcagcaagccttttctattaaggatcatatggtcagtatatttgcatttataagcactaatgtccttgtcacaagtccacagctcagccttgtggggtgatggcagaatcagacaatatgtgaatgaatgrtgtggctgtgttccaatacaactttacttataaacaggagagggctgatytggcccctgggtgcggtttgctgaccactgctctaagtttttaaagtggaaacactataagttggtttagcaagttatatctctcataaacacgatcaacttcaaaggattatgttattttaccaaatttaattgtatttctcctctgaatccacgtttttttttggtctgtttacttagtaatgctggatacttcaaatgataagctgaaagcctcttagagactatcctagaaaactcacttggagacaaaagaaccaacagattagaatatttttggaaaggttttaataaaactctgtggaatgttactgtccctgaatgtagaagctaaaagtgccattagtcatatgcaatagaagcatatgtaaattgcaaagattgaggggagatttatgactgactgtgtcctttatttcttctgcccttttgttgttgttgttattttyggttctgtcaccccacagagaagtagacttgtacacaggctacaccacgcggaacatcctgtgcatgcccatcgtcagccgaggcagcgtgataggtgtggtgcagatggtcaacaaaatcagtggcagtgccttctctaaaacagatgaaaacaacttcaaaatgtttgccgtcttttgtgctttagccttacactgtgctaatgtaagtactatttattaaataccattttttactactcaatattaatttggaatctttttcataaagcagcttaagggctttttttttttatttatatttcctttacaaaccaggaaaagtaagtgattcctgattgtacatgttttagaaaatgtcataaaatgccctggaaggaaaaataacagtctcctaatagtttgcgtttatttcaaggtgggaatttgttaagaagaaaaatgaagttactgtaaaggtaacatgtccaggcatcagtcttatatttaatggtatctactgaaatgaagaaagaaaatgctacctaaaccttgactgtttgtcaaatgcattcatttgagatccttacacaaaagtatagtcatagctcatgtttggacacccaccaggaaagttctgtttgtgacaaaaagtgaggcaccaggttgtccatgtcacatgcattctmggtgttaactcagtcctcgtgaaagttgtaccgtgttcactgaagggtaaaatgaagttcaatgtgcattctcaagtctcactttaaaaatagtggaatttattgtctgtcttttacattgttatattttagatgaatggaacatttagtattctgtaaactctagtaatcctttaataatattactagaattctgaggytagggaaaattttagtatggtgatcttttcatagagctaaatcaacatacattcagttgcccccttaatcaattagagaaactgcttttttgggagtaggactggattccataggagtaaccgtgtaactcataggacaagcggagacatacctagggacaagcattggtaaaacttaacttctggtgaccgagggtaaccgtttttaattcagtttgtgctatttagtgagagtacccgtcctctctcctcacgcattcctggtgcccttttgggggacagtttctgttacatagctcctcagaaataaactaggaatgctgtcaaacacttttgcttcaaacatttttagtatctatgtgtctctcataaataatgttgacagcttatgcttgtctcatttagtttaaaagtcgcaaagattgtaatttctagtttattctgaatattgactgttttatcatttttaaatgtagccaatggaatttaagtatcatagaagcttgatacatattataatatattaaaaaacacaatagcaagatcttaggatgggaaaatttggcattatgtttactctctgaatatgtatttgttatccaacaaaagttgaatatattttatgctttattttattaattaccctaagataatttctatttataagataatacatgggtatgtctaaaacatgtataataagtgttaaaattcattttggattgtggtggtattatgtattatcacatatgtgatcaartcaactattataacattttgatagatgtcaaaaaataaaaaaaaaattgaaaacttttttcttagatacctatggcttaaaacagcaatagttaatataactgttcgtgaatttttcttactgttaaatgaaactagatttagcataatttttatacttttcattttgaaataatttcagacaaaagcaaaagttgcaaaaataaagttccctgtatacctttatccatattccccaaatgttaatatatttgccatttttgctttgatatactttctctgtctctctctttctctgttamatagatactatctttctccaatctatatgagagtatgtttcagatgtaatgtctcataactcctaaatgattcagtttgtattttctctaaaaacaaggacattatcttattttttcactgcataatttaaaaatcaagaaattaacattggtactgtattagcttgctagggccactgtaataaacatcacagactgtgtggcttaaacaacaggaaatttttttctcacagttttggaggctggaagtccaagatcaaggtgtgtttctcctgaagcctgttttccttggtttgcagatggccgccttctccctgtgtcctcacatggtttctgctgtctctgtgtacatgcctgtgtcctagactcttcttatgaagacactagtcatatgagattaggacccacgctttaaatctcctcttaccatagttacctctttaaaggccctatctctaaatacagctgcattctaaggtactggggcttaggctttaatacatgaattttaagggggccacaatctaacccatcacaagtactgtgytgttatctcatctgcagacctcttgagtctcctttcatctggaactattccttagtgttgtctctcatgacctgggtatttttaaagcgtatacacctgttgttttttaaggatatttcttttttttttttttttttttttgagrcggagtctcgctctgtygcccaggctggagkgcagtggcgctgtcttggctcactgcaagctccgcctcccgggttcacgccattctcctgcctcagcctcccgagtagctgggactacaggcgcccgctacyacgcccggctaatttttttttggtatttttagtagagacggggtttcaccgtgttagccaggatggtctcgatctcctgacctcgtgatccgcccgcctcggcctcccaaagtgctgggattacaggcgtgagccaccgcgcccggccaaggatatttcttaatttggatttgtctggtgtttcctcacaattatatgaaggtcttatttgtgacaatgagttcacgtgyggatgtgtcctcagtgcatcctgttagcaggcatgtgcttcgtcactgagcctattaaccgtctgcacttgaaaggtcctgtctgcaggtttctccacaggaacttasccccactttctcactgacttctttagaagagagtttatacataaatctctacgtccgttcattctgtctgtctctttctgtctctacgatacctaacctccagtctaataycacagaatgccctctagccatctcattttcatcttcggaactttttttgttacagtgagaaatttggctctccctattcagcatcaatcttattccaacttgtccctcttattttttaaggaagctgtaagaattgcttccattaataaagttttattatcacaatttctcttaattctacctgagctaagatgccaaaaagtactgataattctgacaccaaaaattattttaatgagctatcagttgagaatttactgaagttcacctttaatattttaggaaagtttcagaaacctttattagccctcattaataccagcattttatattgccgcttgtattacagcaatttgataacagggctgtttcaaaatgggatgtgggraaaagtcattttgagtaagaatatgtgtgaaagttaagaatatggaaaytgatcatcttaaaatttattcatttgtccatgtatcccttgaaatattgttgtatactttcaagaatacataaattaagaactagactagcaggttcaaatgcttttctaagtcactaattgtggtatcataatacctggatttaatcatgattaaaccacacagaaaaaaaaaaaaaaaaaaacttctgaaaagttttaataggcattccatttttacattgattatttagttaaattatttagggtaaaattttggtaaaataactagtattagttgatattggaaatgattataatttttctaaacacttcaaaccccatcacaacagtggttttctccaacagtgacaagtagtatatggagcagcagttctgtcgagtagtcacccgcactggaccaaagctggttaccttttctttctcccatccaagtactaaccaggcccgaccctgcttagcttccgagatcagacgagatcgggcgcgttcagggtggtatggctgtagacaccttttctttctgagatggagtttcactctttgtcacccaggctgtagcgcaattacgtgatcttggctcactgcaacctccgcctcccgcgtttaaacgattctccagcctcaggctccccmgtagctgggattacaggcatgcgttaccatgtctggctaatttttgtatttttagtagagatggggtttcaccacgttggccaggctattctcgaactcctgaggtcaggtgatccgcctgcctcggcctcccaaagtgctgggattacaggcgtgagccacctcgcccagccaaagctgattacctttaaggtatacattgaaaatatattcagtgcagctgcaagctctctgtggaatttattaccttttttcttttttttttttttttgagatggagtctcaccctgtcgcccaggctggagtgcagtggygccatctcggcttgttgcaagctcctcctcccaggttcacgccattctcctgcctcagcctcccgagtagctgggactacaggcacccgccactacacccagctaattttttgtatttttagtagagatggggtttcgccgtgttagccagggtggtctcgatctcctgacctcgtgatccgccckcctcggcctcccaaagtgctgggattataggtgtgagccaccgcgccctgccccattttttaactgcagtatatttttctccttactaaagctcataaaaattatattatttttgaagtttttccaactcaaaaggaataagagatttgagtccacagcttcataatgattccttcttccctcttctccctggccttccagtctgatgaagactggtggctggrtttatttcaaaactttgttccaattcagaaagaccagttcacatgtcttctttacaatgatattttttgccttgttgaagaaagcatccatgtaaataaaaaaataaaagaaaayagctccaaatgtatgctrgtttcaataagatagcatcrcgtwtctttatagtgggatccctagaaccttacccacttgaaaaggttgatgccacgaactactgccaatgaccaagacccaaattctggtcatcactgtggcaccgagatgcttgcggttgttcttgagcaattttgctttgctgttttgagcatttttttcccaagcatcatatgaaaattaggaaaaacaccttgtattatgcgttgtcccaaacaatcacatctgcgggttccctaccttttcctgaatgttctactttctagagaacatacattagtaatgatcaagatcataaatatgaaaaatctttgtgcagcatgaagtgctttttaattgttgaccgttattgtcattttaattgtgttgatcttgggsaattcagagtatttctgctgttgaacaaattattgtgtccstaatagaagcatgttttgtacatgaaaattcttgtttctaatactgaacatgataatgtaatggcatattttattgtggtcttgtttgattaagagcctatctaagaagcagggcacataggccatgttaatgcttattatgtttttattttcctttatttcatctttagaaatacttgaatacattccttttatttaattaaaggggaacgtctctgattggcarcatctctctttcatttattgagctaacatactgggaagtactatcaacagraaacatcttttaaatccaagtcaattaatttactcatttatactgtgattttaaagaaaccatttaatatgccttagaaaagctaataggacagtagtatcagttacatcttttgcttagaaaaataaatcttttaaaacagattagctctgtacattttggatagaaagacatttaacatgaaaggggcatgaacaaaatttgctattaaaatgaaattagttggttagggacaaattgaataagtggttgaacctttattcgttccagaattcaaccaccaagtattgcctatcttttttataccagrtggtggatataaagatgactatgataagaacaactcttatttgatataaggctttattgtgtgacaggaattgttctagacactttayatacgaaatctctttttgtatgttctcccaacaataccatgagtgtggttattattatctccacgttttataagaaaaaaaatggatgtatagaatttaaataatttccccaagggcacatagcaagtatgtgatagagccagggtttgaatgcatgcagactggtccccgtgctcgctaagtgtgctggcttctctctgacatcgttcttccctaaggtcctaaggttgcctacagggaagacaattactacgaagtgtttttacattttatatataaaatatggattagggtgcattagggttctccagagaaacagaaccaacaggatacatatatagatgaatagatacacgagcgaggacttaggagggaaattggttcatatgattatggmagctaaaaagtcccccaataggccatctgcaagctggagaaccaggaaagccagtagcatagctcagtccaagtcygaaagcctcacaaccagggaagctgatggtgtaaccctgagtcagaggccaaaggcttgagaagctggggtgcagctggtgcaagttaaactccaaaggccagagatcctggagatctgatgttcaaggacagggtaggtgtcccagctttagaacagagagacactttgccttccctttgcctttctgttctgtctgggtcctcagccagttgcatggtgccctactgcattggataagggcaggtcttccctactcagtgcactgattccagtaccagtctcccagaaataccctcactgaaacacccagaaatcatgctctacctgctatccgagcatcctctaacccagtcaagttgacacttagaattaaccatcamagacggtgaggttaattttgtcagaaatgaagggggaaagwttaggaaaaaaacccaaaacttcatcgataaagtaatatagatggtagagcaargatagggttcatgaaagagtttggaatcgattaacagaaagtttaacacttgggacatacttccaaggagaattatgtaaattaaatttgtaattatagatgatgaactattgccttaagagtattgtatattcccaagaaaasttttctaagaaatatcaaaaatacatcttataccagtgcattgagtcacaaagttatctcctaaaattcaactatctcctgttagtggtgacatgatcacacacagaaacacacacacacacacacacacacacacacacacacacacacacacatccttttccctcatcttgaatttgaatactcttagatactaatgaataacaattcttaaactgaattatttttggggttacatgaaaataaaagtttaatacttctccaagtctacaagtttatagataactaatttcagccgagttcagtcttttttkttcttcttttggttataaggttataaaatttataactgacatggacatttgttcgttccacacataagcattaatcactcctagatgctaggtacagattaagaattaatggaccctacatcctaggtggtttcatgtcctrtgtttatatatttgaaatattccttggcacagactacaggacaattttccagttttatttgaccttaaaggtatcatttccaaaagcgcctgctctgcagtagatgcagctctccttcagctatgacactaggccctccacccttccaaatcattctttccctactttttgagttctcaatgtgtgtgtagtaggattcaaaacttaaaatcaagcagacatgcattttacaacctgatctattactttccaacattctgaccttggggaagtcagcttatgttcttgagccttagttccctcaacagataaacggaaacaatacttattccccaggattattgtcaggacaaaatgagatatgtgaataaagtcttagaacagtgcgtagtccatatgaataaactcttagaacagtgcatagtccatagtagacaktcagtgttgcatcctttgttttcacattagtcattatattttatgaattatcattgcagccaattttataaaatttcaattcattgttaaatatatagctggtttgttgtttccacaggccaagttgcttttcattaaaatttgatttgcttcatttatttactggaaaatagcaaggaagagcctatagaggtaccttttatgtctgccctaagatggaacttctgagcttacagaggaagagagaagtcagtattcctaccttaggacaccagttgtcttctatacgctgaggtgcatttggggcacacagctagagagtcatttttccaatgcccctactttctcctgaattcagctgtctcttatttcacaggaacataatacacacacattttttttttaatttgttcccagtgctttcaaatccactgaaacacrytagaggaaactattgtcacctttgcagtcctcagcatgaaagaactctctatggtgccatagacagtaggtgcttgggcctgtctttaagaaagtgttttaaatacttccacccacgattaggtcaaagatacaactctacygagaaagaaacagaaagaaatccttgtggtttttkttttgttttgttttgtttttgcattttggtactgtggtttccataaactagaatagttgtgcaagcatggtaagtcacataccaaatgctgtatttttgcaacagtgtattttaaatctctcagtaagtgtttttcattagctcaatttgtagagggtactaatatctattcatctttccattcttagattttttttcakgtcatcgtttacttgtttacctactcaaatttctctcaaattatctcccttgtgagagaccctcatgctcagatatatgtaatgttttccatgtgccccaggctttcagtgatctgggtccaggtttttgtttctgttaagtttttagcttgaaattcctgcaatatgttaggataaatttggaaactacaactacatatggttcaggcttgatttccatattctcaatggatggagactatttattttctacccatagccccaagtagagacaaggcttcttttttgcttatggagttctcagttcagctcctctcctcatgcagccacagggaagtctcrtcctgcatggaccttcccttcacatccgggagcctcaagccacaccctgcgatgggtctgttatttctttagtcggctgcagcactgctctatgctatgaaataaacagcacagcatttcctttttattgatttataatagttgtacatattttgggagtatgtagaatagttggatacctgtgactgtggtaatcatatcggtgtgactgaggtatctgtcacctcagatatttatattttctttgttttgagaccattatgaatcttctagctattttgaaatacacaataaattattaagtgtaattttcctagtgtactatcaaacaatagaacrtattccttttatccaactgtatttttgtaccccttaaccaacattatacacaatggaacattaytcagccgtaaaaaggaatgaaatcrcgtaacttgcagcagcatggatgaaactgaaggtcgttaggttaaataaaattatccaggcacaaaaaggcaaatatcacacgtctgactcacttatgggagctaaaaagtagatctcatgacagtgtagagtagaagggtggttacaggtctcttattcagtgttccccrtatgtatgtggagtatgtatttgattttaggacttgcttagagaatcaatttaatttgactaatgatattatttaatgctattgacaaacatatagaaaatatgtagtttaataagtattttgtcaattygattttaaatgtaaattaaataggggaaaasagtgcacaatttataatagtagaacaattattatatctcaagtgttcccaaagtcaaactacttgtatcttaaagaataccagttggtgtgcagtaaatgtttaacagcaacctctctaaaaacagaagggtcctgatttgtgtgtttccctgtttctctggcgtacattccctcaatatggacaatttcaagctacccatgcgccataatgaatgcagagttgggaagaaatgtgcataattggctcttgcaagccagttcggtgcaccactgccacaacagaaaagtagactctcttgttgattatcaccaaaatcaaacaaaagagccaaatgatgtggcaacacagtgctgatacccatctaagrtaacggttgctgatagcgctgagagcttcacagtcactggccagtgcttttccttagcctttccccgtgttattccattgaacgttacattcttggctaagtactacagtgtccttaggctacagatgagatcctggggaacagagaattaagtgatttgcctaaatgtatacaattagtaaatgatggacaagagatttgttccaagtagatgattccagagtttagatttctaagagttgcccgaccctaaagtgactctaggtttactatgaacattaattacaaatattagggtgtctcatagacacagtcatttctaagtgtaatgagggttattgtgtaaataggccccaataacaacattctaaataatcactaattaaatatttttgtatgccagttgagtaggaatgccattttataaaatgtgaatggatgtatttttaatgtgtggtagacatgctcttacagtcctgtttccaggttgtctttatcgttttgttttttgagcacatataccttttcaatatcctcgtgcctaagactgataggccatcaaaatatatttcagttttagacaaacagcagttttttctgctagaattctcttctacttggacagtgactccaagattayttacgcagtgttataggcaaataatttatacaaaatgcacctaaaaagacaacatagttttctaccttcatcagtagtttgcatgagtatgataaaatcatctactaataatcctagattatattattttctactattcatattaaaggtcatttagaaaatgggaagtaatataaattttctaaaactaattattttgtgctgtgattttaattaattttattttgtaattagtgttatttacctacactgattacaaatataaaaataaatgactaaaaattttaatttaaatttttacgtattttcaatatattaatatcaaaaattgtaaaaataatagaaataaaatttattctaattttaggtcataaacatataaaatgacaataaaaggaataactatcttgtagaagttttgtgagacatgaagtaatgcatacaaaacacttagcatacttcctggcgcaagtgctcaatagaattagtgactatagtagcagttagtttactgcctagtatagttactcttactaacatctttaccatagaattgcactgtattacaggtaataccaatttacagtaaatactgagtaaatcctgtggattgttcactttcctagcagaatctacgctatcatctctaaagtggaaagcaagtgacattccattaaggtatatgaggacaatgtgaaaacttgggtcttgakatgtttttgggtaaatgatattaaataattttttattgattgttaatacatggatggagctttcagaaagttcatgcactagaaggtcatgtcttgtccaggaagcagtctcctctcacagagtgggccttgcgcagctaggaaaaggtgacagcagtgtccagcctrtgcttctaaacctatctgtgctctttctcaactttactaaggaagattattttatcagttagaaaaaaaatcacggttatgaagatgatttcagaatgttcatgcgttttcgtttgtgctacccacagatttgccgtttgcagcaaaatrcttggtacagttgttcagttaataaattaggtatacatgcttctttcacaaaaagacaaagattccaaatttgctaacttcttctaatgacaaatgaaagtatttagaagatatattcagagaaataacatttaatctgaaccctcaagttgccagtgacattaacactgaatgaaaaaataattggtttccaaagaaattcatgctgtgaagagagcactttgaaaacagatctttgccagtattttcattgtcacgtgacttttttgctgaaatttatatgtcatgtatacaaattatgacatctatacccttaaaaagacagagcagaaacttttaaaatagtttcactgaggtttattgatacacaataacgtacaactgtttaaagtgtacaacttagtatacacacatacccatgaaaccatcaacataatcagtataataaatatagccttagtaatccctttcttttgacccttctcatcttcaggtgaccattgatttgctttctgtcactataaattgcagtttctaaaattcttttgtataaagggaattatataatctgtattatttggcttttttcacttaacataattttgtgattcattgctggtgttgtgtacgtaaacagttaattcctctttattacttagtagtagtttattgtatggatataccataactaatttatttacttgttgatagatttttgagtgatttccagtttttggctattacactaaagctacaaacaaacagttggtctgtgtacaagcctttaagtggccatagactttcatctcgcttgggtaaagatttatgtgtgcagtggtgggtaacatgggaggggtctgtaactgtttaagagactgccaaactgtttaccaaagtgactgtactcttttacattccataaatcacagcatgtgttccagttcttctacatttgtcatctgtacaccatctttggtgaagtgtcttttcacatcttttgtccatcttttgtttgtggtggtttgttttcttaytgatttttagtagctctttatatattctggatacaggtcattttcatttatcagatagattatttgtaaatatttgctcgcagtctttggcttgtcttttcattctcttaatggtttctttctaagagcaaaagttttaaactctgaagaagtccagttgatcaatttatccttttattatgatktttaacattgtattgaagaaatacttgcctaacctaaggtcgttaagacatttctcctctgttttttttttctagaagttttatagttttaggttctatagttaagtctatattcattttaagtaaatatttgtatatggtacaaggtaagggtcaaagtttttatttatttgtttatatattgctcttggatatttggttgttgcagcaccacttgctgaatcgactatcctttccttatggcctcgcctttgcagccttgctgaaaatcagctgaccgtctgtgtggtcctatttctgtatttagttccactgatccgtttgtgccccttgatgccactaccacactgctttaacaatcccattactgggtatatacccaaaggattataaatcatgctgctataaagacacatgcacatgtatgtttattgcggcactattaacaatarcagagacttggaaccaagccacatgtccaacagtgatagactagattaagaaaatgtggcacatatacaccatggaatactatgcagccataaaaaatgatgagttcatgtcctttgtagggacatggatgaagctggaaaccatcattctccgcaaactatcgcaaggacagaaaaccaaacaccacatgttctcactcataggtgggaattgaacaatgagaacacatggacacaggaaggggaacatcacmcactggggcctgttgtggggagcggggagggatagcattaggagatatacctaatgttaaatgacgggttgatgggtgcagcacaccaacatggcacatgtatacatatgtaacaaacctgcacgttgtgcacatgtaccctaaaacttaaagtataataaaaaaacctttataataagtattggatttgggcagtataatttctttacctttattctttgttttcagagttattttggctattctaggtcctttgaatttccatataaattatagaatcagcttttaatttcctatagaaaagcctactgggattttgattgggttgatgtatgagtagttcagttgaaagggtggtgtgaaatctctaactataattgtggatttttctatttgtctattttatttgcagttctgtcgttgtttgcttcatgtataccaaaactatcttattaggtagtgtaatacttagggttgttatatccttgtgatgacctgacccttttgttatttgaaatgattttctttatttctagtaataatctttgttctgaaatcaacctagcctgttattattaataaagtcgtaactttcttttgactggtattaaacagtatatcttttccatcattttaattttactctatgtctttatagttcgagtagaattcttktaagcagtatatagttggctgatacttttttattcaatctgacagtctttgacttctartcatgatgtttagaccattcacattttaygtttaggtgtaaatctaccatcttgccatttgttttctatgtgtttaatctgttctttattccccctttttttctctctacctttaaaattgaattttaatgattttgttatatgaagcaggttttaactgatagaaatcttctccacaaagagttttcattgattttgaacccatattggtaatatataaaaatgtggctgattagtttgcagggtcaactgattgacataaagaacaaaggaaatgcatttgaatttcaaccaaacatattagtagttaggaaacaaaaatataagtgtaatgtttaagaacagccwatacaaccttttttttttttttgagagagagagagagagagtcttgctctatcgcccaggctgaagtgtagtagtgcaatctttgctcactgaaacctccacctcttgcctccctggttcaaatgattctcatgcctcagcctccccagtagctaggattacaggtgtgtgccaccgtgcctggctaatttttctgtgtttttagtagagacagggtttcgccatgttggccagcctagtcttgctgcctgcctctgcctcccaaagtgctgggattacaggcattagccacagccaatacaaactttattccatttggatcgacatacttcttaaggaatatgtttctcaaacagtataactgaaaatctaaatactgaaataaattaaagtgaaccatcccttagatcattatctccaaaagtattaaataaagcatttgatgattaataacatttaaatatagtactttcatttaaaaatatgtaattttttagtaagaacaaagacttatttagtaagtaaaatatttaaaaatatacccacttaattttaatgtttctgatttctatgtatgtaaataatacatgaacacagtttgtgtgcacataattactgtgtattcattcattgggtttgcattgccacaatttgtttactgataaggttttcacaatcaaacattttagtaacctctagaccaagaggactttgagatcaccaagaaggaagctaaatatttttaaattgtgaaataaagaaagtatctttactcttgacccatttagcttcattctttttttttttttttttttttgagatggagtttcaccgttgtcgcccaggctagagtgcaatggcgccatcttggctcactgcaatcactacctcccaggttcaagcgattctcctgtctcagcctcccaagtagctgagatacaggcgtgcacccagctgatttttctattttttagtagagacagggttttgccatgttggccaggctggtcttgaactcctgacctcagatgatccacctacctgggtgtccaaaagtgctgggattacaagggtgagtgaccttgcccagccttcatttatatttttatgtagactggatagtcttacctatagatggtgaactatcctttagaaaatgttattttaaaaatgcaaaatgttacaaaagctactctagcttgtcaccacgttttcagtattaatttactttagacagttcctaattaatctcacctatttaataattcacaagtataaatattgatccattcctttggctccactgcatgtttttgttttatctcacatattaatttataattatttgtaaaacatttgcacacagatacagatacacaagatttcaacttaacaggatggcaaaatgtacctatccattttcgattaatgtaattaccaatttatatacttactctgtagacacagtctatgactgacgaatgcaaacctgtgttactcatttgagttcattgctggaacaccaataacacyccaaattcagtcctgttaagaacagtaacaatatacagtcaagactaaaaaccagagaaggtaatgatgataaaaccttcccaaggaagatgaatttgatgtgcaggtgaaatgcaataattaaaggttttgttgtaacagattgagaaataccttagatcttacgatgatctttaaaagtacaaatattcattttctgataataaaatgtgtttaatttttatttaaaaatgcggaaatacagagcattttaaggaagacaaatgccaagtaatctcatcacccagagataatgtctgataaaaatttgtaaagcagagataccattttttaaaaaaakcatttcttttgaatctgcaaagtcatgtctgcacatcccagtgcatatggaaatacggataataataaatccactttggttttaattctagttctgattctttaataccaaattctgaacttccgtgacaaaacagtttaaatattcttttaattttgggggttttttttttggatttgccttctagatgtatcatagaattcgccactcagagtgcatttaccgggtaacgatggaaaagctgtcctaccatagcatttgtacttcagaagagtggcaaggtctcatgcaattcacccttcccgtgcgtctctgcaaagaaattgaattgtaagtatgttgctctgtcagtttcttcaggaaccatttttaattgaattgaacttaaagtgagacagattatagaattagagtcacaattattatacacatattacatgtggagtttcatgtgttgccattgtctgcttctgaagtgattccagatattatgataggatttggaaataaaggccagatctcattaccttaaaaaagaaaatctgaactcagttttgaaatgagttaacctaaatgttagcatttctcattagtctgttgcatactttataccatttaatatttaacactcaaaatggcatttaacagaagatatcaaacagttctcatttccatataaatttaaacttccaaattaaattcaagaattttgtcatagtttgactctcatactgtattttttaaccctatgttaatatatttaagttactagagggtagggcctatgataatttgtatgtttattgtaagtgtaagccaacactatctacataggaaaccttcagaagtgacttagagctaatatttaccttacaattgaaattatagtatatattataccatactgtttattcaagtctaatgttggtaactaaattagcaaatgaaaaataggtaataactctggtgtttatattartgaaattgttatctcagttaaaataggagatagaacagtttcaactccaaaaatacttctgaaaaggcttttccccccttttctatgattgtatatttatctaatatttgtaatatacctttttgtactttttatttctctgacaacaaatgaagcatcattttcaaacagattaatagaaaatcaataactcaaatattggactagatttctaaggcaatatgtttagtttcttcctggaaatctttcagtaacagctatgtggctaagaaggcaggaaaagggatggctgagctcccagtgtctttttagctccttggtacaaacaagttaaatgcttttctttacttactgtgtttattctaatcacgtttagtgataaactgcccttttaaaatttcagattccactttgacattggtccttttgaaaacatgtggsctggaatttttgtctacatggttcatcggtcmtgtgggacatcctggtatgaatgactttaaaatttactttttgaaatatwgggkgacataacctcttcctccttctacrtatatgcctcaccacgatctttgtttgtaattatttttaaatactgcatgtataaattactttttttcctaaatattccaataaaaaagggctgagattattatacaaatatgcagccttttcagattctctgtaggggctctagcaacatggttgyagcctggttaaaaaatctraaaagctttcataaaaacagaggctagagtttctttcrgctgkgtaactgaaagagacaggggttactactgacaagaattttatacagctagtaaacatatgaaaaaaatctcatcatcactggtcattagagaaatgcaaatcaaaaccacaatgagacaccatctcacgccagttagaatggcgatcattaaagagtcaggaaacaacagatgctggagaggatgtggagaaataggaatgcttttacactgttggtgggaatgtaaattagttsaaccattgtagaaaacggtatggtgattcctcaaggatctagaactagaaataccatttgacctagcaatcccattactaggtatatacccaaaggattataaatcactctactataaagacatgtgcacacatatgtttattgtggcactgttcataatagcaaagacttggaaccaacccaaatgcccatcaatgatagactggataaagaaaatgtggcacatacacaccatggaatactatgcagccataaaaaaggatgagttcatgtcctttgcagggacatggatgaagctggaaaccatcattctcagcatattaacacaagaagagaaaaccaaacacaacatgttctctcttataagtggaagttgaacagtgagaacatatggacacagggaggggaacatcacacactggggcctgttgggrgatgggaggctaagggagggatagcattaggagaaatagcaaatgtagatgaagggttgatgggtgcagcaagccatcatggcacgtgtatacctatgtaacaaacctgcacgttctgcacgtggaccccagaacttaaagtatawtaataataataataataaatgtttagaacaccacgtgtaaatttagcatcaactttcaacctaacrtcatatatctattagaatagatcgaaaagaaacatgtcttcttattcaaagtgtgatactttgtcagtaatttgattatggcaccatttcattgcagatcttttccccacccactttggcctgtcctagaggcctttcctgactttataactgatccttttcagtgtaaacacacaatatttaaatgcaaggaatagttttcttttgctcttttttactcatttaggaattaaatgtcttatagagcctcttagtttctctagaactaaattgtcattcttcttgaagcctgygtattttctatctgtgactttttgtaaattagtgtttcaaaaggatgagcataggatacctaactccagttaattctcagaatgcagttgagagtttgaccrgttggaattcttaaaatgccataccttatacttcaaagacatttgaaaattttcagtggagaaaaacacaggttacttttttttttaagtttttatgaattcttgacctccctggtattttagaaagccttgttttatatatgcttttgttttaagctgtctcaagtctattttgagagtttgtagggtcttaaataagtacataatataaaaaatataaaaatatagtataactatatgtaataaaatatacatcatattattttatatactatgtcagtatttggatatgttcatttgtgacttaataatttgagtgtgtaataaaccttaatactttggaattactttgaaagtatagtaactctagaaaagtctcatgatatacatatttgcagtttgcaagtctgaatattctttttggaaaatattagctcaaaataccctttagcaagatggtgctgtgttgttgtcttttgagcactgtggggtttaggaaatgaacgtaaaactaaagaagatcatgagggctggtgacgggtgactgtgtactaatactgatattttttcgctggtgggacagttactrtatcacaacagataccataaaagagtctttatcctcttacttctttttggctagagaactggaagggaactggtgaatgagtttccagtgctcatggattcagtcagggtggaaatctttagagttgcaaatgtataagggtacagacatatatgtacctaaactagggagttctcctacaacatagtgattctctactggtttcagtcataacaatttcttttccatgcagctttgagcttgaaaagttgtgtcgttttattatgtctgtgaagaagaactatcggcgggttccttatcacaactggaagcatgcggtcactgtagcacactgcatgtatgccatacttcagaacaatcacacgcttttcacagaccttgaggtgggtgtgcactctttacckctgtttctcgtaacctcagtggatttaatactgtgtgtcaggagcacattgatgacatggatttgtgacatgttattccaagacaaattttggcttaataaatcaatagtagcccatttttagactcttgtacccaaacatttagcatattattttgtataagaaatgtagataaaagaaattttaacttcatcaaaatatcccccaaggaaatactaattttgtagtctgtcttacctgttaaagcttaaatgttctgaagggatataaacagtgaattttattcattgcttatatgccctggataatgtagacgtatcctgcctatttgagaacctagagcattcaatactgtgaagacataagtgtttttgacctcctctagcataaggaaactaaaggatctgaaatgtttaattaatttgcctgactttaaatacccagagttagtgacatatccaaagctttcgtaatctcagagttagaattggagatggccacttccattcatcaaccacagtcaaagtcccttacttgaaagccaggctaaatgcttagtgactcctggccacaaaggatgctgattctacatctggacaatcccgactttgaaggatatccctccctctgaccacattgatcctggtagtatctactgayaccttagagggagtcctcctttctctcctctgtaaaaactggtatcatcttttaggggacctatgactgtccagagaaaggagctgtcatctttgtgataaataaattgtgcttttctcaaattcacatttaaactagaatctagtacttgtgaaggtccatcctatccttttccatcctattggaccaaattcacaatctgagtggaaaactcaaaagatgcattctaggaaaaaaatagtagcattttaagaaagaataaaaaattatcctctagtttttgttgctttttttaaaacaatctttagttcaagtggagtttagcctgatcagtaatttattatttatcacctccccgcgaaagatccacatgaaatctctccttttttcatttgtttgtcttaacaaagtccttttctattgaaccccatactgttgagactttcagcattttctccattctgttccttttaagaaagcaatttcattgtcttgttttgccattttgccataccttgtgagtttaagaactgtagaaattatactttcaagttgcattgtaatttatattmaaaaaaattgaaaatttaacaataagtragaaaaactttgttgatacatattgactctcatttaagttcctaattcatttttggaattatatcattacattttcccaaaacatcagatcgttttggctgaaaaataatccccaaaatgacatgtaaatatttaaaacatattttataaagaagaaatttaatctctaaaagaactgttagaagttaccatttgatcttgttaaagggaaatgcttaacaagggtgattctttatacattattttcagatgtatgattctggcacacctttaataaaactactgaaagtcacatgaattttaaaaatgagtttagaaactggaaagatgataacttttacgtattgtgcaagattgtaaaactcttgagatttcttatcaggtacatcatgatgacacagcagcatataacatggaaaccaccccaaaacaaaatgatactaacaacataattaattcagttatcttaagaatgccaggcrrgtatgattgttaacatgatacttcatggggttaggggttactggcgagatttcccttccaattatgtggcgggaaaaaccagttcagcattatcaggacaaagaagcaggcatatcgctaaaaatgtacctgtgagaacttctgctgactcccatcgcagcacccccatctgtctgcatctgccctcagcaggctctgccttgcacacttccttaaaccttcacactcctctccagagctgacccttctgctttattgtatctgtcgcctccacctcttggagaacactgcctaccagtgcttcccactcttctctctcctccattatcatgctttcacccctcttttctggatcattgccatctgcatgtacgcatgcagttttttacttccatcttagaatatgctccgatctgccgctcttctcagctccctccctgttactttgctcttctttgcagtaaaccccatgtaagcattaccctattgactctttcaaaatcctctcctcgcattctttctgaaaacaactctgatcaagcttctgaccttaacaccccagaaaatgccctgctccaggtcaccagtgacccacaccttgcgagatccaagggttagtgctcagtgtcttcaatcgaatcccgggacattcggcactcttggttttcctgcgaatgcaccagctgttcctcccktggggttttttgtttgtttgtttttgttttgttgtttttttcttaatccttctctttcctcagacttagaccatgcagtctgttcccccttttcaggtataatttgtctttcaaaataaaaattgtgattgtgattgttactaacacattgagtcaatattctttaaacacttcartcttttcaagcaatgtttggcataacctgaattccactcaaaatcccttcatgaaagaatagaaactgtcatatgaaatgtgttgtaataggatttaacctatagagttctttcttcccttcaatttttatcaagtatttaatttatcaagtatttaattgctggatgatttattttagaattgggagtacttgagagcttagaccttgaccctcctccaacctcaaactacaaccttggtgagctcagccagtcatgtggccttaaacgccacatgggcactgacagtttcatttctctagcaaaggcctatctccaggccgtgaggcttcagtagctgctacctgtcaaaacaaaatctccacttgtcaaatctccacttgactatcaagtagactccttcgcctcagtctaaatgtgagctcctgacctccctcctcaaacccattccacctgcagtccttccatatcagttgatggtaatcattatagcttctaaggccaaaacatttgaggtcatacttgacccctcctcatgtcctttcttttcacactctgacagtcaaaaaatcctgttggttctgcctgcaaaatgcatccagactttaatcaccccatagaagctttcactgttattatcctggtctaaagctctattacattttgcctcaattactttagaaacctcctcactgatctctcatcctcctggagtctgttttccacacagttgccagaataatcttgtaaatatataagcaagatggtaacactgctctgctaaaaaccgtgtaataatagttccccagatcactgagaatataagccttttatgatgactgcttcccctgccctcgaccccactggccaccgtcctgatcctccgagtctcagggcacactcgccttcaagtttatgttgttactgctcccctgccckgcgtgctcttctcccacactgcgcttgccgctctccttaccctgtttcgggtctttgctcacacctggccttttcatgaggtgtgcctgcctagtttatttcatactcagcctgactttctctaatttcctttagcctgctctgcctttttttctatatatttgccatttttacatgcgatatgatttacctgttatatttattgtttataatagcaatagcattgttagaatttaacattgaatagattttgctgaaactgacctttctttccttgtgcagatttgctttatctgtacttttttrgaacatttgctttwtacctttaagttgatacctcctgcaccttttcctagagttgagagagaaactcaaaaataatttgactatcagattcctaagcagagaaacaaagaaagggcctacaaatgagttagattatctggaatttccaagattcctaagggtttgctctatttgtataggattctttatgccagaatgctgtatttgtgctatattaatgccagaaagtaatgtgacatgaatgtaagcggtaagtctgctcatgtgtgtttctgtgttttgagcatctctgcatcatattattttttaaagcgcaaaggactgctgattgcgtgtctgtgtcatgacctggaccacaggggcttcagtaacagctacctgcagaagttcgaccaccctctggccgctctctactccacttccaccatggagcagcaccacttctcccagactgtgtccatcctycaggtgagtcactgcacgccgtctctcgcttagtctgaagggctgtctgggagatagggatacttcataggtggaaaaggaagatcattatggcttccttaaaagcaacagctactttttattgtagaaccttatatttatagtcatcattaaataatagtgttttttgcataaagaatcctttacaaataatttgaatatatgtattttgcaatcacatttgttttttaaacattatatcagtaagtacctgtaaccctaaagcaatacttattttacatagtttaaatcaattaattatatagattatcatattcttgaacaagaagatattgaacagcaaatcttaaaagttagctaaatataaggttttaaatgcattgtagcctttctttttttacactgtatgttttgtttatttattttattgtctttaagatgttcttggtaattgatgtagacaatcacagacatcacttcaacatgggatatatacgctccttctttcttaaatgatttttctcaaactcatcttatcaaggtagctattacatcatagtgacttgattcctatcacaaacaatgtttaaaaatataatctgggttyggcttaagtatagtgggccctatattttcctctcactgtcagcacctctaagtaggaagagaaatcctcgttaggtcttccaatgatgygtctaagggaaaaggttttgagtttttaggatgtcacagcaaaatgccagcagtgactctgccagtaactggccataggcaagttgcgaagcagaaaagcttttgccacttggtgcagtttttctctgttgaataggccaggcctcctctaaatgccaggatttttttttctcccctcagtttcccaaaggcttctcttagtgcctcytcatttaactgtccacgtgattggtagtgctgcmtgctcagtcctttttaaaacccagcaaaactgacctgtccaggtctcatgtcctcaggcctacgaaggtaaatgatgamcttactctattgtgggtgctcttcgaattayctkctgggtagaagtgaaaagtgtttcagatatggagctatttgagtcattttcaagccatccccagtaggtagctgatgttgagcttgctcatggttcagtttggtcgtgaaagcaacatgtagtcatcattcctatcatttgcttgacaccagctctttcctttttaaatgacatatgtttacatagatacatacataccggcataaaacaagcatacatagaaattttttttttgagacagagtctcgctgtgtcgcccaggctggagtgcagtggcgcgatctgggctcactgcacgccccgcctcctggattcacgccattctcctgcctcagcctcccaagtagctggaactacaggagcccaccaccatgcccggctaattttttttttgtattttttttttttttagtagagctggggtttcattgtgttagccagaatggtctcaatctcctgaccttgtgatccgcccgcctcagcctcccaaagtgctgggattacaggcgtgagccaccgcgcctggctgcatacatagaaatttaagcaggataaaaggcttgtgtgtatatgtatgtgtacatatatttacacatatatgtaaaacatgcttttttgtaaatggatgaacattctaaaactttatgacagctaatgtctactttgacctcattcatcattggagactatttgtttgtttaagaagaataaacgccagaaacaacatcaggatgacttcacttaaaaataattaggagtcactgaattagcatcccatgccctaaatgaattcatgcatttgacagtacaacattgctagcagtttaatcacagctgaattttaatagccaatatagagtttctttagaaaggctgtattaaatataataggattagttttgaaggaggccagattgcaaagtttattgcccctgagcagaataataaataaaccttgtaatatagcagtcacatcaaggcaggtggggatggtgaagctccaggtccacctaaaccctaggaagacttggcccagttgctgccatcaaaaatggaggtttagggtggtttgcctccattttggcaaaccctccgcgatgtggggcttgcagattacttaaggyggtgttcctaaaaacagatcagaactagtaacaggagctcatggcagtaagttaagttcagacaggtaagctgttggcattcaaaaaggcatgggagaataggttcagatattagagctggaatttcagtcattggtgaattaataataatgacaaatttgttctgcgtagagaagataaggtgctaggtacattgcaaaaacagaagctgggaataaggattagggattgctgcgaattcagatgaaaagcactgccagtttgaaaacaaatttatatgttcgattgaccaaatcccttcaatttgagctacgcccagagagaaataatattggggccataaacagacaacccaatctacatgggcaggaacattcagggaagagtgtcttcctcttcggaaaatttctgtacacttggctgattttgcagtaatcctcatgatacttctctgagtgtttttttggattcatctaactggtccctgaaatccaatttaataacaaacatacttactgagcaccttctatttgccaacaactgttttaggcactggggatatagtgataaacagarcaaccacaaatccctgtcctctggaactcaccgtcagagtgaggaaggcctgagtcccctgacttctgcccttatgttgttcttctcattggcccaccacctggcacacctgtggctctgacagtggtgccctgaggactctcrtacccatgtaattctgcctagtgctcaataggacttctgcccaagcagttgaaccctgtattcagtatgcccgaattgtgcttggtattatacttatttaggtgccttttgtattttatatctctgtggtggcaatctcattgacccaggaatgcaggctgatgaccttagagtcatcatttttcccttctttagctttatcttcccatccctccatcctgttaccaccaagtcctgctgattttatgtttcatcaaaagacacctacaagcttgactaattaagatgctatccttgggtaacagttaaaaattccaacttccagtcattaaaataagaacaatatatagtttcataatatgaatacctgtgatacttctgtttatccacaaaagacttttcccattgctttcttgatctgcattgccacacagatgattacgagcatggcgctgcccatcctctggccacacagacagataggacgtaagcaattttgtgtatgatggttggaaatagttcctcatcaggcatcttcacaggtgtgtgttgcatatgtggctgcttattatagttttgccaacctgagtgccagctttcactatggctgccagtggtatctactggataagcagggcattcagaagagtactgctggctaacacagtgacaacagcaagcaaggagaataatacaatrgacttgaaaagctaaccttyagtcgcccccccccmcacacacacacacacacacacacacacacacacacwcactcacacatacacacacacgttactcatggtagggaaaagcaggaagtgkgtatttgctcacagcttgccttgaccttggtcacagtgatagggatgcagtagataatcccgtgttgagtgggcaatgggaagagattaagtcatgaagtaagggtaaatacaagagcatctkcagagaaggtcagtctgcgttctcatttttccctgagcttcccattgtgccttaatgctggccatcaggattgttttcatggtgtttggggcccgtcgctgtgtagagctcatggtggacattyagcagacaggaaastcccttgagtctctagtaaatggtaatctggcccctctgacsactacagctcccaagtggcaagcaccatccctacttgacatctcggtttcagccttcatcrtattttrtctgtttttccrccttttcctcctcatccatcactgtttctccaagtgtttgtgtcccaaatccgtcctccaagtatatgtctgaatatgtttttctcctgtttaaaagtcattagtgactctctggggcctctggaataatttcctgttttcttagtggatatacaagtctttcatgagtggcccctgtctgttccaggactacagatctgctctgcttctgtagtttcagaccgtatcttaaccctgtgccattggccgggttctctctacatgtaattaccccacaccctttcttgtggccccccactcaggcatgacctcatcctgtaaaattctttgagtgtatccccacatgactggggtacagcactgcccccttttacatagcgcctgagcacctcaagcatacatacatcttagtgttttgtttgtttttttgtttttaacactgtattgaagttttctgtttgtgagtttagcttcccacttcttctgaattagaagctgatgaggagagtcactgccccttcttcacctctggactcacaggcccacctctggggctgttgatatgggcacaagtggaagtgtgaaggtagagcatggggaggggaagatgcagagtgggcagaaccagcactcagagactgaaactgaagctttacgtgaggaaagtgagtagctgtgtccrgtggggcagagaactgagacactgagcaggggaagaaggcaagcagaatgccttcatgtgagcagactgttttgtgtggacagtyacatccaagaacgtaggtgagctttgttttcttgcctaaaacttactagcttacaattagtaatggtaattgaatcattattgctggaatattaaatcaatttattctgtttactcataagatatgaatgattattttgaacattgaaactatactttttctttgccttttttaatagcccattttgactttaaaaatagtcaaaattttagaaaacagaccaattaggaatgattattctcattattgagaacattttcttaatgttccactaatcttaaattatctgttgcttttgaaatgtgatcatatttcagaaagttatctatttataccaacattttgggatcccgtgacttcttactactctttatagaagcactatttctgttacttagctagagagttcttccaattcgtctgcactagatacaatttgctgttgtatattacaattatagcaaaattattgtacttatattcaacactacctgtactggtaatctaaaatatatgacaaagtggctagtttaaatccgtccttttctacagctgtgttctgaatagaaaaggtatttggctatcaaattctcttttaggcatatatttgttttttcatctgtctttccttttttaactctgactgtggaagttgtactggtagattttatcatcatcatcatcatcatcatcaatcatcactattataatagtaatcgttttatcatgtattgggtacttacaatgaaccagaaacttaaatattttgtacatattttaatacagtttatttttattatatccccatgagataggtattaatttattttcattttacagatgagaataatatgcatcaaggaggttaagtaatctatttgtcacataactagtaagtggcagaatgacattaaaagatagaattatttggctccaaaatcggtgctcttaattacagtactataatgctccctaatatgtggtttcatgtactaggtaattaactttcaaaatcagtattctatgtattgtaaaggcattgccatcatgaatgtttgatgcgcttagttgcatcgttgacatttttttccaaaagcggtggttccctaatcccccagcagtggacagaatactaacagcctttaggatccttatgattaagggctggaaggagtgttgagaatcatctattcaaggcagtccctgggtcatctttcagcgtcagcaccaatttcaacattgtttccattctctaatatcagatctcagccacagcatttacatacaaccagagcctccctgtgtgcttccatagagttaagaattacatgctgttcacccacgttaagttttagaaacattcgtgggtgtaaaaagtctactatttcatgcttgatttatgcaaaatggaatcaactagcttgaattaacatagacttcaaactatgtaactatagtaaaattatcaattggtgtataaaagtattataatgcattataaggatttattatgtgttaacaaatgtgaggttggaggtttaaagaagatactgtttgtctgctatgcttcattgcttgtatctcccttccttattttctttagtttggatagcagcaaaatgctagattctcttaaagtaaagggagacgtggccgggcgcggtggctcacgtctgtaatcccagcactttgggaggccgatgcaggcagatcacraggtcgggagatgaagagcatcctggccaacatggtgaaactccgtctctactaaaaatmcaaaaaaaaaaaaaaaaaaaaaaattagccaggtgtggtggtgcgtccctgtaatcccagctactctagaggctgaggcaggagaatcgcttgaatccaggaagcagagattgtggtgagcagagatccactccagcctggtgacagagcgagactctgtctcaaagaaagaaaagggagatatttattttttgtttgttcattcattccctttactcttgtaaattattgaaggggacagtaaatgagttagacctttttattataaaagccctctatggagctttttcacctagtttcctttaatactgaaaagtaatgactccaaagtagtcagtagaatatatacattctttaaaataaatcttaacttgctttgggacagtcgacacttttgggactctgataaaaacatgagcttacagatgacatatccagtgtgtagaattgcagtgagtttataactcttttgtccccctacagaatttacagagcctaggctaaggagaccctattttagagatatttctttttaaatgtcaacagcagactagaatattttatatattataatttaacaggttatggtgataattattggtgataragagagtaaagcatacaaatacaaagcayaaaattgtatcagctgtgattcccttcacatgacctgctgaaagcagatgtgtgcgtgagcaccagccagacaygctgaaacatgttcatgaagtgggaaatagaggtgacaggcattcagtgttgatgcaggagctacctgcttcacgtgagttacggtcacttcaaaggaaagcagataccatagcatgaatcaatatttccttcttagaactttctacaacaaaattgaagagagtcgagcttggatgattattgagttcagccaccagcccaaagcctgagtcccctcccgttgtccccatcagtcactaaccagcctatgctcaaacggctcatctcatagcatctcatgtacaatccatgtgggaactctgaactaatataagttttataatttgaaagtgaagtcgtgtgtttsaaagtgctttgtaagctgtagaactttctacaaatgtaaggtcttactactattattgtcaggaaaataaataactagacctgagtccatttgctgcatttatcatacaataattcaaatacttctaagactttaagagcaaataatatggaactgttctgataattgaaaacaaatggtgcatgtacaatttcatttaagaatatgaagagacagtgtcttagtgagatgtctaattttttaaagaaatatgcttcaatcattgtgtttttactgtattttaactcaataaatgtatattaagaaaagtgaaattaattgaaaatcaacttagagtagtactatattgaccaataatgaaataatrtcaaaataattgatgaatctgcaaattgactgcatcttaattatctcaaactttttagtttcaacaaagggtttttttccctcaattacaaataaaaaccttaaaatttccacaggaataaattattataaagtttttaaaagattaatacacgaaggatattctgagccaatagaatccagattaccagtgttctggtgttgtgtagggtgatgatctgccattcccacctcccttgggaatagaagatggtcctagaattgtcgtagcttcagtgatttgtgttgtagggaaaggtactcttgcccttagagtttttaatgtgtttgaataaacattttattgaggttgtaggacattttcttctaggatacagagaaatatattactgtctattaagcatgttttggtatgttacaacctgaagtggacaaggatatagatgccttttttagcccattaaggttctagtataatacaaaaattactgaagtttttaattagcttaagaggaaaagtctttaacttaaatattttacattttcaagtttttttaaactattagaaatatccaagaactagatatatttaaatcactggggttttatggtagtaaatgatgttattatagttgcaatagtttatttaagtggtagcttcattgtttctgtagcttaaagagaaaccaaaacgcagttttcgttagtcatttctaactattcaaaaaaaacaaaagttaccccaaaacctttcattagtgtgccagatgtcattgactgactatatagtttcaaataactaaaaatgtcataagattagagcttgtgcttgttattggtggtttttatttgtattttttccctagttggaagggcacaatatcttctccactctgagctccagtgaatatgagcaggtgcttgagatcatccgcaaagccatcattgccacagaccttgctttatactttggaaacaggaagcagttggaagagatgtaccagaccggatcactaaaccttaataatcaatcacataggtaaaaataatttttaaaagcttagaagcccagaaagtgttatctggaataaattgatacttaagaaatgtaatgtggcgtaagcttatatttgaaagaaggaatgtaaaaaatttacatgtttttcactttatgtacatcttgtttatatttactttagatgctttgttgtttgacaagattgctggcaatgtctagtgaggataatcaaaatacagattggaagttacactaatcacacagggattggcaactttcaaaggaaaggctggaatgatgtttctccaagaggtcccttcttgcattgatcagcattcagggtctggccattggcctcagaaactcaagagcaaatgaaaatggattctatttccagaatccagtcctattaagcaagctaatgtgattggtgtagaaactggactccccttttattgatctgtaattgtattaggcagtcacaagggtcagaatattggcatcccatggggtagaaagccaagtagcaatgaaaagtttatttggtgaacatggaattacaacaaggaggattagataaattagatatcctaatggaatcaggctaaattagtctgatgcccttttgtttttgaggatgggtgtcttgcctagtggattcagaaataggtcaggtatgttctttatgaacctgttcacccatctgtatattagatcaaagttcattggctaacctgccatctccccttgacaatttgtagtggtaacactagcttttatttctgtggctttcctgttcctgtttgcatgtctgaccaacttctgcttaagtgaggacatctttatccctaggctggtgagcacttacttactgcttctttgccastcttgctgaatttggatttatactttttgttcaggtgttctgtatatctcctctgtgattcattaagtactgatcctacattttgttctttgggacagactgttttaaagttcttagaaataattcactattctctcaggtacaccaaatacaaaatgttggttttacaaatgactatagatatctaataaagtttacctcttcaagaataagtaccatttgtataatgatattgatgcttttggataagcagcagttatttgtgattcaacttaccttcaaactggatggatccagattttgtagagcttgaaactgatacaatttagggaaccttatttaagaaaaacaatacaaagatatcttattttcacacatggcagtctgaggacattgccagggcctcttcctggaccacaaagagggatggtatcagggaaaagcccctaaacatcaattagggtgttctagcatgtctttcttttccttcagcccacatgagaagtgtggtctacagtctttatgtctccaacaggttgtgtgtagtccttgttccaagacatgtagaaacaggtgttkgttcagtttttttttatggcaatcagaagatcagggaaatagagccttcatgaaatatcccttggtttcctgaaacccatacactttcttttttttcttctggggttgtaaataagaatcatgtaactagtatccagcctcttgaatataatcttttcagcagaatgattacaatgattattataatataggaaatttaaacattcacctaaaaataacaacacttttggtacccatgtacatacgtggtagtggtgcatgtttaaataatttttgacatataacttgaaaagcaattaaaacaaatatgcattgaaacatgcattgaaaggcaatgcatgtttgttttaataattcaaataatatagaggtataaaaaagagtaatattctatttttctgcattccagtagcaactgtctatttcmtgtaatgtcatcttaggcatttttctatgatttttcaaaggtaggggtgtgtgtgtgcgtgtgtgcatacagtatgttcaagcataactcagatgtattgtaaaagaaatttcataataaagcaagtcacacaaactttttggtttcccagtgcatataaaagttgtatttacaccatgtgttctactaagtatgcaataacatcatgcctaaaaaatacacaccttaawttaaaaatgctttgttgcttaaaaatgctaatgatcatctaagacttcagcaaatcatawtctttttactggkgaagggtcttgcctcagtattggtggcttctgaccagggtggtggttgcaaatcatagaacggtagggatgcatgtggcaatttgttttyttctccttcttttttaaagatggggtcttgttcagcctgtcaacrtgcagtggcatcatcatagctcactgcagcctcaaactcctgggcgccagggatcctcctacctcaacctcctgagtagctaggactacaggcacacaccaccatgcccagctaatttttttcatttcttattttagagatagggaattgctgtgttgcccaggctggtctcaaactcctggcctcaagcagtcctcccacctcagcctcctgagtaactgggattacaggccagagccgctgtgcccagcctggatgtggcagtttcttaaaatatgacgagagtgaagtctgtcacatcaatggactcttcctttcacagaaaatttctctgcagcttatgacgctgtttgatagcatttcacctgcagtagaacttccttcaacattagagtcagtcctctcagaccctgcccctgctttgtcaaacaagtttatggaatattctaaatcctttgctgacatttcaaccatgttcacagcatcttcaccagaagtagatgtcatctcaagaaactttcttggctcattcataagaagcacctcatccgttcaagtttgatcatgattgcatcagtcatcattttcaggctccactagtttctaccacatctgcagtttcttcctccactgaagtcttgaagctttgactacctcctgtgaatcatgaatgttctcaatggcatctagaatggtgaatcttttccaaaaggttttcaattcacctttcccacattcattggaggaatcactgtctataacagctatattcttacaagatgtatttcttagataataggacttgaaggacaaagttacattttgatccattagctacagaatagatgttgtgtgaacaggcttgaaaatgcattaatcatgtgcatgtccatcagagctcttgagtgacttggttcattgtcaatgagcagtaacattttgaaaggaacctttctttctgagcagtaagttttgatagtaggcttagaatgttcagtatatcatgctctaaacaaatgtgctgtcattgaggctttgttgttccatttatagagcacagacagaatygacttagcataattcttaaggaccctagaatttttgaaatggtaaataatcattggctttaccctgatgtcaccagctacattagcccctgacaggagtcagctcatcctttgaagctttggagctagacattgacttctcctctctagatatcaaagtcctagatgtctctaatagatgttttgtctatactgaaaatctgttatttagttgagccaccttcatccgttatcttagttagatcttctgaataacctgctgcttttacatcagcacttgctgcttcagcttgcactttttaccttgctttaaacctctcgaaccaatctctgctactttcatactttccttctgcagcattttcacatctcccaggtgtcacagaattggagacagttaaggccttgctctggattagcttttggcttaagggaatgttgtggctggtttgatcttctatccagattactaaaactttcttcatatcatcaagaacacttgtagcccttttaatttccttgaagaattttttctttccattcacaacttggctgtttggcccaagagtccttgctttcagcctatctcagctttagatgtkccttcctaagtttrgtcacttctagcttttgatttaaagtgagagacatatgactttttttcacttgaacagttagaggtcattgtagagttattaattggcctaattttaatattactgcttttagggaacaaggatgttcaaggacagggagggagatgggggaacagccagttggtggagcagtctgaatacacacaacatttatcaattaagttcaccatcatatatgggtgtaattcatggcacccacaaatagttacaatggtaacatcaaagatcactgatcatagatcactgtgactgatacaataaaataatgagaatatttgaaatattttgaaaattaccaaaatgtaacacagagaatcaaagtaagcacttgctgttggaaaaatgctgccgatattgctgtacccaaggttgccacaaaacttcaatttgtaaaaaaaaaaaaaaaccaaaaacatggtatttatgaagcacaatcaggcaaaatgcaataaaacaatgtatgcctggaacatatattgccgtcaatttatacatatattacattctcagaaaaggctatagaaattcacactccttctaacataaaggtgaaaaccttttctcagtaaatacgccagtctctgaccactcactgtattgaagatttttttatgtttgtttattacttactattcttacttctgtgtatttattcataaattttgcttatactttgttgaattgtttacttttttatatatcagcttttattctatatttttgttaaggatattaaaattttctgttatatattacacatatttctttacattagattttcaaaaaacttattcagattttcttttgaaaacagatttagtttcaggaggacaaatttttgatcttttaaagaaatcaagtctcatagtaacaaataataattaaagttttctttatgtatttttatagatttaatttttttattattattatyatacttcaagttttagggtacatgtgcacaatgtgcaggttagttacatatgtatacatgtgccatgctggtgtgctgcacccattaattcgtcatttagcattaggtatatctcctaatgctatccctcccccctccccccaccccacaacagtccccagagtgtgatgtttcccttcctgtgtccatgtgttctcattgttcaattcccatctatgagtgagaacatgcggtgtttggttttttgtccttgcgatagtttactgagaatgatgattccaatttcatccatgtccctacaaaggacatgaactcatcattttttatggctgcatagtattccatggtgtatatgtgccacattttcttaatccagtctatcattgttggacatttgggtttgttccaagtctttgctattgtgaatagtgccgcaataaacatacatgtgcatgtgtctttacagcagcatgatttatagtcctttgggtatatacccagtaatgggatggctgggtcacatggtatttctagttctagatccctgaggaatcgccacactgacttccacaatggttgaactagtttacagtcccaccaacagtgtaaaagtgttcctatttctccatatcctctccagcacctgttgtttcctgactttttgatgattgccattctaactggtgtgagatggtatctcattgtggttttgatttgcatttctctgatggccagtcatgatgagcattttttcatgtgtcttttggctgcataaatgtcttcttttgagaagtgtccgttcatatcctttgcccactttttgatggggttgtttgtttttgtcttgtaaatttgtttgagttcattgtagattctggatattagccctttgtcagatgagtaggttgcgaaaaattttctcccattttgtaggttgcctgttcactctgatggtagtttcttttgctgtgcagaagctctttagtttaattagatcccatttgtcaattttgtcttttgttgccattgcttttggtgttttagacatgaagtccttgcccatgcctatgtcctgaatggtaatgcctaggttttcttctagggtttttatggttttaggtctaacatttaagtctttaatccatcttgaattaatttttatataaggtgtaaggaagggatccagtttcagctttctacatatggctagccagttttcccagcaccatttattaaatagggaatcctttccccatttcttgtttttgtcaggtttgtcaaagatcagatggttgtagatatgcagcgttatttctgagggctctcttctgttccactgatctgtttctctgttttggtaccagtaccatgctgttttggttactgtagccttgtagtatactttgaagtcaggtagcgtgatgcctccagctttgttcttttggcttaggattgacttggcaatgcgggctcttttttggttccatatgaactttaaagtatttttttccaattctgtgaagaaagtcattggtagcttgatggggatggcattgaatctataaattaccttgggcagtatggcgattttcacaatattgattcttcctacccatgagcatggaatgttcttccatttgtgtgtatcctcttttatttcattgagcagtggtttgtcgttctccttgaagaggtccttcacgtcccttgtaagttggattcctaggtattttattctctttgaagcaactgtgaatgggagttcactcatgatttggctttctgtttgtctgttattggtgtataagaatgcttgtgatttttgtgcattgattttgtatcctgagactttgctgaagttgcttatcagcttaaggagattttgggctgagacaatggggttttctagatatacaatcatgtcatctgcaaacagggacaatttgatttcctcttttcctaattgaataccctttatttccttctcctgcctgattgccctggccagaacttccaacactatgttgaataggagtggtgagagagggcatccctgtcttgtgccagttttcaaagggaatgcttccagtttttgcccattcagtatgatattggctgtgggtttgtcatagatagctcttattattttgagatacgtcctatcaatacctaatttattgagagtttttagcatgaagggttgttgaattttgtcaaaggccttttctgcagctattgagataatcatgtggtttttgtctttggttctgtttatatgctggattacatttatggatttgcatatattgaaccagccttgcatcccagggatgaagctcacttgctcatggtggataagctttttgatgtgctgctggatttggtttgccagtattttattgaggatttttgcatcaatgttcatcaaggatgttggtctaaaattctcttttttggttgtgtctctgcccggctttggtatcaggatgatgctggcctcataaaatgagttagggaggattccctctttttctattgattggaatagtttcagaaggaatggtaccagttcctccttgtactctggtagaatttggctgtgaatccatctggtcctggactctttttggttggtaagctgttgattattgccacaatttcagctcctgttattggtctattcagagattcaacttcttcctggtttagtcttgggagagtgtatgtgtcgaggaatttatccatttcttctagattttctagtttatttgcgtagaggtgtttgtagtattctctsatggtagtttgtatttctgtgggattggtggcaatatgccctttatcattttttattgcgtctatttgatttttctctttttttctttagtagtcttgctagcrgtctatcaattttgttgatcctttcaaaaaaccagctcctggattcattaattttttgaaatgttttttgtgtctctatttccttcagttctgctctgattttagttatttcttgccttctgctagcttttgaatgtgtttgctcttgcttttctagttcttttaattatgatgttagggtgtcaattttggatctttcctgctttctcttgtgggcatttagtgctataaatttccctctacacactgctttgaatgtgtcccagagattctggtatgttgtgtctttgttctcattggtttcagagaacatctttatttctgccttcatttcgttatgtacccagtagtcattcaggagcaggttgttcagtttccatgtagttgagcagttttgagtgagtttcttaaccctgagttctagtttgattgcactgtggtctgagagacagtttgttataatttctgttcttttacatttgctgaggagagctttacttccaagtatgtggtcaattttggaataggtgtggtgtcgtgctgaaaaaaatgtatattctgttgatttggggtggagagttctgtagatgtctattaggtccgcttggtgcagagctgagttcaattcctgggtatccttgttaactttctgtctcgttgatctgtctaatgttgacagtggggtgttaaagtctcccattattattgtgtgggagtctaagtctctttgtaggtcactcaggacttgctttgtgaatctgggtgctcctgtattgggtgcatatatatttaggatagttagctcttcttgttgaattgatccctttaccattatgtaatggccttctttgtctcttttgatctttgttggtttaaagtctgttttatccgagactaggattgcaacccctgcctttttttgttttccatttgcttggtagatcttcctccatccttttattttgagcctatgtgtgtctctgcacgtgagatgggtttcctgaatacagcacactgatgggtcttgactctttatccaatttgccagtctgtgtcttttaattggagcatttagtccatttacatttaaagttaatattgttatgtgtgaatttgatcctgtcattatgatgttggctggttattttgctcgttagttgatgcagtttcttcttagtctcgatggtctttacattttggcatgattttgcagcggctgtaccggttgttcctttccatgtttagtgcttccttcaggagctcttgtaaggcaggcctggtggtaacagaatctctcagcatttgcttgtctgtaaagtattttatttctccttcacttttgaagcttagtttggctggatatgaaattctgggttgaaaattcttttcttttaagaatgttgaatattggcccccactctcttctggcytgtagggtttctgcygagagatttgctgttagtctgatgggcttccctttgtgggtaacccgacctttctctctggctgcccttaacattttttccttcatttcaactttggtgaatctgacaattatgtgtcttggagttgctcttctcgaggagtatctttgtggygttctctgtatttcctgaacctgaacgttggcctgccttgctaggttggggaagttctcctggataatatcctgcagagtgttttccaacttggttccattctccccgtcactttcaggtacaccaatcagacatagatttggtcttttcacatagtcccatatttcttggaggctttgctcattcctttttattcttttttctctaaacttcccttctcgcttcatttcattcatttcatcttccattgctgataccctttcttccagttgatcgcatcagctcctgaggcttctgcattcttcacgtagttcttgagccttggttttcagctccatcagctcctttaatcacttctctgtattggttattctagttatacattcttctaaatttttttcaaagttttcagcttctttgyctttggtttgaatgtcctcccgtagctcagagtaatttgatcgtctgaagccttctgctctcagctcgtcaaagtcattctccatccagctttgttccgttgctggtgaggaactgtgttcctttggaggaggagaggtgctctgctttttagagtttccagtttttctgctctgttttttccccatctttgtggttttatctacttttggtctttgatgatggtgatgtacagatgggtttttggtgtggatgtcctttctgtttgttagttttccttctaacagacaggaccctcagctgcaggtctgttggagtttgctagaggtccactccagaccctgtttgcctgggtatcagcagcggtgtctgcagaacagtggattttcgtgaaccgcgaatgctgctgtctgatcgttcctctggaagttttgtctcagaggagtaccgggccgtgtgaggtgtcggtctgcccctacttgggggtgcctcccagttaggctgctcaggggtcaggggtcagggacccacttgaggaggcagtctgcccgttctcagatctccagctacgtgctgggagaaccactgctctcttcagagctgtcagacagggacatttaagtctgaaatcactgctttttaatgtactgtttagtctatttgcatttataagttgtctaattatccattttctattttgagctatttgtgttgggggagtgatatttcattctatatttgcttttggtttttcttgttataccctttttaaattttcaagtggttgttcctgagtttacagtatgcatttttattagtccgctttgaattgatattatttccattttgttcaatgtgaaaaactttaaaataattcaatttatacctctttttgtcttttctgctatagttatatatgtagctattattgctrcatatgttatacaccccacataggttgctaatatttaaaattaaataatgaatcaattattaaagaatttaagaaatatgggctgggtgtggtgactcacacctttaatcccagcactttgggatgccaagccaggctgatcacttgaggccgggagttcaaggccagcctagccaacatggggaaaccccatctgtagtaaaaatacaaaaattagccaggtgtggtggtgcatgcctgtaatcccagayactygggaggctgaggcaggaaaatcgcttgaacccgggaggtagaggtagcagtgagccaagaccatgccactgcactccagtctgggckacagagcaagacttcatctcaaaaaaacaagaaaagaatttaggaaaaataactttttatatttttcacatgtataccatttcctctgtttttaattcattaatgtaaatccaaatttccaacttctatcatttcatttgagcccaaataacctcctttaacatctctcagtgtgttgacagcagatcctttgaggtgtttttttgtttttgttttttgtttttgtttttttttaatctaagaatggctttattgtggcttcgctttttaaagatattttcactggacttagagttcttagtgggcagattattttttcatcatttcataaaagtcagtaaatggtcttctggcctctgtctttttttttttccccctcctgaggggaaaagtcagcagttgttgttctcctcagtatactgtgatcttttacccygaccgcttttacagtcattcttcttggtgtcttctgaggtttctgggtctgtgggctgctgatttcagtgaagtttggagaagtttcaagcattacatttcttcagatgttttttctgccccattatgtctcttttcttctgagactctgacacttctgttagacccctttatactgtgttacaggttattaaggctctgtatggtttttcactggtaatggtttgtgtattttgttgtgatctgtctaatctcactgtttttttcctaatattctgtccaatctgtagttaacctcatgttgtgatttttagaaaatacacacagatgcacgcacacacacacacacacacatatgtgtgtgtgtatatatatatatgtaatattttcaagttctgggatttccttttcattcatttttatagctgctatgtttctcctgaaattccccatctcttcacctatcttttctaaatatatattttcctgaagattctttagcgtatctgyacattatttagagattgttgtctgaattttcactatctgggttttctatgagttttgtcttgttgactgattttactctagacagtgtaatacatttttcagtttctttacatggctagtaatttttttatatttgtatattacataatgggcaacaagctccattatctttctggatgctcttgtctttctctgaaggtaattaacttttatcctagtggccagttrcatttctcatcaatcatcctaaatatatgagtatgttcctttaagctttagttgggtggttccatttctgttttggccttggtgtactctgtcagggatttgtatgaattccaatttggggacttccacttctgtggttctccctgctttctaggatttccctcctcaacttgtgtgtgctctgacatccccagactctcccttctcaatgggccctgactttcttttgggctgtatttatgacatgcccttaggagaagagctgtgtaaataaggatgtcacccaacgtggtcttgcctttcaacgtttaaatcttcttccacttacgccagtttttaggtactagacagcatcttcaagatttgtttttagttctatctagaatttattattattattctatgattaccagaatcttaaaactttgtttagtatctagccatttcattatatactctttatcagctgaaaagttttattttagtctcttggctttttaaggtatatagtaatgtcatctacaaatgaataaaatttgttctacttttctgatgtttgtatgtattttgctttctgatctgactgcatagctagaatttacaacacaatattagcttattgtgaagaaagcaagcacattctaatatgtgcatgactttaatagacatgagtttagagttttaatttttaaggtagtatttgatgtatcttgataaatcatgtttatcatgtataaggtttatctgtatccrtgttccatggatagaaggtttttctctaatttcttagtgttactgatttcttatttgatgaataggtttttaaattttctaattttgtgccactccttaatttcctgaactgtacttttccatggaattagttctttaataggctgaggaaataaaattttcttttttagcatatttgcatgtaatctattaattttgacatatagttgtcttttttgtacattataatttgctagaagctattgatctttctttctgatctggaagactttaaataactaatgttaaccattttgggaaggttcatttaatcattttgggaattactcatttgtgaaactatccagtcaccttttaaattttaatttaatttaattcacttttytgagaccgggttttctctgtcccccaggcttaagtacagtggcacaaccacagctcactgcagccttgacctcccaggctcaagggttcctcctacctcagtctttcaagtagctraatagctgagaccataggcaaacaccatcatgcctggctacattttttgtcattatttgttgagataatttgttgagacagagtcttgctatgttgccagtgctggtcttgaactccagggctcaaatgatcttcccaccccagcctcccaaagtgctgggattacaggtatgakccatcatgtccagcctgtcacctttttaaatgaaaaatatttaacaaactttcagtgtcttttatggtttggggatttgttttgtttttgccactttattccatctcttggtcaatgtattatgctacaaaattatcttttgccttgagatttaaaacttcataaaaaatgtatgcacagattattttcacttaaaatttaattgatattactaaatttgtatttatatctaattttcagtgttttayatttttatttcttcctttcttatataatccattttgcctgggaatttttaattactcctttttaataaaactaacttttataaaatttttcatttatttgttgtctgttctttcattaattttaacttttatttttatgctttcactatacttttggatttttttcttgtttctctgattgaatagtaatgaaataatcagattatatgtattatgatctgggcattgactgaactataccttgcaagttttgatgaagtacttttccttagtttttagattatttatttctgcttttgtttccttgttgatgtagaggttatttcaaagtaattttctaatttygaaatactttggatgtttgcttgttttttattttttattttgttcctagagacttctttggattgttgtaaaaagaatrtaactattaagttaaaattttatagttgatcaatattttcttcctggccaagacagaaaagatgattgttaaagcaactttatttaggtgtaattacactaattttaagttttggcaaatgcaactactagcagagtcacagtaaaggtataaaaaagtctgccaccactctacctttttccaatcaaatttccctaccccaggcatagaaatcaatgtgttctttctttatagattatatgtgtgtcttagtcccttcaggctattataacgaaataccatagactgggtggcttataaaaggttacttctcacatatttggggtatgagtattccagaatcaagctactggcagtttgagtgtctcaatttgagtgagggcctgttttctggttcctagagagccatcttctagctgccacctcacttgatggaagaagggagggagctctctgaggtttctattatgtgggaactaatcccattcatgagggctctaccctcatgacataatcaccttccttccaaaagtcccacctccraatactaacatgttggacattaggatttaacatattaattttaggggaaagaaacattcagtctatagaaacttgtattatctrgagttacaaatatgtagaataacagtaagtgcttttctgttactgatccttccttcctctcttctttcccgatattgttttcactattctgggtctctagcaattccatgtgaatcaccttgtcagtttctaaagaaaagctagctaggattctgatgcagaaaatgttgaatctgtaaatcaattttggaagtattgccgtcttaacaatattaagtctgtgaatatgagatgcttttccatttacttacttgttctttaatatttttcaaccatgttttctagttttcaagtccatattttgtacttctattgttaaatttattactaaggattttattgttttgataatattgtaagtggaattttgttaattttattttcacattttttattgttagtatgtagaaataattgatttttgtactaccgatcttatatcttgacaccttaatgaactcatttcttctaataattttttggtgcattgcttaggtttctctttgtgcacacaaggtcatgtcgtcttcaaatagagatagttgtacaaacaattgcattcagaatctgtcatttctttctttcttttcttttctgttttttttttcttttttgagacagagtctcactcagtcgcccaggctgggagtgcagtggcacgatctcagctcactgcaccctccttcccccgggttcaagcaattctcctgcctcagcctcccgagtagctgggattacaggcacctgccaccatgcctggctattttttgtatttttagtagagacggggtttcaccatcttgaccaggctggtcttgaactcctgacctcatggtttacctgcctcagcctcccaaagtgctgggattacaggcgtgagtcatggcacctggcccatttctttctttttatttaatcattggtttggcttatgctgaatatcagtgacaagagaagacatccttttcttgtttctgatttcagggggaaagcatctagtctttcaccattaagtgtggtattagatatgggtattttatagatgaactttatcaggttgaggaagtttccttctaattctgatttgttgagtgtttatttttttattgtgaatgggtgttggattttgtcatatgctttatctgcatctatcgagattatcaagcagtttttgttatttattctattagtaaggtgcattagattaattgatatttagatgttaaaccaaccttgcattcctatgatagatrtcaggtaataatggtgtatagttgttctatatattgctggatttggcttgatgatatttcgttgaggacattagtgcctgtattcataaattatactggtctgtacttttcttttttgtggtatttgtcttattttggtgtcagggtaacactggcctcatggaattagctgggaagtattccctcctctactrtttttttggaagagtttatgaagaatttgtattaattcatcttcaaatgtatagaatttaccagtgaagtcatgtgggtatagatgtttctttgtggttgttatttttccctttgactrctaattcagtctttgtactttttataggtctattcacattgactatttcttcttatgtcatatttagtcacttgtgtctttctagaaatttgtccattttcaactaacttgtctactttattggcatacagttgttcatggtagttctttatgatcctttttatttctgtaagattggtagtaaagttccctttttcrtttctgttccttattaagttgaatcgtctttctttttctccctctccctctctgtcttttcttggtcagtctagcttaaaagtttrtcagttttgttgatcttttcaaataaccagcttttggtatcattgatttttttctaatgtttttctcatccaaatttcatgtatttcttttgtaatctttatttgcttacttctgtttgctttagttttagttagctcctcctttttcagtcttaaggcagtttaggttattaatttgaattatttcttctttcttaatatagacattcatagctctaaattttcctctaactactgtttaactgcatcccatgagctttgatatattgtgtctttattttcatacatctcaagggattttcacatttcctttttaatttcttaactttgatacatttgttattgtattcatattctaggactgctgttaacaaagtataccacaaaccagatggcttaaaacaatagaaatttattttctcacaattcttaaggccagaagtctgaaatcaaggtaccggcaacgttggttccttctggagggttcagaaggacagtaagttcaatgtttctctcctactttttaacagatactggcaacttcaggcatttgtagtctatgagagtatcactccartctctgcctccatcatcacatgccagtgatgagatacctgtgtgtctctgtattcccctggtgtctttccttctttgtatcactttcctcttcctataaggacaccagtcatattgtattaagggcccacacttttccaatatttcctcatcttaacgaattatgtctggaagaacactatttctatataaggtcacgttctgaggaactgtcaggacttcagcatatctctttgagggacacaatttcgtgcataatagtcatatgagaatatgtttttaaatttccataaatgtttgaagattccaagtttctttttgttattgatttaattgtggtcaaagaacatactttatattatttttattcttttaaatctaatgaggcttgttttatttcctgacatttgatttagcctgggggatgttccatctgtactcaaaaagaatatatattctgtggtgtttggtggagtgctctgtacatgtcttttaggcctgtttattgatttctgtactgcttatcttgtatcttgaaaccttgatgaacgcatttattacttctaatgcttaggcatctctgtacacacrtaagattatgtcatcttcaaatagagatagttatacaattctcttttaatctgtttgccttttctttctatttgataaatgtctggcttgtgctgaatttaagtggcaagagcaggcattcttcttgttcctgttctttgggggaaagcaaattgtctttttcccttaagtaatgaaccccccagtattaagcctttgatgttgatcctcaaaggggacagcattggtgtacccacagtcacctggaaggacagtggttttggcatgtctctttgactgtctcttttcctgacccacaccctactcttaagttccaacagccatcagctggtggctttattgtttacaacaacagtatttgggggagacattgctttacagacagagtcagtcaaatatgggccctttcaaggcccgtttccagcactcggttatttgagatttgtctcaccataggatggctcctcccagccacctcttccccagtttctcctcagcagtttttccaaactacagttgagcctgtatctccaataaatccatccatgtcctcccagttgcctcctcctacaacatccactctttatgggagtacctctaggcaactgacattggatggtaggtgataaaggactgtaatccttgagaaaagtgaaacatatgaactcctacatttatccagttgaggataatttcctgactctgggacagggcagtggaacgaaagcagagccttatagcagcactgggtagaatccgggagatgtgggaattgtgctgagatgccaagaatctgcagaagctcctcacgggtcagtggctgggcctgagtttctcatacctggggtggaatttcacaggccctagcagagcagttgagagtgscacagtgtgcagagttaagcatcccacggagattgtagggatcacacagtatttggaaacagactttcagctcatctagagtagagagagcttgtccacaccacaggatagagtatcagcaaagccatatcgtgggtatggaccacactgtggaacaaagacaatacttgattctcctaaccaaagcgtaaactcaaacttccacaggattggggagatccactagtgaagtaacagcctggcagaaataaactcaaaagggagacatcatgacccagatttctcataatggactgtcagaaataggggttggcactctaaagcctcaggccacatctggtgtgccctgtctgtgtgcacagcccacaaactgggatgagtttacgtttgtaatgcactggtaaacaaaaaagaacagaaaaaaaaagatatgtgacagatgttacatatagcccaccaaaattgaagtatttactatctggccctttactacaaatataaagaagcaggaaaataggacccacaatcaagaagacataagcagtcaggagaaacagagcccaagatgacttagattgtggaattagcagggaaggactggaaatcagtgactctaaatatgttcaaggtgttaaacaaaaattgattttaaggagtgaaaaaatgcagaattttagcagagaagtgaaaattataaaattgagccccaaagaaatttgagaataataaagtaccagggagaaacaacacgtaacaaacagggtaaaatactacacatgatgcgtgtttcttgccagaaatcatggagagcaaaaacatggacgtattcaaagcactgtctgttccaaatcctatgtccattagaaacattcttcaaaaaaggaggctgaaataaggacatttttgtgataaataaaagctggaagaatatgttgtcagcagacaggaataacatgacatactaaaggagaaacctcagagtgatgaattaccagatgaaaactcagtctgtaggaaggtaaagtagcaaatatgtagataaatagaacatattaacagaatactgtttcttctatttttctaaaaaatgaatgagtggttcaagcaaaaataatactagggtaagatagggtttgtatcatatgtagtgattaaatatgaaaacagcacaaaggatgagactatgtagaattatagttstatatattctatagttataagtttcttacatttgtgaagggtagagtgaagtgttaagtggaagaacattaattttcagtagataagtatgcatattataatccccagggaaactgtaaaaagagtaaaaaaaagagatttgctctttttacagtttccctagagattagaatatgcatatttatctactgaaactgtatagcttttaaaagtagacaaaaatattgaatagtaaaagtacatttgataaaaccacagggaagcaggacaagaggagcaaaaacagattcaacaaatagaaaacaaatcccaagatggtacatttgaacctaataaaaccaacaattaaattaaatatacatagactgaatatctgaattagccagaaatgatcagaccagctaaatagcaagaccgagttccatgttgtctatgacgtatgcactttaagtagaaagatttgttgaaagcaaatgataaagatataccatggcaacagcattaaaaaaaaaaaactggtgtacctatattaaaattgtacaaaataatctttaagataggaaacattgccagatataaagaggtcaagtttactctgaaatggtcaatgtacaaaagacataataaatgcagaatgtacatgcacctaataacaaagcttcaaaaacaaacgaacaaaaaaacacagaactaaaaagtaaacaaatccaaaatcctagttggagagttttatatccctccttaagtaacttacagaagaactatgtaaaagttcgctaaggctaacagagatctaaacgacactattgtgacctaatttgtcaataaatttcaaaagattgaagtcttaggagtattattttaccacagaggaattaaattaaaaataatgataagctatctggaaaaccccaaccatttggaaagtaaacagtatacttctaaataacccatgagtcaaaagagacactccacgggaagtccgagaatacctcaaccagaatgacagtgaaaacaaactatatcaaaatctgtaggatgcagctaaaacagtgctgagagggaaatgtataactttcaatgtgtatgttcatcagtgatttaaatccttaagcagctagaaaaaaagagtaaattaaagcctaacttgtgggaagtaaataatctggataagagagcaataaaacataaagcaagcaacagaaggaagattcgaaatgccagtagttctttgaaaagactattaaaatggatacaattctgactaattaaggaaaaaaaaagaaaatattaacaccaattgccaatgttgacagtgaaagaggggatagcacttagattacattgggataataagagagtattataaataatatgctaataaatttgaaacttagatgaaccggataaattttttgagaaatmcagcttactatacttgaaccaaaaagaactctgaatatttcattgaagaaatctaatcttaaaacaaacaaacaaacaaaccacccatccctcaggaccaggcctcaacagcttcatgtggggttgctatcaaacartcttgcacaaaagctttccaaaagaaggacaagaaccatttcctaccttattttatgaaggctaaataatcctgatttccaaagtctgtcaaaaacatcacaaaaacagtaaattcaagttcagtattccctttggatctaactataaaactcatgaccatatataactgtaaaagtataactgtaaaattcmtaacaaaatataacatgttcaatcacatataacaagatcatatgtcataacaagaattttattgcaggattaggaaactggcttaacatttccaaaattcaccacaacagaatgaagaagagacatcatatgattattacaatagatgtagaaaaagcatctgacaaaattacacctccatttatgaaggccaaaaatctcagaaaactaggaatacaatggaacttctttaatattgtaaaaagtgtatgaacacatcatagcccccgtgatgatagttcatatattaagtaataccccctctgtctagttctgtagtactctgaattggaggtcctagccagtgaattatagaaagaaatagaaatgaaaggcataaagatttgaaagaaaaaagtaaatctgactttatttttaaattacatgccatctactgaaaaacacctaagtcatctccaaaaaatgtactagaattaataagcgaattaagcaagtttacaggctatgtggtcaacattttttaaaaaatcaattatattttttgtatatgaacaactgtcttttctgcaaatggttctttaccagttttagttggatgagagacctaaatataagaattaaaattataaaatttctaaaacaaaacatgggagaaaatcttcatgaccttagggtaggcacaaaaatggatgaacctttaaacaaataaatgacagatgagacttcatcatgctaaaaaacaagatccttaaaaggtacctttaaggaaatgaaaagacaagccacataatgtgagaaaatattctcagtatttatgtttgacgaaggtattatataactttgtaaagtcaataataaaacaacccaagaaaaaaattatatgaargatttttacagaatttaaagccaataaacacatggaattttctcaacatctctaatcataaggtaaaaccagggtggtgtatgtaccattatgcacccactagaatggccaaaattacaaagaccaacattatcagttgttggcaagtgatattgtttggctgtgtccccacctaaatctcatctcggattgtaatctgcatgtgtcaagggaggggcctggtgagcggtgattgagtcatggggacagattttccctttgccattctcatgatagtgaatgaattctcacccagatctggttgtttgaaagtgtgtggcacctcccactttgcttgctctctctctcctgcagccatataatacttgcttccctttcaccttcgccatgattgtaagtttgctgaggcctccccagccatgtggaactgtgagtcaattaaacctcttytctttataaattacccagtatcaggtaattctttatagcggtgtgaaaatggactaatacagcaaggatgtcaagcagctgaaatactcatatattgctggtaagagtatagaatttgtacagctgctttagaaaacaccttagttgttttgtttttattttgttttgttttaataaagctgaacatgttcttatactgtgttctagcagttcactctcaggtatttttatccaagaggaatgaaagtgtactttcacacacaggctaggacacacattcatagcaacattactcttagtatatcccacctggtggcaacctaaatgtccagcaacaggggctagatacacaactttggacatttaaacaatggaatactgtactattcagcaatttttaaagttatgaactctgaatcatgagacaacatggttgaatcacacaaatgttagtttgagcaaartggttacatactactatatgatactattgtaatgcagttctacaacaggcaaaacaataatgttagtgattgtgctggaatttaaactggcagttgctggggttcgatgagggacattgactagaaaacgaggtttctgggtgataaaaacattacttgtcatcattggtgtggtcattacagactgcatatattttcatactcactaatatccttcaaatttatgcatttcattctatataacataacctaaagtataaaaaaagtatgatctataaatctgcattttgtaaaatacaaagcattttgtttgaartattttgttcttaagatgtcgattacctcagtatcacyttaaaggaaatcattaaaagattaayatggaatgatccttaattcaccaagtgagatcttatctcactgtgaggtgattaggaattgataagctcatggaagcaatccacagaattctacattataatgagtaaagttataatctacttaagaattaataatgagttcaaaattcacacatttacattgttgtgatggctaattatgtaaggaattgcctaacacaagccattctttgctgtcatatgagatggactgtgtagaatttggtcactggaaggcttttaccrccrgcrtagaaatgccytcatggctattggaaacctttctcttctcctcaccattttctagagttccttataacactcgagttaacacagacatcatytcccctgtaacaaggatgtggactcctccacctgtccttttcaaagatttgggtttgcttcccatgttccctaggtggcaccatctatatctttacagttgtttctcccatctgaagtctgcagatggacactttacctcagttgtagaaataactcaattggaattcagtaactcagttgaacaactgatttgaattattcaaataactgaattcccatctgtgccgatgtgaagataccatctccagcttggagtggcttttatatcttaactccttattttcttgtttggacaattcatgttcaaaagaaacaagattaagtatgctcttagctgatgtcrttggccttaggactaatgtggttatccaatggacatttgcctccactgctggttgttctttattcaggatggctgatgagttttctccatactattcaaaaaggatacttctccaaaattatttttttctctgttaarttacggtcttaagtcagaaatacacttccagactgcttttcttcactatacaatttacctttccttatcaatgtggcatcatgcctttactaccaattcatcttttcttttggaacttagctgttatttctgatgtgggcatttatcttagcctactaattttccatcttatttgaaactataattcttttttacattaaccaattttatttcttaaagcaattttagattcacagaaagattgggtagaaagtacagagttcctctatatcctggtccccacacatggacaacttcccccactgttggtatcctgcaccagaatagtacatttattacaattaatgaaccaacattaaatcatcattatcacctaaagtctgtagtttacattaggatgcaggcttaatgatgtgtaccttctatgggtctggacaaacgtatccaccattttagtatcatatggaggaattccactgccctaaaaatcccttgtgctcagcctattcattcctcactctccgcaactcctggcaatccctgatccttttacagtcctcataccattgccttttccagaatgtcatatagttggaatcatagagtagttgactttcaaattggctttttccacaaagtaatatgcatttaagtttcttccatgtcttttcatggcttgatagctcatttcttttcagcattgaataatattgcattgtgtggatgtaccatcatttatttacccattcatctactgaaggacaccactgttgtttccaagttttgacaactattcgtaaagctgcctatacatccatgtgcaggtttttgtgtaaacataaatttccaactcctctgggtaagtattaaggagcataattactgggtcatattataagagtatgtcttatgacatactgtatgaaatacttatgaataattatgaattatttcataattctgtatgaaatataccagactcttttccacaatggctgtacctttttgcattcccaccagcaatgaatgagaattcctcttgctccatatccagcattgggcattgtcagttttctggatcttggcctttctaatagatgtgtagtgttatctcattgtcttaatctgcatatttatgatgacatatgatgtggaccatcttttcaaatacttatttgccatctttatatatatttttagtgaggtgtcagttcatgtctttagccctatttttatatttgggtgttttcttattgttgaattttgagggttctttgtatatttgtggtaacagtctttgatcagatatgccttttgccaatgttttctctcrgtctgtggcttgcctttttactcttttgacagtatcttttgcagggcatacatttttaatttttaatgaagtctagcttattctttcatgaatcatgcctttgtgttgtatttaaaagtcaccaaattctggatgaactagatttttcttctatgttatatatctgtgttacagttttgtgttttatatttaaggttgtgatccattttgaattaagttttctaaaggttctaaggtctctgtctagatgcattgtgtttttttttttcatgcagatgtccagttgttctggcaccatttgttaaaaatggaactataacttttaaaatgcttgttgtttatgagcttggtaaatatccaacttagtttcattggttttatacttttartggatcaatttatctgatattgcttgaaactttatagctaatatatggtaatatttcttaggtgatcttttttggagatgtcaattataattactatcttgggtagttgatggatgacagtcagtggcctctctctatccaaaattaataytaaaacacagaaggagtgtttatttcatttgragaaataaatggcagacttggcctgagaactcaagttgcccaatgtatagagccaggcatccttatttgtattaagaatcaatgtatttctgtaccataagtagatagaaaggtgcaacttataaatgcattttcgtttagtggaaaaattaatacttaaagttaatatttttagaataattctcaaattgtctgggtgcagtggctcatgcctgtaatcccagcactttgggaggccaaggtgggtggatgacttgaggtcaggagttcgagaccagcctggctaacatggtgaaaccccatctctactaaaaatacaaaaattaactgggagtggtggcaggcacctataattccagctacttgggaggctgaggcaggagaattgcttgaacctgggaggcagaggttgcagtaagctgagattgcaccactgcactccagtctgggcatcagagtgagactcagtctcaaaaaaaattctcaaatgttatattttcattatttattttatggatattttgtgttaaaattagagtgaccatgctccacagtttgcctcgatcaatctcagctaacacatgttgagctaaaataattcatagcagtgctggcttttactctcaaaactgtattggcttgaacataaattatgtggcataccatccttgttgcaatgatggaatgtcatgtaatggaaggagtcacattctgggcttttgtgtagtggtaaggcccagaggtatggataactatgacagtgtctagcacatagtaggtgttcagcaaatatttctcaagtaaacaaataatccaaaatagcaagtaatttgaattataggttgtatcatgtggtcatatactcatgtatgtctttgattgttggcattttttgtcctggtaattttttttaaaaaatttcattctttgtttcattcattctggagttacattatcttgacttttgctggaagtcctaatcttctgacacttgcttcccaccttttgtccttaccagtggcccttaccacctacccctcacatttactatgatgtcattagctattatgccatttactcatattgacattgtgaccacaactgtgattaaagacactaggtattttttatgatattttattttaaaaatgaaacaaccaaagcccaattgtgtatgaaagtcattgtcatgtgtgtttcaaatgcagatgaataatttgtttacataagacatacagtgcagacttcacaaataccttacacttaataataattttttttaaactttataaatggcaaagactgacaagtgaatttgggatcctagaaatcgattcttagacagtgtattagtccgttctcatgctgctaataaagacatagccgagactgagtaatttataaagaaaagaggtttaatttactcacagtttagcatggctagggaggcctcagaaaacttacaatcatgatggaaggggaagcaaacacgtccttcttcacatggcagtaggagggagatgaatgagtgcccagcgaagagggaagccccttacaaaaccatcagctcttgtgagaactaactcactatcatgagaagaggattggggaaactgcccccatgtttcaattatctccacctggtccctcccatgacaagtgagggttaggggaactgcaattcaagatgggatttgggtggggacacagccaaaccatatcattctgcccctgcccccttccagatctcatatcctcacaattcaaaacrcaatcctctacttccaacagtccctcaaattcttaactaattccagtgttaactcaaaagttcaagtccaaagtctcatctgatacaagtccctcccacctatgagcctataaaatcagaagcaagtcagttacttcctagacacaatggrggtacaggcattgggtaaatatagcattccaaatgggagaaattggccaaaacaaaggggttacatgccccatacaaatccaaaatccagtaggacagccattaaaccttaaagttccaaaatgatatacttcaactccatgtctcacatccaggtcatgctgatgcaagaggtgggctcccacggccttcggaagctctgcccctgtggctctacaggatacagttaccctcccggctgcttgcatgggctggcattgagtgtctgcagcttttccaggtgcacgatgcaagctgtaggtggatctgccattctggaatctggaggataatggccctcttctcacagctccacaaggcactgccccaatgggaactctgtgtgggtgctctgactccacatttccctttcacactgccctagcagggttctccatgagggctctggccctgcagcaaacttctgcctggacatccaggcttttccatacattctctgaaatctargtggaggtttccaaacctcaattcttgacttctctgtaccctcaggcccaacaccacatgtaagccaccaaggcttggggcttgcacccagtaaaataacagcctgagccatacattggccccttttcrtcaccactggagktgaagcagctggtaaacagggcaccatgtcccaaggctgcatagagcaggggggcccacgaaaccatttctgccccttgggcctctgggcttgtgatgggaggagctgccatgaaggtcttttacgtgccctggagacatccccattgtcttggtgattaacactcagttctttgttacttaagcaaatttctgcagctggcttgaatttctccccagaaaattggtttttcttttctaccacatcatcaggctgcacatttttcaaacttttatgctctgctttcccttgaatgctttgccacttagaaatttcttccaccagataccctcaatcatctctctcaagttcaaagttccacagttccctagggcaggggcaacatgccaccagtctctttgcatagcaagagtgacctttattccagttcccaacaagttcctcatctacatctgagaccacctggaccagcctggacttcattgtccttatcactgtcagcattttggtcaaagccattcaacaagtctccaggaagtttcaaaccttcccacttcttcctgtcttctgagttgtccaagtctctaggaaattccaaactttcccatattttcctgccttctgagccatccaaactcttcttacgtctgcctgttactcagttccaaagtcgcttccacagtttcatgtatctttatagcagcacccaactctctgcagtatcaatttactgtattagtctattctcatgctgctatgaagaaatacccaagactgggtaatttataaaggaaagaggtttaattgactcacagttcttcatgtctggggmggcctcaggagacttacagttatgacagayggggaagctaacacatccttcttcacgtggcagcaggagagagaaaaatgagtgcccagcaaagggggaagccccttataaaaccatcagctcctgtgaaaactgaatccctatcacaaaacaggaagggggaaactgcccgcatgattcagttatctccacctcatctctcccacaacatgtggagattatgggaactacaattcaagatgagatttgggtgggggacaactatatcagacagtttaattctagcttatgaaaggatttgctaggaacagaaaagagagagagaggaaacgtaatgcagggccaccaatcatctgtgaactgcttgatttctgcactgaaatttcccttcaaagcacttttcctgactacaactaaaaacaaatgtcatgtctggaaaccagctctgaactcaagccaagggtaggcaaaagtagaattattgttttttgttgaaattagcaagcatggtcccattatggctaaatagaaccaggtatagtcttaactaagaaccatttcagcaaattcagaaaagaccatggtgcgttttaagctatgatatcagataaaagtatccttttaagtattaagatgacaaatatggaagttgytggtagtttttaaaatttttactttcatgtatttcatgcaagaactgcctttcgtaaacacaaattgtaaagataaactaatttcataatttgaaatggcagcttaaaaatcataatttctcttatttttgttatctttctaaaatgaaaatgtttattctcttagtcccagataatatttgtacccttcaaaagcaatccctttgctccacttcccttgaagtcttttcttaatttagatgtacgtgcatgtcaaagaaagggtacaggtacgtgcacgtcaaagaaagggtacaatattaaacactttaacaattctttgttaattcttcaaataattcagaaatagaacttgaaaagttctatatttttacatagctattgctgtgtgctttgaagaacaacaaatgtgtctatgtgatgtgttacctgttttttatatatatatatgccataatgtagtttctttagcatttcccaaatgtggcagcagcctccagcctttacctgctgtaggactgtaagtgcataaaggcctccctctgccaggaatgtttgatgtctcaactgaagaacctgaaatgtggggaactgaaattctaaagcaagatcactaatgttcccatttggattaaagttatgtatggtactctgtgagaccatgtaaaggttgttaactctaggaataatactctggtattaactttaataacagcagttccctctgtggtagtcatttacctaagattcattttccattcgtttataatttatttttctctctgtaatggagaaaaatgtatttttaaaagaagcaacttatttctgtgatggaaaaaatgtatttttaaaagaagtaacatttagggttttattaagattttagaacttaaatttaaagtatattttagtgagataattactatatcatgtttatacttatatgaaagttatttatgttattggaaacagtaagattttaaaatattttctatgattttgagtatgcagctgttcaaataatactttcagaaaaactgtattattcttaggctagtttaatgtttactaaatyactcaaaataggtcacattttgatgaaggtatagtagttattacagatatgatttaaattactcaacccaatgatttaaaatcccttgaaaatgagtttaaaagcaagataaaaaaaaaagcattaaggtgataatttagagaaaaaaagaattgaacctagtttcttttcaaattctatgtgttactttattttaaagtaaaataattaaaatgaggctagatgacagcttctaaacaaaacatccactgtacatcccccacctttgctttttagttaaccrcttgataacacttaaccactctcacagtaataattaagactacctcataacagaattctggtctttgcttatacatcagtatacttttgaatacagaaattcaaaagaaatttcaaataatcattataaaattagagaatgggtgtttcttcttttccaacaaaatagtatatccttggctggccaggtttacagagtgtgtggcgtgggattgtgggcagtgtgggagggctgggcttccttcttgcccatcagtaactcatctgaagtactactgcaggctgtgtggtctattttgccttcctttggtaaagttctgtgattccatgatcttctgatgtgggaagaaaatcttgaaataggatggcacttagcaggcaaacatgcacgctgcggagaggtgcccgcctctttgaggttggaatatctgcacccctgtgatagagcctgtgctctttatctgctccacttgatctgggataattaatacatggcagtcggggagaraggagggaaaaggaaacgaagacgggagagagaaatgccttgtctttataactcttatgggtgttaataatttgcatttggctctacctctaatgtctggaatcctcctactccccctgtcccactactgtcaccatacttcaagctgccctcacctctcatctgaactactgtagggttctcctaagtgatcactccgaacctgcccttgccccttcacaggtctatgagtcatctccacccagcagacctgagtgatcctctttaatacctgtatcaggccactcctctgggaaaagacaccaagattttaccatcaaacttggaataaaagttaaactcctatcttgtctccagcctgtttctccaaacttaactacgttccatgtttcacttcattcactgtgtcgcagccataatggcatttctttttgttcctcaaacctgccttgcttgtttccacattaggacttcacgtgcactcctctctgctggaccttcctcccagatcttcacgtggtagcctctctttattgatttattgatttattgatttttacccagcacttgcttcatgaaagttttgacctgttgactgtctgccttgccctattaggacattattactctgagaaaagggtctatttggttctttgctgtaactgccagatacatgcaggcattcacaacttttgaggataaatgaatgtagttaaaccttctgaaattatgtgattaagaatcgttttatcataggcattgtgttgggctcctccttgattgtttttagcgactaggttatatgatctcaaaccaagagtaggcttagcatgaacatgatcctttcacaattggttattaaagcatatttggagttaaggatctacctcagttagcagtcagttctacattccattcatggatagaaataaaatgttgatcccaattaatatttctgtatagccatggccatctaactggtttggaattgggagtaaaaaaatgagtacttacatttactaaagacatttgatgccaaatttctaatctgttttattttttgtgctttgtctaagtaattttgacagtgaaatctaaataactgttttataatcttttcagtccttatattggcaactttatgttgggaataatttccagcaagaaaattgctttcatgtgttttataatgcccaattctattgacatttcttttgttttacagatttatgaaagttttttgagataaaccttattagattatttcaccatgatatacgttattttggtgaatataaattaataagattgaattattttaaacatatgaaatatttgtaaatggtagtttttcacattcgatttgtgtttaaatgaatttacctgttgaaaaaaaaggtcatatattcattacgttagaagttcaaatccaaaaataaatatcttcaagacacaaagttcttagaaacgacctcattaagaaaatcttatagtttccctgaccacttgtaagggatttggatcttcacatagcatctgtttggggttacaggaagggtatgcataaatctaaccaatgtttgtaaagtgatttagtctaacctgtaagagacctgataccctcttgaaatgtgcccttacaaaaagcaaggtagtaaaactgatgattccttaaatgggctaaaggaagcgagctgacaggaaataaagaactctgtgatcgatggtatcataagaatcagggtattccaggtatccaaacatcttagcttgagctaagatgtgctaagagcactactagagcagagtctctgccagattgacagatggatgctcctaatgtgctgtctgcctgggtcaagacaggctcgggagctagggcaggactgtgcccgcagttggagaatgtggacctagaagaggtaaggcagtggttaacagcaggggattgcttaaactcattcgaattgagataggagctagaagtaagagcatcgtctcactcattacacacttttatatccttgttgataatttgtcttttaaaattatataatttgctttacaaaagctaaagttgtacattaaactgtcttaattactaccacttaattattctgttaagtagagacttcacttagggtagccacatatcacaagaccaaatctattcaaattgcaggggatatgtctttgattttttttaagttattatttttcttcaagaggaaagattaaaccaagccatatttagaaaataaagtcagacatggagcacctagttatgaatgcaagcagctgaaaagggaaaagtcattttggttgaaaggctggwgttgaaaagaaatatctgctaatgagaagcacagtgtttggaggctgcatccagctcacacacttgcacggggagagtgaggaaccaggttgcacagctacctyctsctctggccttgmcacaaattcctgtccctttagaaaagtcatttcatttctgtgcacctcagactttgctaatataaaatgaaaggattgggatagattttctcttaagacgtcttcccactctaaatttccaaaattcaatgaaaatgaaagcctgatccatagccataaaagtgtaccaggggatttagatggcagcctagtcagagcctacattatatttgatttcttcagtagcattgaggcaacargaacatatgatgcactcctcacgggacttgtgatagaagtgactcttgttcttatgatgaaaatgacactaatttttaattccattttactgtcctggctgtcacttctgtgtgctctttaatgaagtaatacwtacttaaacttcactcctgaaatacagaagtctttctagtccttactataaatgtgcaaatgctatgctgaccagtcttatattgttgtgttctagagaccgtgtaattggtttgatgatgactgcctgtgacctttgttctgtgacaaaactgtggcccgttacaaaattgacggcaaatgatatatatgcagaattctgggctgaggtatgtccttgattcttatattgacatagatagtgaggagaaataaaacgtatggatcaattgctaagaatactttagttgttcatgttgatagttatttcagagaactgtggtgagtcacatactgaaggatttagcacttaygcagatacaaagagagaatgatcattcttttacatattacttacatgtgtgtctaattctctgagctcaactgaaagagtttaggaacttactcactgaacagtagtataacagttatcttacttaacagctgatcttttgttcattcattcaataaacattactggccatctactttagataggcactggacaaagtactcagagggtcccataatacaggatatatccacctgcagttaaaaattcaggagaataattgttttgcaccatagacattgagaatatgtaaatataaccaatagctcacctgcaaattatgtgttctgcagaatgtgtggaatattcattcataatactcctgaaacaacacgtaaatgacttttattaacgccttttcttgactgacttatctaatttatcagtgatgtgcattgtactgctcaatttgctgatggaattgtatgtaagtaagtagaatatcattctcccatccaaatgagtcacggatacctaggcctttgcatattcaaaaactactctatgaagaaagctgtaaatcttttgagtacctcttctggtttgaataaataaaagtaaatttggaggacaaagcagctgataattcaatcgtatatctcattcatacagaagaatgtatgtaaaacataaacagcaaatcattcagccacaagtttagtgggaaaggtttatcatgttgaattatttcataataataaagccaaagtatgtttactgtatgaggatcacagaccttgagttgattatactcccggcatgatttctccagaatgctttacacatcgcatatgcgtggtctcgcatgagctttttctttattttattgtgtatgtgtcagaacctagttaccatcagactcaagtaggaagattgatttcaatgcacagttgacccttgaacaacacgggtttgaactgtgtggatccacttatatgtagatatttttcaataaatatattgaaagatttttttggagatctatgacaaaaatacagaacaacatatcctagaaatataaaaaatttaagtatgccataagtgcataaaatatatgtagatactagtcgattttatcatttactaccataaaatatacaaaaatctatgataagttaaaatttatcaaaacttatatacacacttatagactggagagaaatgtaaacaaacagatgccgtgttaaattgtaactgcgtaaagttaaccatagtacatacggcagtactgtaataattttgcagcaaccttcttttgctgttacggtgagctcaagtgttacaagtatccacttaaaatgctgtgtttaaaaygctctgtgatgctaattgtctctgagctattcgtctctccagtaaattgtgtatcacagtaaaaagtgatctctcgtggttcttgcatagttttcattgtgtttagtgcaatacctaagtcctccgtaacaccatagcacctatacagagttacactaggatgctggaagtgctcccaagaagcagagaaaagtcatgacatgacaagaaaaagttgagttgcttgatacgttccctagactgaagtctgcagctgtggttgccgccatgttaacataaatgaatcccgtgtaaggatcgttgcaaaaaaagaaaaggaaattcatgaagccatcactgcagctatgacaacaggagcaaaaaccttgcactgtttgtgaaatatctttttatctcatactaaaaatrcacgttttgttcaggtacaggattgctatgagaaaggcataactatagactgtaatatgatttctatattctagacaaatgtagaaaatgtgcagtcattaaatgacaacttaaagtaaaaggaaggtgcaggattaaaagctggagaatttaatgccaaaatgtgaccaatatgtaatggagatgtttttcctttatattattcactggttattcagtccacagataatgattcagctctctgcatgctcttaggtgcagccttcaccaacctcaatagtccacaggaagaagcaggaatatattcaccaagtcctgacagttgttcccagtatctataaagtcctgtctcttctctccatcctcacaatctttcccctcttcaggtcatcaccaactcatgccttgagtactgcaactttctaactgaattccttgccattaccttttagaatttgtgcaaaagtaattaataatgtggtctttggtgccaggttgcttgaaattaaaattcygctttggcacttggtatttaacctcaggccagtttatgagatagggatgataataattcggattccatccgtaccctgcttctgatcctcttgttgtaatacagaccaaaatcatgacctccgtgtggagagccccacatggctggccccctgcccactgtctgtgcaggcatattccccatctcagcccctagctgccatttaggtctttgttccctgcagtctctgcctggagcatgctcctgccctctgtattctgtgaaagcctcagattggctcagccctctgttagagccatggtctgtagcactgggttcttttcctttttagcatttttgtttcgagtacatattcaaatcatcgtttgtttaaaaagctgtttccttgttggacttgtcaagtctttgagagcaagggacttagtatgtctcactcactttggatagagaagcaaaaggtttgagaccactgattttaaatttaaagtggtaacaatggaacagcagccatgcttgaagtggctttgctttgtcaggacaagtgctttggtcctgtacataaaaatacctaattatggtgatagtagtttgtttgtagaccctattttagcaagtctgggaagtttctaggctgtacttctgatttctaaaaacatgaccaacgttactaaaataataaaaactatgagggaagagtgggaagttaggaaaaatactaggaaatcttaagaagattgtacaagttttacctttaacaaataaataaaaagcaagataatttctaaaatctttaaaatgggaacagcatatcctagaatatttcataaggattaaatgaaataatatttacaaattacttagctcagggcctgcatcatagtgaatctttagtaactattacctgtaactgtaagtgaatctttagtaactaacatagtgaatctttagtaactattacctgtaagtgaatctttagtaactaacatagtgaatctttagtaactattacctgtaagtgaatctttagtaactaacatagtgaatctttagtaactattacctgtaactgtacgtgaaccttcagtaactaacatagttaatctttagtaagtattacctataattgtaaattagatgatatgtgtagtttgttgtactgcgtctttactagcacattttagtcgactggtgatgtttatcttcctctgtaaatattcctctggaaagccaaacttcactgagttccatgcacttggaagatcatttggaagagagaagggcctggaggttattccatatcttgttattgttatttctcctcactgtttactgtatctcctcttattataacatttatttactaacttctgcaaaatgaaaccagtaatratggctgggtttctggtaattcagtagtggagaaaatcaggataaagtacaaaataatgatacattaagtttttctttattttgatgtacttttcttgggttaacaaccacaaacattatttgttttgaagaaaattaaggaataaagggaataattcaataatatyaaaatagtatagcaatttgaaatttgagaaagcatgattttctccccattcatcttagggtgatgaaatgaagaaattgggaatacagcctattcctatgatggacararacaagaaggatgaagtcccccaaggccaggtatgaattattaaagtaaattgtaattgctaaagccaaatagtttaaggtgggcataaaatcatacataaatggaaagyatrtcatcatatattatgttaagggaatgggttattccaggcagatctggtgattaatatagaaacttcagaaatttatcttacaagattgagaactagaaaaagaaaaactgtttaccctgaataatcatctactcaaatgagccttcacttgctaagacactcagaaaagtagactctaaaagagtttatactcttaatctgagtttgacggccaactctaaccactgattttgttcccaaggctaaaagccacagtgaggaatcctgagggtctggctgccttgtggactggagggacttagtgctcagaggacagaagctagaaccacttgaaaccttctccatttagatggagtaagaccaaggttaggaaatctctgtggactgaaagaattcatactaccttggccacgactcctttctacagctgccgttgcagtaaataggctttcttttctgacttgaaatagagggggyggatgaatttgaattgttttatttttaacaagcagaaaatattttgtcattggctaaacaaagatatttttggagagttacattatagattttaattcaggttcatttttttctgacaaataatgcttagtattttagtacattttatgttttgtctcaacataaattgacattaattatcctcttttcaggtcatactacataatttattttgcttttgaatgttttgagaggtcttgtgcctcgctagttttgcacatgtgtatgtgtggtgtcatatatttctgagagtatggctttcgttaactgtctcatcttctaatggcataacaaggaagttagttgtgggcaaataaataattatgatacagataagtttaacaaatgtttwaaaaagtccacaggatggtggtttttgataagttctcaaatttccctactttatttaaaattgatttatacaaaatttagacaagtccacagctcacagagggtaccagcacaacaaagaggctgaatgaatggccattgcctccacttatgtccctggctaggttttctgatggcatggtcacttttccctcttgattagaaatggatcctgaatacctatcgtgtttactgcaggtgtattttgaagtttttgtcgcattttaccactgttcatggaattttcccatatatggagtcacagctgttagtcattcctgttcggtgtctgcttttcatattgtatttgagaagttctttcccatcttgagagtaaatatatttgcctatattttctttagtttcttcttgattactttccatttgatttattgacttgtttggaatgtatcttgttatattatttaagatagggatctacaatttctttccttcccagtagttaacagtcatcccaagaatgcatggtatagctggaaatttctcattgatgctgtcagcatatgggttttgctctagtgtttttaactaagataatcgtttgttttagaatagtttgattttcatttacagcctaataaaggtttaaagaaaaatttctatgatcagttcatattttaccaaccatattgcttctaaatagttgatgactgtgaaattatttgccataataatgaaatactctaatttctaatattagtatcttttctgggatcttgtgccccatgacatctgttaaatattagaataagaaagtctctgcatgagccataaagttaaaaatggaaataacacaggygctattctagtaagagtgctatgacgatagactttataacaggagaaagcaaaaaggaataaatttgatccttctgtatgcttcgatgcatatcactgaagttcagtactttygagaaattggtaagctgtgatttggggtcacctcttctagagagctatttgtctcgtacatgatgcagccacttggccagtgacttatgactagacaagctgtgttatctggctgatagtcacatatcttttacatctggacttcagtaagccagtcttatttgcacagtgacccagaattccyaataaaatattatttatgtattatttaaaatactacagatttttaaactttgaaatgtgatatattggaaaaacagtaaatgggaagagctgtgataaaaccaatgacatttattttagttcaaataagagggctgggaggatgagtaaatattgggacaccacacaaggcaccaaagccaagagtaacagacaagcagaaagcactgctgtaaacctgagcacgagggcggaaagagccatatgtatgaaagaatagcaggctttacgttgaagtgtctgcaagaaagcactaaaggtgactggagataacacaggacttgaatgatcaactgactgatctattagcgaaatgtcatttaatgtacttgggtcttagatttcagtaggtatttttttttttttttttttttttttgagacggagtctcgctctgtcgcccaggccggactgcggactgcagtggcgcaatctcggctcactgcaagctccgcttcccgggttgacgccattgtcctgcctcagcctcccgagtagctgggactacaggcgcctgccaccgcgcccagctaattttttgtatttttagtagagacggggtttcaccttgttagccaggatggtctcgatctcctgacctcgtgatccacccrcctcggcctcccaaagtgctgggattacaggcgtgagccaccgcgcccggccagatttcagtaggtattaacctttgtaatatgttttgaatcttcatgtgttttatttctagaatccattttaatgcattttaaaatacagtctataatagtattcatggaacccagatatcacatacagcaaaactagaacatgcaattttataattaggcctcagaaacagaacagtcacttaagaaatataaatatcactggaattgctaatgtgcacttttgtttcttgtccgtggtttttgcatggaggcagcttgggttctacaatgcygtggccattccctgctatacaacccttacccagatcctccctcccacggagcctcttctgaaagcatgcaggtatgtactatggttcaagccgtaaaaatattgtttccaacaacactgagatctgtataggatttttgtaccccactagtgtgttgtggtctgtgtgtttgtctagatgtcgagttgttgtgctcagggactcggggcctccttacctggcttccccagggccacgacttctcccctttggttcaattctcctcaaagacgagcctcaggcaccttgggtgcttgggtagcttcttctggccacactctgaagagagggacagtgggaacaggctgggggctggggccagacacagtcagggcccagatgaccgagtgactgggagggcctctgtctcggtgtgggagacccttctcgctttcttatgcccacgttcagtctgagtggggtgccaggtctttctttgagaaagggcatgtgtgtggttcttgcaaggcagcttggtttcaagcctaatgagagctgcatctgtgctgaagggaccttgtccctggaggtcctcaggcctgggatagaagcccttggccaggctgccttattctgctaagtgagacatggagtcagtcctgcaagaggggcccctggctctcatgactcgtacagccacagtatgtccctatgtagtacactatgtatatgtgaagagtgtctattcatatcaagtccttcatacaccaaaaaggaggaagaagtttttattattattgttattttgcagaggacctgcccaatgctgtttttaaaaagacaaggtaatggtgtctattgaggatgcctgtgcaggaagaggctgactagatcacacagtttgttgtttaaatggaagaaggggaccttaaattttgaataaccgcttcctctttaagtctttttctcattccagaaagacatttaagcatcgttatctcttctagattcattatttctccctattccattcttatcctttttaaagagtgaactcggttaagaaccttggatatttttaaagattttcattttactttataaattccctctgaggaagtcaaagggttatagccagcagctgtgcgtgtgagtcttttctaggtgaattggctccgggccatgttttaactacttagccatagctctgcctggggtgggttggagtggatgccctgtgggaggacggagaacagacactggccagagagttttacacaaaaccagaaacttagtatactcttatcttctgctgttgaaattttttttctgcttttttcaaggaaagaccaataagcaatattaaaaattttatatatataatatttaagaaacggtttctccttccttcctgctcctgtggatataaacgtagcatcccaccttgttctgttgagccttaattgaccttaatccctggttagtttattaaaatcttaccttattacaaaggcctaagtcataatgggcaatatggagtgtgaggccagatcattcttgaaggaattaggttataaaagtgtgtgcaaaattaaagagaaagtgggatatcaatgtaaattcaaagatgttgtttaaaccaatatcttcaaaagtcctttcctgtccagaaattctgtgtgttttatgccaggtacttggaagccaggtcatgagtgctgactgtgcatgcccggygctgtagggcgctatggaggcgtgtgccyggcgctgtagggcgctatagaggcgcgtgcccggcgctgtagggcgctatggaggcgcgtgcccggcgctgtagggcgctatggaggcgcgtgcccggyrctgtagggcgctatggaggcgcrtgcccggcgctgtaaggcgctatggaggcgcgtgcccggcgctgtagggcgctatggaggtgccttccttgtggagctctgagaacacggtgtccactgygtgggcagctctgcctcattcctgcttcagtatacttggctggaccacataacttcttaaaggccattttaatcttattaacgcttaaaaagcgtatgatgtatcatcggtgtccaaggaaacataccaaaattagtgtatggctttttccaatatatcagaagtctctagggtctggaaaaataatacttgatgatatgttacaaaagttaaaagggctacacttttcagttatattttagggttttgtctatctgaatgtgtcttagcatgtttgctaaaagaaatttgagagaattttaaaactgtgtctcataggagttttgtatttcccaatgccaagattcccatgtgacttcacacaggaatgtggctaagagctctgccagggtagccatgtagagtaagatggttgtgcagtggttgtgatcacgcagttagagaagatgacgatgcctgtgaagcttgaaccacagacactgagagagaaagattagaggactcgagaaatgagactgcctcgggtgaggacttaccagagcacaaacacggttttactgtaacaagaaaatttccgaagttttgccaggtgtaacttaggatgactttgtacatacgacacactgttcagaataagaacaagtgtaagatgatgaggtttaggcctcctgggagatgcactgtcgacatttctcagtaggaaggtccgtgttgtcaccaagtgttcctactgctctgggaccacctcctttgcacgatcccgcgtattcctcagtagtaaaccctagggctctttccctgttcaagttaatccttctttctaagaaaggacgtatgctgagccctagcatttctgctgctttcgcggtccagagcggatggaccaaggtgcccctgaccctctggcacctctgaatctctttcctgaacagccatcacaggaacctgcctggccacgtcgtgctggtaaccatgtcggagggccccacacaatgccgttgtgcagagctgtgccacaggactgtttggttagttttcaagacaaagtccagaaatcctttattcagcttctcctgaaactgcatcttttatccctagggataatctcagtcagtgggagaaggtgattcgaggggaggagactgcaacctggatttcatccccatccgtggctcagaaggcagctgcatctgaagattgagcactggtcaccctgacacgctgtcccacctacagatcctcatcttgcttctttgacattcttttcctttttttkgggggggtggggggaacctgcacctggtaactggggtgcaaacctcttcaagaaggtaacatcaaataaataagtcaagcagaggacttcctgccaatctcttctgtgaggcatcatagacactgagcaaccaggaccacccccacgttcagaaatcagctggccaagtgactccatttgacttgcaaaccagccttttctaataggctaatattgctgaggccttaaaggaaatggacaaaaattatccagaaggggtacttttccattgtatctttctaataagggtttaaaatggtactattatggtattgtacttgggctttaacatcaatgttgctttgatgttgttggatataaataggaatttttacacattactattgtgaatggtgaatgttcatgtatgacctacttgtaattaacttgagttgtagtccacagcctcaggacaaatgtcgttgaggttacagagtaagaaatgatggcaaaacgtcaaactcttatttcagagcttcatgaatttagttagactaaacataattctttaagttcaacctaaagggctgagatcaataaatttaacactagacgaagtagacttcctgtctttttgagaagagatgaggtatatgttacaataaatctcagaacttcaagtagcagttcaaaagatgtcagtttttaaaattgtttttgttgttgtcttggcagttttactgaaccctttgcataaagaacaaaataaaagctcggcattgtaatttttttaatggacaagtcttatggatacgaagggtacatttttcataatgattcctttatattttcactttgtgtcattgcagaattttagactctcattcacaatgaaaagtttattttaaacattgtttaattaaaataccatacagttctcttttaaacatcaaaccataaaaagtgtattttgtaattttactctgacctgccgcagtcacctctcacttatctcttccacgtactgcacggtcgtatttcatgagctttctgtccatagcacagaaacagagcagaaagtagtacaatcatgttggaccttctttctgttctctttactcttctcacagatcagatcactccatagaagcctgtgggtttcgayggtttcttctatacacctttttggttgaccagtattactatacaatgtaagtgttttaaaaaatacgaaagtaatactctgcaccccttcctacaaagatgataaagcagtcacttctggcgcattttaataatttaaagatttttagtgcaatggcacggtaacctccaaacctgaattagacagagactcactcaggaagtgacaggcccatcatatcaaataacttattcacttttcatgtggcaggaaactggaatatcgcttttaataaaatggaaaaatatgcttctacatatttaccaccataggcgttttgttcatatgagcctggtttgtgcaaaattaaatcagaggcttctacaacatggtttatttatgttgtagcaaagttggctctacataaacattgttcttattttaaaattaacactatgtgttcagttttcttgtgggcttctgaaagttgccatcttccctccgtggagctccatttgctattttcattatacactatgaggtaaaatgtaataacaaaagagagagaagtaccactgtggctagatatatacacacacatatatatatggatggatgtaatatatgtagaacacacacatagatgtatataggatacacactcatgtatgtaaacgtatacatatgtgtatatatgatacatacacatacacacacacgagagacagaaggaaagagaggaagagagaagcaaacatgtaggaaaaaatataaatcagccccattctcccattctttaagaacaatgatttttcttgatggaaaatgcatatcacttgacagttgacaagaaagtgtcatttttgtgttagtgtatcatataattgaatttgaacaagatacatatttttctgcatacaaatttatgaagctggagtctaccaaacacagctttagtcacaaaagttagtttagttatctcatttcgcttggagatggaatttcaggaagggatatattatttaagattattgtttaattacaagaattttaaaagaatgtatgaattctgttttttaatatagaaaataattatggagttaggaatctcatggctacatttacatttttaggttattacagaaaattctcttaatttattatagtcaagtgtattatgtaatctctatttagaacagtttcccaaaggaatgtgattggatttactggttggttaatttcttgtgaaatattgtcataatagaagcacagcttgaacaaaagactgaattctgatataaactgtcaatattgcttttaccatgtgtaagatttacttagtaatcacagatttacctaaaataaaaggacccgggttgcagtgatatttagttaatgatttgttttggaaaacatgcagttaggagtatttttgtattttgtcagatgtttaggagacagactttcgggtcatgtttcttgtcttgttcccagatcttttcttaaaagaacagtgtgacaccagaagccaagagatggtttttactaacaacagctttgatgagttcctattaaggtcgtattgtgtattgtgccaaattttccacccagtataaatttagtaacccgctatgagcatatgtaggatattcaatttgcagatacttttgttggttatgttggtttataatagacaagttttatggtcatatgcaattattccattatctttttggacacagtgaatatgttttttagctaaaaatgtccttggaaacataaatgcctgccaataacatggaatattgaattcgggcaatgtgaattgattaattagaaaagggtcaaaagaaatacaatggatgtggaaactaattctaaaaaatagccctattaatagggcagagactctggtccatttcccagctgtacttctctctaagaggtgtatgaaaaacccatcttgcaaaagagaccaaaatattagacacaatcgttcccattcctgactcttcaatggaaaaggaaggtacagatgtttacagtggtgccccaggtgactcgttctcaccacaacaaaagcaactaattggaaactagatgtgttcaataatagatttcctcttttttggcatgctttttagattttttttcattttgtaaaatctcagttaatttttctttattggtatatttgtgtatgcgagacaaatcctgtattgtacaggatataaatagatgcataaatccttagatacctgggttttttaataggtttaggtttgggtattgtgtttctggtcttttaactcaaaattaaggtttgagctttaataggactaaattattcacctgccttggcctgtgcctttattttaaatactgcaattttacttcttcattcatgtatttattattttgcttttcttgcttaagtataattgaaaatatttgcaggaacgcacaattcattttatcaagttgaatgaataggaccattctctcctcatcagatttctgttctttatttgacttcattgacatataccctggtgactataaccagtgaactgttcagagtcagtcttttcggcaagaacttcagagaactgtgacactggttatgatgtgattttggggggtttcaggtacctaagcatgatttttaaaatcacttctctctttacatatttcgaacatatgtttgctttctacactttgcagattttatttaggatttaattctttaaagactatattcatttagtcactatagtggatctcttctactgcaagtattcatctgatttttaaattatgtaaaatgtaaatcagccaagtatgtcatccgttatagtttccccatgctttcagcgcatggccatgagatttttacatgtgcataagtatttagccaatacacattttgctgacttctttaaccatttatattgtttaaattagtaatatccaatgcagtgcacacttttttgtcttttttccaacggaatattttggttgtctgtagcgttggaagcattttatatgataaaaatagcaagaaaaaattaaaaagtgtcaacggtgtgctggttctaaattaagaagatagaacaaagagaaagacattaatgttacctaagaaacacatttaacatccgaagaagcaatgctgtcctcacttgatgtttctcttctcaacccagcaatggagagcagggcttgcaaagccgtacagagcctacgtgctctttcctgcaagtgggagaaaactaatcaatggcacacagggccaggtgtggccctgtgaggcaaaggataatgtcacctcaggaccaaggtggaaacttacagctgaatccagggcttactaagtagggaagtcagtttacatatttcagttttcctctgatgtttttgaggtactgtgtatttgcagaagtttaagcagaagggttttgtttctattgtaagttaggttctaaaagtgtataatctgatactctagcccaactgaaatattatatcttgggcgttacagcctttgtctttttctttagtcaccttaatacccagtcctatgctgtatctctgatagcctatataaatgacatataggaatattattttccatatgatctgttgtatggtgtatatgctatgtgttcatttcgtgtgcaagttcagagtgtaatagatttacccagagaaggtgtttctatacaatgcccctacctatttgaaattacatgcttgcccaacacactgtgaaatagttaccaaaatttgtacaaatgcagcatcttcattctttctgagaagacaagatggttttctttacatgaacaaatgaacaaaagagatcctagatccataacgtagctaaggcatctaagagtttgctgttgataatcttgctgaccaaaaactactggagagtaacacaggttatatgccatcacaaatacaatgctcatgaagaactgatttgtagagtcaatgaacctgtgtccagaattttaataggctctctattggaaggagaaagaatttcaagttaacagtatctaactttatcatagttgatgttagtaaattttaaaaaatgattttatatgtatgacaaaaatctttgtaaaatgcgcaagtgcaataatttaaagaggtcttaactttgcatttataaattataaatattgtacatgtgtgtaattttttcatgtattcatttgcagtctttgtatttaaaaaacatttactgttatgtttgtataatagaacagtaatcatttattataatctaggcaagttgtaaataaattcataattcaaacagccagtatatatgcatatatgagtgttatattgcaaaatctttgttttacttacatggttaaagcagcaagaattcttttgttgatatgtaattatacacataaaatatatatatgtatgatacatgaaatatatttagaaatgttcataattttaatggatatcctttggtgtgaataattgaatacagagtttttaaaatatctttcacgtatatcacttgctctcatttgtggggaagataatagacatttcacagaaggtcatttgaaaacactccaggccttgtttgcctagaaaacaccaagtttacattgaattaacatgttgtgtttgcttcacccattttctagcagacagcacaagacaacataaaatgttaaatgttatgattgactaactctaagtccattctgtagttttaaagattcagatactgtgtagggaacccgtggtgccgcagtgatggcttcaggttactgagccagcatccctgagtgccaacccgcaggcttccccgggagcttccgtggccctcggagtctttggggcaacaacgcaaatgcacactcactaaaagcacaccctcctgaaaagagaagtgctgggcaaaacacagtggtgcatgtgtgtttatgtgtacgtgttgggattctttctgctataggaaagaacacattcagggctaaaacctcacatactgtgtacacagtgataagtatactcatggtcttatctttaaaactctgggtaaagaaattatgtttttattttgactatctctgtttgccatcaaatgagtaggcaaatgataaatatgtaagaccaaaaagttaaattttatccctgatcctctctaaccttaaacatattagagttaaatgtgagaggcttaaacatatgagtgtccacagccttgtgaattagaaggaaaaggaattcttctccaataccaaactcttactaatggaatgccctccggatgcatagcactatacataatggtagacaggatttttgttaaatattcatttcctgtgaaatattcatttcctgtgctaaaaataaatttcatgagctaatatatccataaagttatttagttattcaagttgcagattggcactctgtaaagctgatctgaatttgaatcctcatcttaactgtgcatacctttgatttttccatcacctgtaatgcaacagtgttgagagtaaaacttctccatcacatgtatttcctaatgcaagaagaatcctcaaaagcaacacttaccaaacaaacatttattcaacaagcatttattaggcacttagtgtgtggaaggaaagaatggaaggagaagagattggaagcagaggacgggatgtcatgtttctgtagggttggccctcacaccttcatcttgccaaagacaaagtcacttagccatggattcctgtgcacttgtgcctttccgtaagtactactttcatgatcgtagttaccgcagtgtggaagagaaagcacacatttaaagacctgaagatctcagatatttaattacaatttttaatttcaaaaacccgcaattgattccattcttataagaggaaacgaagcttgatgagacagaaaccaaacagaagcatgcccctgcatgtctacagctttttcctctcccacacccttcgcccactatcagaaataaaaagatgcctcccacggcagatctagacgtttcctcgacagtgaagagcaaaggatagtgactagaaaataaaatcaggaatttatttgaaatatcaacttccaaattcttagctggtagttgtatatattcagataatgtctagcttttttgatgtctatgtcactaattagaactcctgctcaaaaggatgaccttacagcatggtaagtagtcattaaaaagaaaacagattcaaacattttaacatacagaatgactgaggtacacaaacatattcatatacattaaggaaatgtttacctgctttactttgcattatcaaaaaaagcaaaatatcagaccaccctgtttcctaagtctcctgcataactggattatgcctgtgaaatcaggaatgttagggattggactcagaggtcatgggtacaatctcccatcagccaatgcaaaatcccttacttgccatttctggtagatgctccttcaacaaaccactcctgagttggaaaacattctaccgtgaggcaaaccagaccgctggttgacagctgtagttgccaggaagttctatccaaagttgagctgaaacctgttgctttatgatttttattccaacatgctagttctgagcttgtagtcacacagagaagtccacttcctttgcacctgacaatcttccagttaattgaagaaggctatcatgcctcctcatgctgaacctcatctttttttaattgctttaaaatataagttggctaaggcacctgcagtattcttgacattctcccctgaggaaagtgccagcagcctgctactgggcccttccttactacagaataacatgtggctgaagtgcctcagctggcactcaggtgacctcctacctcccatggcctgtggctcagtcctggggaagtcacaccattccttgagcatcccatgtcctttagagaatgtcacatacaattctctctactggagtgacttcactctgatttctgtttggtcaattcattcttgaaaacataaatttgagaatctcctctacttgagagcctgtttctgccggtcagtgatgtgccccctgaatgtgctcccttgacccccctgcatgatgaaatggggctgtgatgtgcacccagcccaggcggaaataatagaggttaacatctattgagcacttactatttgcaggcactcttgagtcctactcatctgaactcaatctcacaacaattctatgacttatgtgtaatagggcccctcttttaaaaatcagaaaaatgaaatgcagagcggttcagtagctggtaaatgaggatgtaggggtatgtacctg

SEQ ID NO: 95620 - DNA, 48911 bp, Homo sapiens
agaattctctcttatgaaaggaaggatcttcctttttgttctattcaggccttcaactgactggatgaggtccacccacagtaggaggtacaatctgctttactcagtcttctaggttaaatgataaatctcatccaaaataccctcacagaaacacccagaataatgtttgactgaatatcagggcaccacatggctcaatgaagttgacacacaaaattagccatcaccctttcttaagttttgcagatggtataaacttttggttgaggtattttttttctatttgtttgtttttctttgtctatggacgtccagttgtggcagtcccatttctttttttcttttcttttctttttttttttttgagacagagtttccctctttttgcccaggctggagtgcgatggtgtgatgttggctcactgaaacctccacctcctgggatcaagtgtttctcatgccttggcttcccgagtagctgggattacaggctctcacaaccatgcccagctaatttttttatttttagtagatatggggtttcaccatgttggccaggctggtctcgaactcctgacctcaggtgatctacccacctcggcctcccaaagagctgggattacaggcatgaaccaccatgcctagcctggcagtcccatttcttgaaaagggtatctttcctccattaaattgcttttgcacttttgtcaaaaatcagttaggtgtatttttgtgggtttatttttggggcctgttgatctatgtgtctgcctttccgccagtaccacacagttttcattgctgtagctatataatcagtcgtgaaagcaggtagattgattacttccactttattctgcttttaaaaaatgttttcactattttaatttctttgcctttacatataaattttatagtaatcttgtctatgtttacaaaaatattgctatagtttgaataggcagtgcattaaaataatatatcagtttggaaaaaaattgacatctttattatacagagtcttctaattcatgaacatagtatgtcagtttatttagatctttgatttctttcatcagcattgcacagttttcaacatgcaagtcctgtacatgttttgttagattacacctatttcatttctttcagaaattataaatgaaatcatatttttaattgtagtgtccacaagttcatggctagtatataaaaatgcattttatttttgtatattcttttatttttgtattatgcaaattttctggagatgcttaaattctactaggtgtttttcttttttcaagattcttagggattttctgcataatcaatcatgccatctgcaagtaggagtcgttttacttattactttctgatctgtatgatgtttacttccttttctagccttattatttcttgccttattgatctagaacttctaggactgttgaatgagaatgatgagagcaagtttcttagctttgtccttgatcttatggaggaagcattcagtatttcaccattagctgtaggtttttctacagatgttcttcataaagttgaggaagttcctctatattcttatatttctgagaattttaattatgaatgggtgtcaaattttgtcaaatgccttttctacattgattgatgtatgatcatgtgattttccttctttcacctgttaatatgatagattatactgattgaatttgaaatattgaaacagtcttgcatccttgaaataaatcccaggtagtcatagggtttacttatcttacttgaagtaaatttaccaatggaatttagatatcatggggtctcattcatagagaattggctcactggaggccaaaataaatgcaaaggaacaacaacgtcagaaagctgaacatggaatctcttgattgttattatctgtaatcactaaattatagggatagtgttggggcagaacctgatgctgggccaagctggaattctagccattgagccatagctgctagttcagggccacctccaaagggaaaagttatgctaaaacaacagagagcagacttattccaagagactaaggaaagagaaaagggagagagaatggatagaaatttaaaaatagttattaagagatatcataaataaagtgggcattggtggtgttgaaacaaaagtcttaatgcagcactctcagaagttggatggacaaatggaaacccttactagtcccccaacattgaagggcgctaaacaaatccactttattcaacctagtttggataaattttaaaagctgcaaagcaaagatgactgtaagaaacctgacttccaatcacctggggtgaagatatgcaaagtagtcaaggtaagaactgaagaaaggccgggcaggtagcttatgcctgtaatcccagcactttgggaggccgaggtgggtggatcacctgaggtcaggagtttgagaccagcctggccaacatggtgaaaccccatctctactgaaatacaaaaattagccaggcatggtggtgcatgcttataatcccagcttctcaggaggctgaggcaggagaattgcctgaacccaggaggcagaggttgcagtgagccgagatcatgccactgcactccagcctgggcaacagagcgagactctgtcacacacacacacacaaacaaaacaaaacaaacaaaaactgaagaaagaacctaggcccattggcctaatctctggctggggtccaagaccaaatgtacgtgaatgggtaaattgtcaggggtggaaaagaaacatttctaaaattctttgacatgggagccccatgcactgtttttctgttagtgaaattctaaccaaggcaacagattggaaagatatgaaaatacatttgatgggattaaaatgaaagtttggatagaaactggaatgtctgaagagactctatttggagtggttgcatcccctttacatgaatgtactatggggatggatattgcctgaggaaaatttcctttacctagtaatgtaaaacacaagacaggtggccctgcccttcagacaatattgattggacatgctaaatgggaaccagtaagattgctgagcccacacaagttgttaatattaaaaactataggatacttggtggacaaaacatgttaaaaagacagtctggtacctaaagggtgaaggccacttctgtttttggaaactgatagcatcagatgggaactttcaagcctgagtggcatttctctgggagacattttggtcatacaatatgatgatgaactggaccagttgttgatggcagagtggaagtcttatatctatctgccactatcttttgactctaatttttcaaattatgtttactaccatatcataatacagtgtaactctgggattgtaagtgaggttttaatgttcacactgatggccaatgtattgagaaattgagttaaaagcctcctactctacactggctcctccaaatgtcagatatatgttcattttactgtaagagagctttggccaaaggccaggtggcagccgtgttgtaaaggattcagtcttgcccaaagagaaggtttgacttttgcccttggcttatgggaggttatctacgtcatacctgataggagtacctctgtttagatggggactgggcaaactggattttagggtggagactggccattccagagagaccaagtatgtgaattagggggcttttgtcatgcactatcagtctagttggagtctcagtccaaccaagtggacaattgatcaagcctatgtgctggagtcccagtaaaaactctggacacagaagctcagacaagtgtccctggttgacaatactccaagcatactgtcacataccaatgctgggaaggtaacacagcctgactccgtgggagatgacaacaggagctttgcatttggagccctccagactctgccttaggcatttctttccttagctgactttgatctgtattctttccccataataaaccataactatgagcataatggctttcagtgagttctgtgagtccttccagtgaatgatcaaacctgagggtggttcaggaacctctaaacttgcattgatatcagaagtcttggacattatgccttcaaattttgcagtttggctaactgctgtaagtcaagaaaaaaaggaaaagaaaaacttttttttctccttcgctccctagtatttctagaaacaacaacaaaaatgaaaagcaagtaagcaaacaaaaatatgtgcctctatgcaaattaaaatcacaatgagacttcacaccaactaaaaaagctataatcagaaagacggatgataacaactgttagtgaagatgtagagaaattggaacccacatacactgctggtgggaacacaaaatgttgtactcactttggaaaacttctggcaattcctcaaatagttaaacatagagttgccgtaagatgtagcaactcccctactaggcatgtacccaagagaaatgaaacataatgcccacacaaaaaccggtaaatgaatatttacagttagcataattctaatagtcaaaaagtggaaacaacctaaatattcctcaattgatgaatggaaaattaaaatgtcgtatagtcatacaatgggatattatttggcaataaaaataaatgaagtattaacatgtagtacttcatatcatggatgaaccttgaaaacattacagtaagtgaaagataggatgaaaaaggctacatattatatgattccatttatgtgaaatatcccgaataggcaagattatagagacagaaacatgagggattgcttaggcttgggcggggcttgggaggaaatgggtcgtgactgccaatgagtataggattttggggggttgtgacaaaaatgttctaaaatttatggtagtgatgggtctacaactgtgactatattaaagacaatttattataagctttatttatttatttatttttgagacggagtcttgatctgtcacccaggctggagtgcagtggcgcgatctcaccgcaatctctgcctcccgggttcaagcgattctcctgcctcagcctccagggtagctgggattacaagcatacgccaccatgcccgggtgattttttgtatttttagtagagacgggggtttcaccatcatggccaggctggtctcgaactccagacctgaagagatccgcccgcctcagcctcccaaaggtcggggattacaggcgcgagctacctcgcccggcctattacgcacgttaaatcgggaattgtatggtatagtacgtgaatgagaccttaataaagctgagttgtttgcgttatttatttgttttgaacctgcttggtaaagatgaactctgaactcaatgaaattgaattaccttagtgattcctcaaaactccctgttaaggctttccggtcctctgaaaagcgaaagtgggccgtgaccatcttctaaaaacgccaaaaaatatggaatggagcccgggatttcagagcgtagtcgctgggctcccaggctgagcccgctccgggagcctccagccgccctttccgatgctccggggcctccgagcaacccagcgggcagtcccaagccgagggctgaactccagggaggagcgctcgtcacgcccacactggaggccgtggcaggcctggaaacccgccctgcggggtcctaagaagccattcgagctcccgaagagcgagtcttcgcagcccttcccggcgcgctcgcatctggcgctgtccggagcccgctcgcgacgcacagggacgggaggcccggtttccacgggagaggctgcggactgcgggccccgtcccgaggccgggggagtgggagacacccggcgacccccgagaggcgattctggcagtggtggcggtggcggtggcggtggcggcctactcgccccctggaagcaccgccccgcctgggtggcgcgcgcgccggctcctcctcttcccctccgccgcggcccgccccggcccgcaaacccaaacactccaggcgcccgcccgccgcgcgtgattctcgcctcgccgcmgcccagccctgcgcgccttgcccggcggcccccgcccggccgctccgggcccctggccccgcggagcgatgctgctgctggctgccgccttcctcgtggccttcgtgctgctgctgtacatggtgtctccgctcatcagccccaagcccctcgccctgcccggggcgcatgtggtggtgagtggcctcctgttgctgccccccgacttaccggcccgcgcggcctttccgccgccgaggccgcgyagcctacgtccctttttccaggccgcggtccccaggaaggcatggccaaatggggaaggtcacctgccgccgtccaccccggcgcttttcccccggccccggcacccggcctcgcggacccgccctccgcagcctcgggctcctcctagggccggagagcstgcgacgggggaccccgccggccgcrgggttcccggggccccaggggttctgtggctgctcgtgaatccatgcaacatccctgggatgtggatgttttgtcctcagtttttccgatgagtcaactgaggcacagagaggctgagaaactttgccaaggacacagcggtcggtggtgtgcagggtgcggcgcgcggccccgggcgggggcagacagcgggkaagtggggtcccagccgccgggacccgccgaggcagctcggaactggaagatggcctgtgcgagtgacgggaagagccgctgccagaggattccaggaagtgactcacctggggaaactgctcagaacccagcgggctggcggtggtggcttagcggtattgggacgcctgtcccgtctacactgcttgtctctgagctcagcgtggcatctgctgattgctgctccaaygcaatcctttgctgttttctagtgggaaggatgagctaaacgacaaggcttgtgtgcgaggaatgaaggagaggtggataggtgtgatttatttcttggcggaagctcgcatattcagcgatccctgttctgcaaatgtggcacctttcttaaacagagagaatgcctccttgcctgcgcccagcactttcccgtttgcagtggctttctcacgagcattctcgtttggatctcccaaacccgaggcacagtgaggcgaggagttaggagtaaggagggttggttacaaaattggccgcacacctcttcctgtcctatctctgcaccggagatccgagcctccccgctgagctggtataaaataagatggtcgtttttcttagtatgctttaaatctgtacaagggtttgtgaatgagaaaatgtatctgtttaatttctcctttgtaaagctattagctttttccaacacctcctgttcctaatggggaaagagtgtggattcattacaaaaaataaataagagaaaggcaaaacttgacactctaaattctgaaagttttacatccgcaagagaactgctgcctcaaaagcgtggctttaaaccttggatcctttcagagcttgagtttatagagcataactttgcaaaaactaaagctaaacgcagaatgaaaattggaattccttatttgtaagacagtttcactgagccttgactccagtccttccagccccatcccgcggcaggtcataggtgagataataaatgctgtgtctgttcaggtggaccaagaagaatttatttttaccatcccgctttaatacgcaggattattatttcacactctaagtaatgtgagaatgacatgaatagttcacatggtgtcaccatctgtcttcttttttaatgtcataagaagagtgaaaagtgtaattgttcttgagatttgttaggagttgactgtggtattgttgggagagggagctgatggttaaactgtctgcccatacataattaagaacaaacttataacaattgtttcatttttaaaacaattttatatactagtgttttctatctagttacggtagtaaaattgcaggaaaaaagcagaaaatcacccacctcagcctccgaaagtgctgggattacaggcgcgagccatcgcgcccggccaacaacagctatatttttacagtaatctgctgataactggctgattaccgaccaaataaatctcttcagtggtggcaggttgaagctaaaaagaagtaagggatgcctatgagtcccatagaggtaggtgcatttgcgtaggagacacttcccaatgatgttaaaatcctaacatggagtcagagatcttcctcccagcatgatttatgtataacagtgaatattaggaaaaatctaaatgtctggttatagggaaacgttgaagttttgatgcagctatttgatgaagtattgtgaaaccttttcgttttttgacaaataagacattacaatataattttttaaaaacaggagacaatactatgcaatattatgtaatttgcatagggacagtgactagaacgatatggccgggtacagtggctcactcctataatcccagcactttgggaggtcaaggagagtgcataacttgaggtcaggagttcgagaccagcctggccaacatggtgaaaccccatctctactaaaaatacaaaaattagttgggcgtgctggcgcacgcctgtaatccccactacttgggtgtctgagacaagagaatcgcttgaacctgggaggcggaggttgcagtgagctgagatcgtgccactgcactccagcctgggtgactgagcaagactgtctcaaaaaaaaaaaaagaaaaataatgttgcattgttcacttattcagtgaaatatataatatatattgagccctccccaggctaagtgctaggaatatagtggagaacagaaaaataattggtatttttaatggagtttatgggtaggtgataggagaggtggttgtgaatcagataatcacacaaataaatctagagctgtttattatgtgcatgtcataaagaagaaatacagtgctgaaaagtgtgtcagtgtgggggcaggggagacagtgaaggctttcctgaggaagtggtatttgagctgagatttgatgggcgagtaggtgtcagatgaagtggggagaagagcattcgttgcaagggaagtaggatgtgccaaggtactgtggttggagggtttttacagtaatcttctgctgataactggctgattacccaccaaataaatctcttcagtggtggcaggttgaagctaaaaagaagtaagggatgcctrtgagtcccatagagataggtgcatttgcgtaggagacacttcccaatgatgttaaaatcctaacatggagtcagagatcttcctcccagcatgatttatgtataacagtgaatattaggaataattccataattgaaagccagtatagctgaactgtagataggggtagaatagtgcaagaagagctttacttttcaggatttccttgtgattgtatattacttttatactaagcagtcatttcaaataaatattcaggtggccattcttttcatctgttgtagagctaatcttgcataaatgtgcattaagaaaataagattcaaccaacccaaatgtccaacaatgatagactggattaagaaaatgtggcacatatacaccatggaatactatgcagccataaaaaatgatgagttcatatcctttgtagggacatggatgaaattggaaaccatcattctcagtaaactatcgcaagaacaaaaaaccaaacaccgcatattctcactcataggtgggaattgaacaatgagatcacatggacacaggaaggggaatatcacactctggggactgtggtggggtcgggggaggggggagggatagcattgggagatatacctaatgctagatgacacattagtgggtgcagtgcaccagcatggcacatgtatacatatgtaactaacctgcacaatgtgcacatgtaccctaaaacttagagtataataaaaaaaaaaaaaagaaaaaaaaaaagaaaataagattcatttggatttggaatcagaggcagactaatgtattatttatgagctagacttatagggcacttttccaccagtgaactcagaaaaatattataggtgtgcaatttatggttccataagaaaacagtcaaagcagcaggccttgctgatagtatctttcatgcttacacttactccagtcattaagtttgggatgaagaagttaacaacagctaatcatttagttcttgtagattcattttaagagcctgtcatagttgttttttataaaaacttcctacagaggggagatttcaagtgctaagaatattttatgattttgttttaggttacaggaggttccagtggcatcgggaagtgcattgctatcgagtgctataaacaaggagcttttataactctggttgcacgaaatgaggtaaggcttctasgttcattattactgacttgcttcttcgacttgaaattagtcaaagaggctgtgctaaacatcttagcattcacacctagaaagcgcttcttccttgatgtgagatgtgtttcctgaactactgattctctctagtatttaggccaaacacttctctgttgaaatcaggtcggccccacaagtatttatttagtaccattggcatattaggcaacatcatcatagatactgcagatcctgagatgggagaggccaakgtctagttgaaggagcacacctggccattggaagccagggagggcccttggccaggtcagaagtgctggaagcagtgattctggagctgatacctgaaggtgtgtaggtgtttctctataatttttcactacgatttgcttaggacatgatatatatctctagtgaaatctatacaccatagaggaacctcgtccctccttagaagtttagcaaaatgtgtttttctgtatyaagtcaacacagaatctgtttttattttttgtcagggtttgtttttgtcttgccaaagttgtttttagagcacaaagcagtgacactgtgcacgtgaactgtcatgacgtcctcttgctccccatatggggactggaggaaagtgaccacacagctggctcgtccgctgcagcaattctagtgcttgacacgtagtacatgctcagacatgtttgttgaatgaagaaatgaagggaggaatgatggagtgcctgggaatgtcagcatggcatacttccatggggatcttggattcacccatgtgcaaggagggtgatagtatggtaactcctcaaatgggtggagggctggacaggacccattaggaatggtaggccaggaagggccttgggggaaaatttaaataatgtcgcagacttagtcttggacctctataatttcttttatttttttcttttttcttgagacagcatctcactctgttgcccaggctggagtgcagtggcatgatctcggctcactgcaacctctgcctcctgggttcaagtgattctcctgccttagcttcctgagtagctgggactacaggcgcccaccaccacgcctggctaatttttgtatttttagtagagacagggtttcaccatgttggtcaggctggtctggaactcctgaccttgtgatccgcccgccttggcctcccaaagtgctgggattacaggtgtgagccaccacacctggcctggacgtctataacttcttttgcaaaccaagaaagacaaaattagctaccttttatttatagcttgacttttctaacaatgaatttgctttggcattgaagccaccttacataaatgaaaacacaaatttgatgaaatggcattttgtgagttttaaacaccagttttgatgcaagtaaataaaagtggaggcagagaaggccagcatttcaggcccccaggagctcatatggggcccttgcattgctagaaatgaatgaactgaatgaagaacctgtggtgttgagtaattcattcttttttttttttttttttttttttttttgagacggagttttgctctgtaacccaggctggtgtgcagtggcgctgtcttggctcactgcaacctccacctccggaatacctgggattacaggtgtgtgtaaccacacctggctgatttgtgtgtgtgtgtgtgtgtatatatatttatatatatataaaatatatatttttattatatatattatatattatatatataaaaatatatatttttattatatatattatatattatatatatataaatatatatttttattatatatattatatatatataaaatatatatttttattatatatattatatattatatatatattatatatatatatattttttttttagtagagacagggttttactatgttggccaggctggtctcaaactcctgaccttaagtgatccacccacctcggcctcccaaagtgctgggcttacaggcgtgagccactgcgcccggcctcactgtgtcacccaggctggagtgcagtgacacaatctcggctcactgcaacctccgcctcccaggctcaaccaatcctctcacttcagcctcttgagtatctgggaccacaggtgctcgccaccatgcttggctaagtttttgtatttttggtagagacggggcttcaccatgttgcccaggctggtctcaaactcctgagcttgggtgatccactcaccttggcctcccaaagtgctgggattacaggggtgagccaccatgcctggctgagaaattctttcttttctaatgtaatttttaattccagtctttgcaaagtcaagctgtatgtatctttagtcataggacaatattatttcattatagacatattcaggtttagaaactctgcatgccttttggaagaattcgcctctcctttggttcctctctattgcatgatattatttaagttactttttacagcaaattaagataatmtgatatctgttttcttgagactaagtaaaacaaacaaaattaggaccttggaagaattacataattacacaggtaaccttgcttaagagtattttatagtagccaggcctagtttacccagtctatccagaaagtgattcttactatgtttgggtttatagtagaagaagaaaatattggacaaaaagcagtattgacagggagtcacacataccctcaactttggggagcagtacatattaatagagttgttcttgtcttatatcacaactaaataataagacatttattagaactgtagagtcagcctcagcaattagtactgttaactgggattttgaggtttatctgttttctactatctttctctaattaattttcaaacttttatcacttattcatagcttaacatacttcacaacttctttctttcataggctgtggcccagtctgtctatgcaatgtagatactgttttgtgtgttttctggaatttamtacrtacatatagaaataattgctttttttctctcctttgcaataaacggacatgcatatagacggtcatcacgactaattattctgtattgctttcaggataagctgctgcaggcaaagaaagaaattgaaatgcactctattaatgacaaacaggtaaatctctgtcttcagaatgcattttctgtataactcagcacagctgtataaaggaaaaacagagttacttcacctgtgaatagttaattgaaagcatatatgtactgttttttaaaaggtggaattgtttgaatggtctagtaactcagaatatcacacacacgcaaaatgaatagactcccacacacattcatatctacaaatggtcaaataacagaatgttttactggcaaataatttcattttaattttttttttaatgaactttatacaaatgcttaagaggaaaggaatatttaaaatttatttggttatggaatttttgatgaataaaatgctrtttatatttcagtataaaacataatarcaaattaataatcacacacccatcacccagcctaagaagtagaaatgatcagggtctctgaagcccccacagcagccttgtccctcttttcttgttcctagaggggcaaatgccaacccgatttttggtgttaatcctttctttttcttttcttttttctttcctttttttttttttttttttttttgaggcagtgtctcaatctgtcatccaggctggagtgcaggggtgcgatctcagctcactgcagcctcgacctcctgggctcaagcagtcctcccacctcagcctccctagtagctgagattatagacacgtgccatcatgcatggctaatttttgtatttttggtagagatggggtttcgccatgttgcccaggctggtcttcaactcctgggctcaagcagtcygcctacctctgcctcccaaagtgctggtattataggagtgagccactgtgccctgcctctttttctttttaattttaccatatatgcacataactctaaataataatatattgtttagttcttttttttttttttttttttttgagacagagtctctctctgtcacccaggctggagtgcagtggtgccatcttggctcactgcaacctccacctctcgggttcaagcgattctcctgcctcagcctcctgagtagctgggattacaggtgtgtgccaccacaccyggctaattttttttgtatttttagtagagacagggttttaccatgtttgtcaggctagtctcaaactcctgacctcaggtgatctgcctgccttggcctcccaaagtcctgtgattatgggcgtgagccaccatgcctggccaatatacttagttctacttcttttattatatcattcttattttttaacagctttatgagatataatttatataycatacagttgacccatttaaaatatataattcaatgatttttaatgtattcatagagttgtgcaactgtcatcaaaatcaattttagaatgttttcctcaccccgtgaagaatctccatgtgtattagcagtcacttgccatttcctcccagcctcttctcagctaggcagtcactcatctactttctttctctatagatttgtataacttccttctttatgcttcttatgcaacttgatttcttcactcaatattattattatttatttcttatttatttatttatttttgagatggagtctcgctctgttgcccagtctggagtgcagtggcacaatctcagctcactgcaacctctgcctcctgggttcaagcctcagcttcctgggtagttgggattacaggcgcgcgtcactacgcccagctaatttttgtatttttagtagagacagggtttcaccatgttgatcaggctggtctcgaactcccaacctcgtgatccgcccrcctcagcctctgaaagtgctgggattacaggtgtgagccaccatgcccagaccactcaatattattctttaggccaggtgcggtggctcatgcctgtaatcccaacattttgagaggccgagacgggcaaatcagttgaaggtaggtgtttgagatcagcctggacaaagtggtgaaaccctgtctctactaaaaatataaaaagttagctgcacctgtaaccccagctactcaggagggaggctgaggcaggagaatcacttggatctgggaggcaaagcttgaggtgagcagagattgcaccgctgtactccagcctgggtaacagagggagactccatctcaaaaaaaaaaatatatatatatatatatatatgtatgtatgtatgtatgtatatatatgtgtatatatatatataattttaaaaattcatttatgttgctgcaaaaagttggagtaaatttttttttttttactgctgcgtagtattctattgtatgtatagactacattttgttcatcagttcagcaattggtggatatttagtttgttcccagtatttttgttagtttgttttgttttttactattagaaaagctttcagtattctctttgtgcacgtgtgcaagaatggtacatacccagaaatggaattgcagagctgtagtgtatgcagttcttcaacctcaccaaagtggttaagctcccataagtaggaatgcggtttctgttgcgccacatccctgccaatacttggtwttgacagactttttactttttgcctttctgatgagttttgaatagtatttcactgtggtattcattgactttttcccttctagaatgttagagatctttccatgtgcattaagtaaatttgccttaaattgctgcagcctaggattgaagtacaccagagcttattccgtcaggtccctgctattgagctgtttccattctttttattttattttgtatttttatttttgcaattgcagtctgtgctgcaagtaaaaatccttgtgtatatcttctgcacatgtgagtttttctctargactgtggtctttacccccttctctgaagcccacaagcattggaaaaacaccagctctgtaaattgccccgttttttcccgtattcctgtaatatctgatagacgaaggagtatggtgtgaagtcatggagtcagtgttcagggccaaggccagtcttgcctgctgccaacactgtctccgctctgggcttcctcatcatgacaccttctacctcttcatctaccaaaggactttaggtcaggtggaaaacttacctttcacatcaaggaagggagatagggctggggcaggcgagaatgagcttgatccttctgccctgccaggcttctagggaccttttgtgtgtgtgtgtgacttgttaacatttttttgttctgagatttcacttgtctgtggcatagattttattattagtaactgatctaatactgcatgaaaaggcttgttttaaaattaatcatatgattactactgcctttttttttttttgagacggagtctcactctgttgcccacgctggtgtgcaatggcatgatctcagctgactgcagcctctatctcccagggtcaagcaattctcctgcctcagtctcctgagtagctgggattataagtgcccaccaccacgccaggctaattttttgtatttttagtagagacagggtttcaccatgtaggccaggctggtctcaaactcctgacctcaaatgatctacctgcctcggcctcccaaagtgctgggattataggcgtgagccaccgcgcctggccgattactactacctttaaaacaatgttttctatctgaggatgttgggataaaatccactctaggtatacattacaaccaagggcaacccctctagactagaatgctgcaggttatatttgcaaagagggctgtttccttttcttaggaattttgatcatttggacaggattccttcttgaaaggaatcagcactgaggcccttatatggaatatttccatcactccctagggttggcctgtgccctttcacagttccttccatcctccatgcctggctgtgggcaacccctgatctgccttctgtcactatagattagtggcatttcaagaggagcatttatatatttttaaaaagattcctcagagttttaactccaaaagctgccaagaaaattagattctgctaattgcatcatcagcaaacactgaaatctgttcattcaatattggcttccttctgtattcaatgaactgtcttttctttaaaaaatatctttaagaaatagtttggtacctgcaaaactttgatcactttttttcttttttaacaggtggtrctttgcatatcagttgatgtatctcaagactataaccaagtagagaatgtcataaaacaagtaagaggttgggctaattggaattcaccaatgtgcttgacttttgatttgttcttgccattttgctatgtggcttggaatggacacaacttctctrtaggtttaatasttttgtaaattttatttatcagcatggatttgctgctgagtggtttttcytctctgtttcttaatrcctgctctgctacatttttctaggcacaggagaaactgggtccagtggacatgctggtaaattgtgcaggaatggcagtgtcaggaaaatttgaagatcttgaagttagtacctttgaagtaagtaaaaatgtttgctcactgcagtagcacatatgctaaaagcagagcaagctacgggtaaaagctttaagaatcaattagatgaatgcattcagatgtccatggaagctttagaagactctagaggaaggctgaacaaggtgaagctgaacaaggttttcatcccagtgtcaggaccattgaagcttaagagtttagacattttacagctgagaaaaccagctaaaatgggaatggaccttctaatctgacacagattactgtagcagttcactgaggtcatattttcaagagaacactttgtaacctaagagatgcyggatgttcctatcaaacatcagtattattaacaaggagaaaccaaaaaagttgaaggacagactcactagagttctcaaatcaagataaaaagatactgcatcttattgatgtttctatttttaatcaggtttaccaaggaacttctcttggtaatttatttcagcaccaaagaaatgaacactagatttgaaatttttattttttctttttttgagatggaatttcactctgtcactcaggctggagtgcagtggcgtgatctcagctcactgcaacctccacctctcaagttcaagtgattctcctgcttcagcctccctagtagctgggattacaggcacatgtcaccacacccagctaattttttttattttagtagagatgggtttacgccacgttggcccggctggtctcaaactcctgacctcaggtgactggcccacctctacctcccaaagtgctgggagtacaggcatgagccaccaggcccggcctgaaatgtttttaaaatggaaaacgttttttagttgccatcgcatcaacaatctttttcttccttttttttgagacagagtcttgctctgtcgctgaggctggagtacagtggcacgatctcggctcactgcaacctctgcctcccgggctcaagcggagtgtcctccagcctcctgtgaggatgaagctggggagtrtgttggtgtcttcgtgtgcgccgtctagacagactttcccttaaacctctctctttatctagacttactatccctagaaacagaacctccagtctcctgccaggctggaagaggggtacagatctaccctgtggagaggggaaaaacatctaagatctaactgcctttttttttcattgtcctacattatttttttaatttgaagtgaaattcatataacataaaattaactgtttttaaagtgagccatgcagagggattcagcatattcacaatgaggtgcacccaccccctccgcctagttctaaagcatatgcatcacccatagggcggccctcacctggtaagcagttgctccccatccctgctcacccccacacccaatctctgacaaccaccaatctgtattctgtctctggtcatttcgtatgattggaatcatgatatgtgcacttctgtgtctgacctctttctcttagcatcagtttttgaggctcatccacatgtagcatatatgggtgcctcattcctttttatagggtggtgatattcctttgtatggatcgaccacattctgtttagctattcatcatcgatggccatttgggctgtgtctagctgactgcttattaaatagactcttagtccctactcctgtctcagccccatgccagcccacccttccctccaccccagagactcttgcagctggagccttttggggttctgtagtagaatctggctttttagtttctccactccccgcttagcatttagttttttgtggtctgctaagttagttatccctcctcaacctgttcttcagcttccaaaaggttattgctgttatttttattcttattttctttgttcttgtgtgttcttgccttaaaaaacatctctttacggagattttagtaaggtttctaaagggagccaaagtaaacacaggcgttcagtgtgacgtcttttttcagatattcttttagaactttcttttttttttggagacggagtcttactctgtcacccaggctggagtgcagtggctcaatctcgggtcactgcagcctccacttcccaggctcaagcaattctcctgcctcagcctcccgagtagctgggattacagttgcccaccactatgcctggctaatttttttttttttttttttgtatttttagtagagtcgggttttcaccatgttggtcacgctggtctcgaactcctgacctcaggtaatccacctaccttggcctcccaaagtgctgggattacaggcatgagccaccgtgcccggcttagaacattttttattatcaaaacaatattatgttacgaaaacacacttttggaaaaaaaagagaatcccagcatcctaactcagtcacttatgatcttctgtatttccttggtcttccctctgagcatgtgtacttttacttaacctttgaagtaattacagttacagcatatatacagtctagcttctgctttttaaacttaaatagcatagatatttttccctgtcactcccagtgtttctggtcatcatttaaaacaattatctaggccaagtacagtggctcacacctgtaatcccaacactttgggaggccgaggcaggcagatcacttgaggtcaggagttcgagaccagcctgcccaacatggcgaaaccctatctctactaaaaatacaaaaaattagctaggcatggtggctggcrcctgtaatcycagctacttgggaggctgaggcaggagaatcgcttgaacccaggaggcagaggttacagtgagccaagatcacaccactgtactccagcctgggtgacaagagcaaaactccatttcaaacaaatacaaacaaacaacaataaaaaaatctaatattctcttgaattaagatattatgattgtatgttcatgttctgttcataatatgaaaaaaaattatgattgayctcaagttccacaattgaggtatttagtttttatttacatgatgatctaatatttttacaaatatttgaatatttgaaacattttaatgcaagtattattaaattttcgagttaaaatttaaggtttttaagagctcaggctaggcgcagtggctcatgcctgtaatcccatcactttgggaggtcaaggcaggagtactgctggagcccaggagttcaagaccagcctaggcaaaataaaaggaccctgttactacaaaaaatacaaaaattagctggacgtggtggcatgtgcctgtagtcccaggtcctcaagaggctgaggcaggaggattgcttgagcccaggagattgagactgcagtaagccaaggttgcaccattgcacttcagcctgggtgacagagtgagaccccgtctctaaaaaaaatgataatagtaaaaaagcaaaaaataaataaataaaaattaaaagcttccaagacaaggagaaaatacactattagtactcttacccatcataatgggagagccagtggttcttgaggtccaggactgtgctagcgcttgtgttttctcttttaatctttgcaacagccctatgcggtcatacccttgttgaccttgtttacagccaagaaaataagtagaatgtctgactttcttattcatcatcaaataggcaataaatgggagacccaaggcttgaaaccaaaactttaaatcaccctcctactctgtgtttttcttatagcttagaactaatagggctacaaatacttggaacctctttcctaaaactgtctttcagaaagtactacccacaaacatgcagtatactttttataaggagaaaactaactttgaccagttttcaggaaaaacattaactgctgtcatggtcagaatgcaagactagactgaaacagtcttcaaatggtaggtcctgagtcttcaaatgctaggtctcaaatcacatttcatttatatcatcatgtcatcattcattcattcagcaagcctgttgggcttcccagtcacttgagcttgcattgaagaactgaaatccagaaagcagactaaattctccatgtgcacagccttgaggcttttgacctcatgtggcctctttgttccctgcagaggttaatgagcatcaattacctgggcagcgtgtaccccagccgggccgtgatcaccaccatgaaggagcgccgggtgggcaggatcgtgtttgtgtcctcccaggcaggacagttgggattattcggtttcacagcctactctgcatccaagtttgccataaggggattggcagaagctttgcagatggaggtaaaagttgtattcatttttgtatttattcctctccgctcagcaatatacattccgctttagttttatagcttctttacatgtgttgttgtattaaattagagatttttaggtttgacattggtgaaagagaattggctcaaccctgagttttgcagttaacatttttcattgcatgaagactatagttaacgacagatgcaaaatggtaatgggatttttgcttgtttaacttaatacacaaaatattagtgatatcttcatagtgttattagtctaatactgtgtgaatgtgagtaaggttaaccagatattttattttatagagatttttctttaacaagaagtttgtccttatgactgaataatacrtgaaattagtatatgtttgagggaagagcttgaatcagctgctaatttttagcttttagacaagtcatttaacttgctctcagtttcctcatctgtaaaatgggagggttggaataaagcaataatttgactctcccaatatttatatttttatatcttaaagaattgttgggaaaatgaatgctttttatttacatagttaatggaacattttgtggaagaaggatgtagttaggatttgcatcaaaatagcgtctgtcatgatgagtgcaactttacacctcagctgcttgaagccgacttccacattattgtcacacaggaatgcttagagagcatcacatacgtatctacccaaaaatcacatgctgaaaaaggcaagggaaagttctttctattgctgtgtacagtcrtcccctcttatccgcaagggatgtgagctaagacccccagtggatgcctaaaatgttaagagcccagaagagtattcactgtggccaaccctcttatagtaagagtgtgcttttgggaatcctggttgatgatttagatcaggggttgacagaactttcaccaaagggcagacagtatatatgttaggttttaaaggctgaatggtgcctaatacagctacttaagtmggctatgatagcaggaaagcagccttactagacaatgtgtaaatgaacaattgtcactgtgttccaataaaactttacttataaaaaacaggcagagggccagatctggctcataggccataatttgctgacccctgtttagaagaccccataagagaccttgatggtgtgtgatagagcaccacattggtgagatatgggacgagcgttgcagtacagatgagctgctgggacagcgacagtcctgatgtgccgcgtagggactgatagaycatgccattctcataccataggaaccagccacagattttattgttatcaactggcctaatactcttaataatatatcgtgataatatgcttagccaataggacactgatgtctgtgaaatttcaaacaagaatactggtgtttcttttgaagtttttaactttgaaaagtccttttgtgaataactgttttatttatttttattttattatttttttttagagacagcgtctctctttgttgcccaggctggagcgcagtggcacaatcatagctcactgcagccctgagctccttggctcaagtgatcctcctgtctcagcctcccaagtagctaagaccacaagtgcacactaccatgcctggctaatttttaaaattttttgtagagaaggggtctcactgtgttgccaaagctggtctcaaacgcctaagctcaaacaatcttctggctttagcctcccaaagtgctgggattacaggtgtgagccagcacacccagccaccattttataaagttttgtaaagtatgtgagggagatgttgtgatgccacctgatgagaggaaaacccagttttcagtaaattcagtgtgttgctcaaagtcacatagttacttagtgacagaaatcacaacacgatccaagccttgaccccaggtctgctgcccttttgcagcagatgatgcatccagctagttgcttcacctggctagttgccccggccctttactttggttttagaatccttgtaggtgaaggggtggttgcgggatgaagaatctgcccattagggctttttgcagagctgtgtcagcattcactaatttagagcaaagtatataatctgggtggcctggtttcacttcaagtagaacagagatgctaaaaaagaggaaaaagaaagtggattgctggtacagacagagccccccaacctctgtgacaagtgtgatttgcatactgcgagtagccggcctgcacgctcaagtctgtatgacttctgtccttatttggactctattaaaaataccctcacttaaaaaaaagaaaataaaatgaacttatcccatgaaaaataggttctggggaaaacgaacgcagtcatcaaaatgtagtttgttcgtagtagaacttgcatcaaaccaattattgtgtccctacagtaattatagtagcattttttttgaaacctggataatttggtcaaggtaggtgtgttttctgtcaatgaaatcttatgtaattgctcaaactccagatactttttttttttttttaatttttattttctgaagacagagtcttgctttgttgccgaggctggagtgcagtggtttgatcttggctcactgtagcctccacttcctgggcccaagcagtcctcccacctcagcctcccaagtagctgggactacaagtgtgtactaccatgcctcaccgtttttttgtttattttttatttatttattttttgtagacatggggtctcgctcgctatgttgcctgggctggtcttgayctcctggactcaggtgatccacctgccttggcctcccaaagttctgggattacaggaggtgtgagccactgtgtctggcctgtaaatatttttgacaattctttggtttaattaactttgaagtctccctgtccrcctccctttgcccccaaactaaggtaggaccctggcattgttaagggtactatgagtaattttaaaagaatgctttgttggcattttttagtcttttttttttactcagtcttttaggaagaaaggtaaagattttaaaagttactcttttggaaagcagacttctgaggtgggttatagctaaagatgtggtagcagagaccaagcccaaaaaaaacaaactgatgctcccttttctgcttttcttaccctgatcatgcccctctcctcccatctcttccttctgtggtctgaaagtaagctaaagcttgaattctggagtttcatgtaaacagctgtgatcttctttccagcatcccctgtctttgttttgatggaatagggaacagcacatcctatgtggattattttaataacaaatctgttcttttttttttttttttttttttttgagatggagtctcactctgtggcccaggctggagtgcagttgtgtgatctcggttcactgaaacctctgcctccctggttcaagcgattctcctggctcagcctcccaagtgggtgggattacaggtgcccaccaccatgcccggctaatttttgtatttttagtagagatggggtttcaccatgttggccaggctggtcttgaactcaggtgatctgcctgcctcggcctcccaaagtgctgggattacatatgtgagccactgcacccggcccacaaatcggttcttgaacaagtggtcagttgtctttctgtttgaggttgaggccagggagaagggaagaagtaatagtaggatggrtgtggggcagagtcgggggcacagagaatggtcaggcaacagggatgaggagaagcagtggccgggcagcaggggactcagttagtgaggacctggctcatccattcttagaaagagtggtgatctcagggagctagcattgtctcataagaacaagtaaagccagcctaccctcatttttktttatgacagggttatgagattggtagattaaaagaagatgtagatgtggtttagtatattcagattttagcaaattatttgaccaagagtttcaggaaactagaatcttaaccttatgctttgttcttagaacgatactggcatgtagaagtaattcagtaagtgctcgttgttgcatgaataaataaaataatatgtaaatggtgaggtgactagccactggaggtatccagccagagactgggagagtcatttggttggatggcatagcgagaatacyaatctaggaagcgactggactggtttctcccaaccccagctatctgtgttccttcctcatgaggaagctgttctgaaaagctctgttttaacctttggcaatgcagccgtaaccttgagtttgagaagcactgctctgaaatcctgtcttccattagctttggagccagcatccttctttaccatgagagagaaggcagaggggcagcacagacgtgagtttctgggcagtcgatgtcagtctttatgtgggctgcctaatgaccactcgttggattttttgtggtgtttttctctggtctatgcacagcagagggcaaggctgggggagacaaggtttttataagtcactatctcaaaaacaagtggaagcgagtttctggctcatctgccttactacctggccccgatccagagctatttatgagcatggctgggccgtgaagctgcatgccctggcaatgcccggtggatgggctgtcccacaccctaattgtgctggaatggaacccacaaagacatctcactttcacgactgcactttccaggatggctggcctggatcttctgcttgcaggcctgtgcgtgcttctccttccccttgaagctccccttaaagccctcaaaactgtgcttcactgaaggaaccagggcgaaaaagggctgcataagatgagactctgggctactgtttttatttttttgttgtttttttgttgtttttttttttgggatggagtctccctcttgtcacccaggctggagtacagtggcacgatctcaactcactgcaacttccgcctcctgggctcaagcaattctcctgcctcagcctcccaagtagttgggattataggcacccgccaccacacccagctaatttttgcatgtttactaaagacagggtttcaccatgttagccagactggtctcgaactcctgacctcaggtgatccaccccctcccctcggcctcccaaaatgttgggattacaggtgtgagccactgcccccggcccctgggctactcttaaaggccgtcacattaggcagtggtgttgatttttagcctagggtacccttctgaagatgtgcagtggctgatctatcagctgcctctccacttccagatcccttaggtgtttcctagggacaaaaaagtgagccaataccaaataaaaatcatggcaaagagattttcatggtaggaaccattgctcttagagttgctaattagcagggcaagataagcatgtgcagcagggctgtggctgagcagtctgtgggagggggtgtcctggccaacagcagaagaatctgctggaattgttgggggtgtgtgtatgagtggggtcgtgaagcgtgaagtgtgcaggcatggtggtgaggcacacaagtgtaacaacctgctccaagtgtcagatttagaggagccacatagagtttcagataaggcagagggctttccctatgtgaatgcaggttgaggttgtccacaggggaggtacttggctggtctgacttggaggttctacccagtggttcytgttggttcagtggaggaggaagtgactcttgacctcctaatgtgcagaggccggttatacagggagctctggaataagcagacttctcagggacagttctggactgggtttggagtagggcacaagaaagggatagggcagcagattttaatgaccccaatgtattttgtggatgaaatcaacacaagagtatcagaagcagtctgaaggaaaaacagatgtacagtctggtgaagaaaggaggggcagactggtcccattgccttgataaagggcttggatgctgtgcagtgcgtgtgggaactggactctttttaaaacactgccctcgtcggacggctcccagggcctctgtctgggcagcaggagtggaagacactgcaaaggaggtgacttgccatactttagggccagctgttttctggggtcyaggttagggtgagctttttgcctacattctggaatcatcatggagaggggtttctcaatgcaattggtgtagttccccgcctaacagaatcaccccattgttctcamcgctttttgggaatcagggcagccagtgcaggttggcagtgtaggacctcagtgtgtcttgtttactgaaggtacacgtgttgttttgaaatgcaggtgaagccatataatgtctacatcacagttgcttacccaccagacacagacacacctggctttgccgaagaaaacagaacaaaggtcagtatcctacatgtcccaatttgaacctctaatgtttactgcttttctgattttctttctactcttcagctcacactcgttttcaccaatcaacaatgtttgttgggtagagtgcctagctggtttctgatgaccttgagattctccaggcaaatattccttctttccttcctcttttccctcactttattttcttaaagtttaaatttctaccagattttttctctatagagacagggcctcactctgccatccaggctggagtgcagtggtacaatcgtggctaactgcatcctcaaactctcaggctcaagcaatcctcctgcctcagccacctgagtagctgggcctacaggcatgtgccaccacacctagctaatttttaatttttttgtagagatggagtctcactatgtcgcccaggctggtgtcaaactcctggcctcaagtgatcctccctcctcagcctcccaggtgctgagattataggcatgagccattgtacccagccatttccagcacatttttatcaaagaagtatgtcacacagttttagagtccaatatcaatcctttgcctcatctctcccattcccaattcctactccctagaggtagccatttattttaactaacatgtttatactgctttttttttttttaagatttagaaattatttattgactttctaccgtggaagataaaatttaagaccaggccaggcacagtgtggctcatgcctgtaatcccagcactttgggaggcctaggcaagaagatcacttgaggccaggagttcaagaccagcctgggcaacataacaaaaccctgtctctacaaaaaatttaaaaattagccaggcatggtggcacatgcttgtagttccagctactcaggaggctgaggtgggaggatcatttgagccagggaggttgaggctgcagtgagccatgattgtagtactgcatttcgacctgggtgacagagcragaaccaatatctaaaaaaaaaaaaaattaaaattaaaaataaaaaaataaaaatttaaggccagccatggtgtctcacacctgtaatcccagtactttgggaggccatggcaggaggattgattgagcccaggagttcgagaccagcctaggcaacatagcaagaccctttccctacaaaaaaataagcaaaattagaattgttccagctactcaggaggctaaggtggaaggatagtgtattagtccgttcttgcattactataaataaatgcctgagattgggtaatttacacgtaaaagaggtttaatttgctcacagttccacaggctgtacagtctgctgcttctggggaggcctcaggaaacttacagtcttaggtaaagggaaagcaggtacgtcttacgtggtcggagcaggaggaagagagagaggggaggtgccacacacttttaaacaaccagatctcgtgagaactcactcagtatcacgagaatagcaagagggaaatccacccccatgatccagtgacctcccaccaggtccctcctccaacattggggattgtagttggacctgagatttgcatggggacacagatccgaaccatatcagatagtttgagcctaggacgtcgaggctgcagtgagccaagattgcgccactgcactccagcctgggcaayagagtaagaccttgtttcaaaacaaaaacattaagactcatatctgttccccaktccctgtgtactcctcccatctctttagttaaatcaggtttagtgctcatattaatattatgcacacttggaccattctatagtgacatttcctttcttgccttttcatttgcttagctttgtaattatctataactaattcagtcccagattcaaacagaactgagattctccttttgatccatgtgagcacattggacattctattagattcattcttttttcctcagacatttctcctggggtcgtccccgttcctggtctgttctagttctgccacccagcggtggtgtcaggacttgtmttcacctcacactgcacgttcccttctcccctccctttgacggagcccatgactctcacttttttggtttatctgctcattttggyggagctataatattttccaccaattttctgagaaagggcacatcagaggtaatattgttttagaaacaacatgtctgaaaatgcctttatttttattttaaccttttttttttttttttttgwgatagagtcttgctctgtcacccatgctggagtgcagtggtgcaatgttggctcactgcaacctctgcctcctgggttcaagagattctcgtgcctcagcctcctgagtagctgggattacaggtgcgtgccaccaagcccggctgattttttgtatttttttttagtagagacggggtttcaccatgttggccaggctggtctccaactcctggcccactctggcctcccaaagtgctgggattacaggcataagccactgtgcctggccatttttctttattcttatgtattgttttgttaagtacagatttctagtttggaaataatgtttcctcagatttctgtgagcatttattgatttccagcttccagaatttctgtggaatccagtgctattttgattcccaaccttttgtatagaacctgtttttccatttatttttggaaaccttgtgtccctttttatccttatttaatggattttggcatgaaatcttctcatttcatatgagcccttttattttatcaacttttgttctgggacattttattatattactccttttatcacttctttcttcccaaagtatttcaagtgttcattctctctggagcatttattattcagatttttgaactttctggactgatcctctaatttccttctattttctctctctytttttttttaatctcttgggccttttgttctcccttctaggtttttattcgctttatccttaaacctttttgttgaaatctttatttctactgggttacataaaaattactttagatctcttttctctgaatatttaaaacagtttttaaaaatagcttcttgccttatttcatggatttcatattttctcttatgtctaaggatattcactctggatgtttagccttgtttttttgttgctgttgttttgtttgaaaatttcttctatatcttgtattatttatttcctcctactttctttttctctgttgttgttttttccggcttcctgaaatgtctgttgatccttgattgtccatatttaagagtgatgcactaaaatgccaattgtaaatctctagcttctcagctgtttactataggatgatcaggaggggatgcagccacttcattagaagattctcatatgccagcatctgctcacttttctcatggtttgatcagtttccctactgaggaatcatgtcttcttctgcctttgggagagtaagacttgctgtctgtgttgtgggaggcaagcagggcaggagggctggggagctcaccacctacgtgccaacttttgcttaatttttctgtttctacaaagtgccttataactactcttagtggtgagaattaagaatctggttagtaaattgctaatcttttgccatcgtagaggagatgacttggggtctgatgatttgagtctccattgcacttatcacagcttataacagaagcttctcatagcacttaaaacagacatatcttttatataaaatgactgccagtcatcctgagctgaatataagcttcacactttttcaatggaatattccctttgccttgacacatagtagttgcttttttgagcaaatgaataggtgaagcgggaagaaaggaattaatcagaacttaccaccttgaactgtggccaattttagttttatatatttttttctcttttatacsaatactttgtaaatgtgaatctctgcagcataaaaattggcacttaaactccctagactgtatatttgtagaaagatgtttgtgatttaggttttttccccctattcttttctctttggctctgcctttttaaaaattactgctatttcaaagaagtaaatttaagccaaatgtcctgtcttagaataagcagagatcttctaagcagctttgcaacattcggtatgcagtcttttagtttgaagccagagctgacaaagggtggtgatttccctgttaaggtttgattctgatgttgattaagttggggttttttcagtaaaattttgggcagacttgttgggggtaaatacaattctacattgatgtgtgggccctttagggggcgccatagtactttagaatcttatgtgtatttagtgtggttatgccagcctgggggtctggaagaatgaatcgtggctccttcaaaacagcctttctcttaagaaaggttcataagaaatacttgatctttatgaaatactttactttcctattttaagaaaatataatctggtttttattttctttaattccttcaagcttacgtggtaaagtttacagtctcatgcagtttaaggcttttgtttgacacttctacttgaaattatttgacacttctaattgaaactaactgaaataatttttgagcacacatatgcaagacatcgcaaagaaaagccaaagataaataatttcttacaaaaaaggccctgcccacaagaaacttaggaggtaaaatgcaaatgcacaagtagctataatgtgtattaaaacagaaatgttcacagaagaaagagagaggttactgccagttaggtatttarggaaggctttttgagttaggtaagagttgagatggaccttttgaggaagaaaaggctaagatttggggtctgcagctccagcctggtaactagcatgcagcccatctagggaccactcagggttatctcctaagtggctccttctgtttcagtgtcctgtgcatttgcctcctcagcaagtcctttaagaagcatctgcagttgttgaatgggggctgggttgcgactgtccctgccttgggcgccaggttcatccccagggatcagccctctgctgacctgggaatatggtcagaatggagttgctggtcttgggagcaggcttgctctggacacaggtctagcctctacagaaaagcaccatcattcaggtgtccggccagcactgaggagtcaaagggggtctttctgaacttgtatccagtgatgtgttctcactctagctttgatggtcctcagtggagccaagactccgtatgttctaagagaatggcaaaggcctccttgtcttgtgttagctactgggtagaattttaygtagtaactaggtagacactgatttagaatccagatggaccttattctagaaataggaatctgcccaaaggtagaaaattggaattatttgtaaatcaggaggctgtaagaataatttatttttaatgtaatgggcaatcatgatattgttatgtacatgtttttccacttttagcctttggagactcgacttatttcagagaccacatctgtgtgcaaaccagaacaggtggccaaacaaattgttaaagatgccatagtaagtaaaatccttgttttctgtactatttgtgtttgtagtactatatttctgaaaagatatttgtccaaggacttacttcaaaacatcaattattagaattttttagtctgtcagatttgtcatatctaatattggactcaacttttcttcttttagacgctttattgactccatattagtgagtagcctcctgaaaactgattgtataccttaatctgaggaacaggtttactagaaggatgtctggaaacaccggttctttaaaaagaaaatgagactttcctatgagtgtaaacgatatatactatgtcccatatacacctggctgctttctctcccattcctgcttcccagtatcattttcccaaaagttagctaacgagaaagtgccaccagccccgtgggcctgtcctcctgtcttccctgttgatatgttttttaattcagaatcaaaaatggtattttaagaaatgatgtgctgttttgtagaagaacaacatatgtgcctcatgctttttgacaacatttctgttaatgcggaaaaatgcacatttatgagggatgtctgtaaaccacagacccacactgaatttggaaaatctataggaccattggaatgagaggtgtcagcacatggtggacagccttgaagtggcctaaatgctgtcacattagactgaactgagcagaatgagaatagtgaattctgttgaaatatatacatgtgtgaagaactttgtcctgagtgcattaaaaggctcaggaagatggcacaagtgagactttatttttcctgcttatctcgggtcaaagcaaatgcatttggtgttttttgttgttgttgttgttttgtttgtttgtttgttttgagacggagttttgctcttgttgcccaggctggagtgcagtggcacgatcttggctcactgcaacctctgcctcctgggtttaagtgattctcctgcctcggccttctgagtagctgggattacaggtgctcacaaccacacctggctaattttttgtatttgtagtagaaatggggcttcaccatgttggccaggctggtctcgaactcctgatttcgggtaatccgcacgcctcagcctcttggccaaagtgctgggattacaggcgtgagctccgtgcccagcccattcagtgtttctaatgatgctaaatagctcttagtattttggcagtattcatttagtttagtggttttcaaacttttcttctcttgaccactttacattcttacaaattgtcaacaaccccagagaacttttgtttatttacatggctatatttattgatatttgccatatttgaaatggaagctgtttgtaatatttattgattcattaaaaataacaaaaatggctgggcacagtgactcgtgcctgtaatcccaacactttgggaggccaaggcgggcggatcacctgaagtcaggagttcaataccagcctgaccaatatgatgaaaccccgtctctactaaaaatacaaaaattagtcgggtgtggtgacatgcgcctgtaatcccagctacttgggaggctgagacaggagaatcgcttgaacccaggaggtggagactgcagtgagctgagattgagccattgtgctccagcctgggcaacaagagcaaaactccatatatatatatatatatatatattcacatatatatatatatawagtcacatatatatatatataaagtcacatatatataaagtgactttttttaaacaaaatttactacttttcaaaacaaaagttcagtgaggacrgtggcattggttcacattttcaccagttgctttaaggtctgcattaacagctggattcaaatagctgcttctgcattccatctgttgtaataatgttgttttgatggaaggatatacagaaaatctggcctgagacagatacggagttgggaaagggaagactattttactaggcttttcagataattatggacattcttttttgatatcaaacccaaactcaacaaatggtagtttcttaaaggttagttgcagtatagaattggaaactacatcaatgaatgttttgttctctgttacattaaattccattggtccgtcttgtactttgaatggatcttttaaccattcatgatttcgtaacattatgcattagtcatttggaaaatatgggttgactgagtgatcagaaaaatcgctttcatcagtattactgctgatcttatcataaaagtatgcagctgacagtctcgtgatggtggatactagtttttccaaatcttaattttttcttgaaggctcagatttcacattgatgacacgtggccagttgtttttcctgaagtgacacacttgcttgcttcgctttctgcacatctgccacatacctaagtctgaattactatagatttcctgtcaatggtctttcatataaaaattatgctctccagccaggcacggtggctcatgcctgtaatcccagcacttttggaggccgaggcggctggatcgcttgagctcaggggtttgagaccagcctggccaacatggtgaaaccccatctctactaaaaatacaaaaattacccrggtgtggtggtgcatgcctgtaatcccagctacttgggagtctgaggcaggagaatcacttgaacctgggaggcagaggttgcagtgagcagagatcacaccactgcattccagcctgggccacagagtgagattctgtcgaaaataaataaataaacaatacaaatgatgctccatgaaagaagtggcagtttagcccttgacttcaggagctgcacaaggacttttgttccaggcagttgtcccgccctggaatgcagtgctgcggaagcgcgttgggcgcattctcatttgtcacacagagtattaagaagacatgtcctcgagggttgccattgaacaaaatgatgaattttcctgctttatcaagaggattttaaagcaaaactgacactttgatttttaaaagaattttagaacttgtattttctttgtgtattatttattactgcgagtgcgtgtggtagtagaggtgacaatgactcctagtacagtttggcaagaaccccgtggttcttgcccatgtctctgcagttttgcagaggcaaaactgtattttccatacaacacactgtggaaaagacaatgaatgtcttagtgttattaggacaatcatttgtccttgggggcccgcaggggtccgtggactcacttgttgagaactgccatctgccaaggccgtgcgtccatttctgagtgctgatcaatgctttgtgaccattttatctcacttaaagtgaacgagcacactccactgtttctgatgtgtcygactgatttctgtccacattactaggattccctytttctcttctttttcttctcttttagcaaggaaatttcaacagttcccttggctcagatgggtacatgctctcggccctgacctgtgggatggctccagtaacttctattactgaggggctccagcaggtaagctctgcctaggctagcaatcagacaggccgatggacaagagaaaaactgcctttcatcaaaccttgatgagaagaggttaagggaaaactaagtaactttatttgacaatgtatttttatggagctatcaacttttcctcttcctccaccaggaatgagtaaataggttaaagatataacttcaggaatttagaatggcaagaagtcttcagtgccgggccttgcagatagagaaataaaacaccgtatctgctgttgaggtgttaacctggattttcacctaagaaccactgctccaatgtgttttgaaaatggaatactcctctagagtaaggggtagccttgcttaaaaagtactgggatattagactagaaaaccttttctaggtgaatcaggtcacacacagctaaatttagtgagacacgaatcatggattaaacagttgcttcgcttatagaatgtattattttgtccaagatacacagtgtttcattggtgtgctaggcactgtacttgctcatggggaatcagatggaaggcgacctctccagcttcaggggcwtacagtcaagtggaatgcactgaccaaaaaggtgatagtagtccgggcgcggtggctcacgcctgtaatcccagcactttgagaggctgaggtgggtagatcacttgagatcaggagttygagaccagcctggccaagatggtgaaactgtttctactaaaaacacaaaaattagctgggcatggtggcggacgcctgtaatcccagctactcgggaggttgaggtaggagaattacttgaacccgggaggtggaggttkcagtgagccgagatcaagccactgcactccagcctaggctacaagggcaaaactctgtctcaaaaaaaaaaaaaaagatagtagtgcagtgtaatgaagtaggggttacaatagagggaatgctctggaaagacaaagccatgggatagttgttaacaagtactaaattctgtgcagtcaaccacattcagacttatataaatgacttagttgttggttttcttcagggtctttcccaagccctcttttctyttcattctgtaatgtacctactgtctttgccattctcttagaggttgacactgtgttagatgtaagctctttgaggaccaggcccacacctcttgtttgccgttgtacccctaacagccagcgcctggcacttagtaggaactccagaatccctgagctgaacaaatgcatgaattcttttatgttttaatttttgggctggcatggtggctcacacctggcgtgttgtcctggactcccctgcttctgtccctcacgtcagagatcattgtcatccttgtcactcagttcttcamattcttccattctctgcaattctggcagtgcttctggagcccaggcctgggttgccgcagcaggccccctgcttgagttacacactttttgagccagaggttgtaaacgattcccatgggcctgtaaagcagttttgttgggtccatctggtgtgagtgtgtgtgtttaagattttaaaatagttttaaaattaggttttatataaaaggtccagatttcagacttttcttggaaaatcagaaggtttagctgcacagagtctgcattcttacctggcagtcatcagcaagcacaggtggcagctgctcctgagggaggagcacagtcyctgcaaccactatggtctgcaaccccctgctcaggccccctggatgcrtttgagtgtaccctcacattttccacaccagttgtttctaaactgcaactatacattgcatgaaaacattcaatgactccttgataccatcaggataaagctttaaaaattccattgcacctgagtatggtggctcatgcctataatctcagcactttgggaggccaagtcaggaggatcgcttgagctcaggagtttgagatcagcctgggcaacatagtgagaccctgtctctacaaaaaaatgtaaaagaaaagaaagccaggcgtggtggtgtgtacctgtattcctagcaactgggagacttctgcttgagtccagaagtctgaagctacagtgagctgtgatcatactcctgcactccagcctgggtgacagagcaagaccctgtctctaaaaaggatttaaaaattaaaaaaatttccatcgcatgccataaaccacctgatctcctaccccacgtacctttccaggctcttttttttctttctttctttacccatcttcttctttttggaatcttctctgtgtcctgccaacttctaatccttcaggtctcaccttaaatattgttttttccggaagatccaaggactggcttcagtgctctgagggtgtagggaaaaaaacaaagggatttttctattctcttttttttttttttttttttttgagacggagtcttgctctgtcacccaggctgaagtgcagtggcacgatctcagctcactgcacgctctgcctcctgggttcacaccattctcctgcctcagcctccccagcagcttggactacaggcgcacaccgccacacgcggctaatttttttgtatttttagtagagatggggtttcaccgtgttagccaggatggtctcaatctcctgacctcgtgatccacccgcctcggcctcccaaagtgctgggattacaggcgtgagccaccgcgcccggcctgatttttccattctcttatgcacggggactcatgcctatggtcccagctgcttgggaggatgaggcaggagaatcctttgagtttgggaggtcaaagctatagtgagccgcgttcatgccactgcactccatcctgagcaacaggatatcagtaatcacgggtctcaaccctgaggcagtagtttcaattttacttgtctttccagcctgagaataagctcattgagggcagggactgtgtctctcaccacagtgttcacagcacctagtatagggtctcgctttcatgctcagaacataaattgcaaaccaaaaaagccttgattgtagtttggctatttgagatgctgcagtgggtctttttaaagctattataaccctaagactgcaagcaatatatattttattctgcttatggtttgaatttattaattggacaaatattttgttatgtatctgggctgtccagcrgtgcagagcacacacattctgttctcacagcttactgacatttacagagttttcattatattcatccttagagcagactagaagatttgtcttagaaactgtttgttagagacctaggtaccttgaaatagtcttgtaccgttggatgcactaaaagctctctctttatcttgcaggtggtcaccatgggccttttccgcactattgctttgttttaccttggaagttttgacagcatagttcgtcgctgcatgatgcagagagaaaaatctgaaaatgcagacaaaactgcctaatcttcttaccccttggaagaagactgtttccaaataatttgaacagcttgctgctaaatgggacccaatttttggcctatagacacttatgtattgttttcgaatacgtmagattggaccagtgctcttcaggaatgtggctgcaagcaaggggctagaagttcacctcctgacagtattattaatactatgcaaatatggaataggagaccatttgattttctaggctttgtggtagagaggtgaaggtatgagaattaatagcgtgtgaacaaagtaaagaacaggattccagaatgatcattaaatttgtttctatttattcttttttgcccccctagagattaagtccagaaatgtactttctggcacataaagaaatcttgaggactttgtttaaaccttccataaaaaaacaattttcggtttctcgggttctctctctctctctctctgtctctctgtctctctgtctctctgtctctctgtctctctstctctctctctctctctctttctttctttgtgtattttattcaagatgagttggacccattgccagtgagtctgaatgtcactgacagccctgtgttgtgctcaggactcactctgcygctggtggaaactcatggcttctctctctctttgatcccataaagctacgagggggacgggagagggcagtgcaatgggaagtaaagagatattttccagtaggaaaagcaatgctttcttgtctttagactcaaatgcttagggaacgtttcatttctcattcatggggaaaggcagcctccttaaatgttttctgaagagcggtaaaatctagaagcttaagaatttacagttccttcaataaccatgatgacctgaagttcacctatcccattttagcatctacttgtttttcccatctcttcctttccaattttgcttatactgctgtaatatttttgtaaaaaaaaaaaaaaaggaaaaaaaagaccagctaaaatttycgacttgactttttaacttaactcatgaattaattaaagcaaatgaaaaaattaaaaagtgtgactttttctcggagcatatatgtagcttttaggaaaggctgatgatggtataaagtttgctcattaagaaaaaaagacaaggctgattttgaagagagttgcttttgaaataaaatgatcacctgttctttatgtgactctcccactgaacctgcagacattatttttataccacrtgctaaggaagcccactcatctaactctgtagccctggaaaccctcttggcccctgaatgttgtttccaggttataggatctgtgttcattagtggattttgacagcaagtgcctctgatgagttttagccaacattccccgttgcatcctgctcattgttcacactcctctgacttgaggagagctgccttcaccttgatcttgtaacctgtcttccttgcatatacggtagcacattccagatcacttcggtgagaaaagacctctgtttttgaagaggaaactttcttaaattgtaaaataaaacttaaaaaacataaaaactctatacaaaaattgaagacctaaaaattatagcataccttttttttgctcttgagtttttgaagctcttgactttaaatgacttaactttttaaaaaataagatgttttatggctttaacccatgtttttattaagatctgagaatagcatattttaaacactgatagatacagaagaaattattatttaatatataaattgcttggaatgatttcattgcagcttgtaaggatgggttgatgccagaatggtttcataaatctttcagtcttacagagccaaagtttgcagattatatcgagttgcgttgtgcagctgctaaaatggaatcatagctttttataatttgcagaaaacaattgcattaatgtctggatgtttctcagttttattcttttctcataaatgttcctcgaatgttggcaccttctactgctgatctatattagaatctagtccaagaaagtgtctgatttaataacattaaatagttatttcaatatattttttcaaattatcctcatagaacctgttgcctccagtgagatggtaatctactacccgaataaatttaagagcacctgttgagagcccctgttttgcggtagaagacaattgtccctatcccaatttccactgaaatatgagagcagatttgcagagaccatcatgtcagagaagaaatttccttgtcagagatgttaaagggctacagtcccttagcaaagaaacttcgaaatctaagttggtttgtgtttttctaaatttgataccgtaattcatttggcagcaaaatctgacttgaactgatgtgagagtattgtactttatatttatgctacttcattgtgacttaattttccctgaagaaatatccatggatttgattataggttttcccttagatgctgtggaggtgttttgtaatattcaaaatatgcccatattgcctttttaaaaccccaaagattatgaattctgaaacacatccagcccagcgggttttggataaggggttgtaggcatttaagcagcctcacataatgggctgacttcatccaaaacatgaaaatattacaaggcaaattctattttttatattttttggttcaatgcttgaacaacttgtttttctgctgggggaagaaaaaaagaaccaaccctgagtgtgattgttacggaaactaatgactttgtttttaaaggatcacattgattcaacaccttctattggacccagaagtgcgtaaatattacctatggtagtaaacgtttaattatcattcagtttaaatgttggccttctgtatgtagccaagaacagctcattttgtgaatttcagtttttaagtggctgctttttgatttggttgtattattttattataatgtatttgcaagtatattaaaaaattaacattgagccataaaaatccccaaatatgttcaaggacttcataattgaaaaatatatagaaaacaatccttacttctttttacaaaaacaaaatcatgggaattattcttttctatatatttagttataaatctttctctgggccgggcgtggtggctcacgccagtaatcccagcactttgggaggctgagacaggcgaatcacgaggtcaggagttcgagaccagcctggccaacatggtgaaaccccgtctctactgaaaatacaaaaaattagctggacacggtggcaggcgcctgtgtgtggcgggcgccagctactcaggaggctgaggcaggagaatcgcttgaacccaggaggcagaggttgcagtgagccaagattgcgccactgcactccagcctaggtgacagtgcgagactctgtctcaaaaaaaaaaaaaagaaaaaaaatctttatctggatctgttaaaccatatattattgatcattgcaagtgaaattttgagagattgtttctagtatttaggtgatgaaaacatttggtaatattgctttggttcaaagaattttatgtctttatctttctagaagaaagcaattatatatatatttttgctaaattacataaacatttaattacatcaggttctaatttaaacatgtattactcacttgaggccacttttaaatattcatactctttgacataagatgctttgtatatttctcatttcttttagttcttagtaagtcagctttaaaaagtacctgccaaccagaaccttccatattctggactaaatcttgctcttcggattatacttcagtgcagtaactgtggatttgcaattttgaaggggagatagtagctattatattttacacttgcttgatgtgataactctaaagactttttaactgataaaagcgcacatggctattttgatacacaaagttgtgtttgctactttagaagcttttgtggcagaattgtaatctaattttcataccttgtatttctgaatcacaacaaaaaaataaatggggaacaagacttacagatttgcaaacttatttatctagaagtttgtgttttttaagagaccatttgggcaaaacataaatgttttctataatgttatcctgactttgcatcctaagcatttcaccaggcctgatttttatcattttttaggaagtaatatttgtggagtaaatacttggtattctgagctcttgtgtcaagtaggttctgttcgtatcactatgatgtgggatatacgagtaaaagtttaagaaatgtgaatttagcaaaatttcttaaacaagtacgttttctatacaaatatatttctcatactttaaacgaaaacctgatattccaaccatgtaatatctcccagatcctgatgggcagcaaattatacaagactgatatggaaaagaacatgcctcgatatttatcagttcgtaaacagaaaggttttggaacattgagaagagatttcttggacatcgtggtttgcaagcttaatctttctttacatgtgagcaatttatatacataaatggcatgtgatattatatctgtaatttttgtttggatatttaaaggacaaaattatgtgttttgtttgtttgtttgtttgtgatggagtcttgccctgtcgccaggctggagcgtagtggcatgatcttggctcactgcaacctccgactccctggttcaagcaattgtcctgcctcagcctcctgagtagctgggattacaggcacgcgcccccacgcccagctaatttttgtatttttagtagagacggggtttcaccatgttggccaggctggtcttgaactcctgacctggtgatctgcccgccttggcctctcaaagtgctgggattacaggcgtgagccaccacgcccaaccccaaattatgttttgatttctgttacactcctgattttataacctccattttgcctcatccatcatatatttgttgggtactaatgatgagcttggtatcaggtgctggggatacaattatatatcaacaacttgttccttcctcatggcaattacttttcttgtttcttcaccttctcccatccttcatccctcagatggctctgctatatccttacaagtctcttagacaaagaggaaccattccccattttcttctttggcttggagcctctgaattttaggcttcaaatctttgtatgctaagcactgttctaagctggaaagactccaaggaaaaataggatccctgccctcgaatagtttataatctagtgagaaggatatatgccagagattacactgatctgagaatagcggtgattaagataccataaccaacactgaaaacaggtaccagtcacttgtgagtgctttacatgtattaactcaatgaaatcacaagctaaccccaagaatagtactacttatatttccatgttataaatgagggaacaggcactgaaagcttaaatacttggctcaasgtcacagctactcaatggtgaagccaggatgagaatcttgattctgatttttaggcatctagccccgtactaaatgtcttctagcagcacagaaggaatgttaagacggcccagaaacagcagggatggctttacagaggaagaaattcttcagccaaaactaaagaaatgaatttgtcaggtgaaaaagctgggtaccattcagggagaccggcagatgtgcaaaagcgaaagacgtgagagaccttggcatattccagaaaccacaaaaagtggatatagttgcaagaagggaaaaggaagagatgaggggtagggaggggggtggcaaaggattgggccagatcatgccatgtgaagagttaagatttttaggttttcaagaactttgagtggaaatatgaaatagccagattttagctttagagaggtcacggtagcccttgaaactcagttctaatattgctgagtctttaggccttggggtcaatgatcctcattagttttaaaaatgtcatattagatacatattgtgatggattgaattgtgtcaccccaaaacatatttaaattcagtccccagcacctgtgaatatgaccttatttggaaataaggtctgtacagatgcgatcaagttaagatgaggtgactgtgatgggcctgaatccagtattatgactggagacctcagaagaatgggagaaaacagaaccccacaggtcatggcggaagcagagactggagtgattaggctgcaaggcaaggaacattaaggattgccggccaccaccagaagctagggagaggcaagaacagactgtacccgagcttcagagaaagcgtgggcctgctttcgccttgctttttgacttccagcccacagagctgtgagagaataaatttctgttgttttacgctacctaatttgtggtattttgtcatggcagttctaggaaacatattaaccttaaagtttagaattgtgttcactatcaattaataccttggagacgtgctgtgtgctaaatagcataagagaataaaagttagttattacacgtaagaatgtaaattattcacccagccctcccggtactatggtattataccttgtttggttctatcactgcagtttcagtccaacgagagcagtaggcatctgaaaaatggacaagttcctacccttagcttatttcactttaaacaccaagttattgattagaaatggaaaaaaaaatcacaagttaatttgctatgctttccattgtaaaccaaaagtaaatattatttgcccactattaaacttgtacagcagaatgatttatttgtagctcattgcctagcttcaaatattattgcttaattattccgattttttttgtcttgtttttaggtttaggttccacttaagttaggtgagttaagttaggtggatttctaagttaaaccaaggcttaacttagaaaccaagagagtttcctggttatgacaagaatgactttcaggcacagagtggatgacttggatgtgatcacttaaggcagaagacaggctctgaagcaaaagtgattgggaaaaaaaaaaagcatgactggggcttatataatgcttgctggcaatgtatgcaaaccatttgaaagagcatggcactacctaccacacaaatttataatgtataagattcttgaaattggaaactggcattttggattgctaatctaagcctatgagaagttattattattattattattattattattattattattt

SEQ ID NO: 95621 - DNA, 49753 bp, Homo sapiens
caactgcaggtgaaaatatgagtaaaaagaaggccaggcacgatggctcatgcctgtaatcccagcactctgggaagctgaggcgggctgatcacaaggtcaggagttcgagaccagcctggccaatatggtgaaaccccgtctctactaaaaaatacaaaaattagctgggtgtggtggtttgcacctgtagtcccagctactcgggagtctgaggcaggagaatcgcttgaacccgggaagcagaggttgcagtgagccaagatctcgccactgcactgcagcctgagcgacagagcaagactctgtctcaaaaaataaaaaataaaataaaataaaataaaaacaagatgggccaggcacagtggctcacgcctgtaatccccagcactttgggaggccgaggtgggcggatcacctgaggtaagaagttcgagaccagcctggccaatatggtgaaaccccatctctactaaaaacacaaaattaccagggtgcagctaaaaaaacttctttcttctgtttttttattctagcctgcaaacttcttgagggcagacccgtcgtcttttcttctgtgctaatgccttatgtcatgttcacccttatatgactagcaatgaggaattgctgcttcatccccacgccctccatcacatggctgaatgaatgacattgatgggttgattcccacacctccttatcagtccacaagctggctgtggcttcatatgaataaaatgaatagcaataagtgagaaagggctgggccttcaaggtagctgagcacattcagaaaggaatgtaacctgatgggctcaaccagcttcctgcctgacaactgcctgagtcactttcatgggactcagtatgttcttcaagttatgtttcgggtcagggaggaagctgaaaactcaacaagtagagacttgacttctgggtgcacatgaggggacgaccttaatattaatattatgcatgtcctttaacatggtctgagtgaaatgaattcagtcctgggtggtctgcatgtgagatcctatcgaaggctgaatacacaaacaccacctgccaycccactgaccttcctagtttctgaagtccttgatcacagcagggaaactccattttgttcaacaaaccttagctatttaagaacacaccctctttgtacttgtaggtggtaaggcagggggagtaggttgtaaatggaataaaatgaagtcttagcccttggggattttatcatcgagaaaagtagaacactgtgctagtaagatcaacaatttttgagcatctgctctgcaccaggcactgtgttaggcacttggcatgtgtgatttaagggcaattcaaggtccaaagtgtgatgagagctcagagagatttcagaagtttcctgaagaagtgacattggaactgacacttgaggaatagtatgattttaacaggttgaattggtgaaagcaatggaaggagccaggatttttttttttttctcgagatggagttctcctcttgttgcccaggctggagttcaatggcatgatctcaggtcattgcaacctccccctcccttgttcaagccattctcctgcctcagcctcccgaatagctgggattaccggcccccgccaccatgcccggctaatttttgtatttttagtagagacagggtttcaccatgttggccagactggtctcaaactcctgacctcaggcgatccacccaccttgggctcccaaagtgccgagattacaggtgtgagccacaccaggccagaagcaagaatctattcttcaaagcccaagaggcaaggaacgggggctgcactgcaggaactgggaatatcccttttggctctgcatcccttgttttctaaaatgaaacacttgcaggaacctcccatttgatcttactgcctcctctctctttctggtgtatcctaaaaggactgtcagatccaccttcatgaaaccaacatctgaccaaatcacaactctaccaagaaggaagacaggaagacagaaaagcaggaggtagtgacagaatgaagagggaagctttcaacattatcttacagaataatgtccaaactccttattccaagcctctaactggcagtgccagttggtgtatttttagcttcatctcctgccactccaaccccacagtgcctctgcttcctacattccagggatccctcagagcaggtactttattcttccgcgcctttatttctgcttttccttctgcctgaaatggcctgcactccgtcaaaatcagattaagattttaaacttcagtttaagtgaactttccctaagacatccctaaccactcattcaaaattaagccttctctctcctgtggtcccacaggacttcctgcctctatcctagcacttgtcaccctggagtcagaagacctgggtcaaactccagctctgccatataaaagctgaatgaattgggggggatttctactgatacctctgaggctgtttccctttttcttcttcttcttctttttttttttttttttttttttgagatggagtcttgctctgttgccaggctggagtgcagtggcacgatcttggctcactgcaacctctgcctcctgagttgaagtgattctcatgcctcagcctcccgagtagttgggattattggcatgtgccaccacacccagctagtttttgtatttttagtagagatggcatttcaccatattggccaggatggtctcaatctcctgacctcatgatctgccagtctcggccttccaaaatgctggaattacaggtgtgagccaccgcgcctggcctgtttcctcttttgtaaaaatgggatacttaagatttaccttgtcgtatacaataagataatgtatgcaaaactcttacacatgtaacatatttacattttaaatatgtaaacggttaaaagtttctactccactaaaatgtaaggtcccagggaataggaattttaaaatgaaaaattttccttttaaaataatacttacaggctgggtgtggtggttcccgcctgtaatcccagcacatcgggtggctgaggcaggcagatcacttgaggacaggagttcgagaccagcctggacaaaatggcaaaaccccatctctacaaaaacacaaaaaatttgccaagcatggtggcacacgcctgtcatcctagctactcgggaggctgaggcaggagaattgttatgggaggtggaggatgcagtgagccgagattgtgccactgctctccagcctgggtgacagagcgagactttgtctcaaaaaaaataaaaataaatacacaaataaaaattaaaaataaactcttacagaatagttgcaaaggtatacagagaattcccatatattcttcacccaatttcccctactgttaacatcttaaataaccatggtacatttatcaacaataagaaattaacattgataaaatactattagctaaactgcagactttattctcattcttacaacagtttttcaactcatggcccttttctgtttcaggatccaatccagaatcccatactgcatttagttgtcatcttcttagtctctacaatctgtgacagttcctcagtctttccttgtcttttatgatcttgacatttttgaggagcactggttattttgtagaagtagaaaaaccctccatatgaatttttctgatgttttctcatgattagattgaggttacaggtttgggaagcataccacagagctaatgtgcccttctccacatcaggggttccatcataacaacatggcttattactggtgataaaagaggggttttttgtttgtttgtttgtttttaccgattctcactctgttgcccaggctgaagtgcggtggtgtgatcttggctcactgcaatctctgcctcctgggttctagtgattctcctgcttcaccctcccaagtagctggagttacatgcaggcaccatcacgcctggctaatttttgtttgtttgttttgagacagagtttcgctctgtagcccaggctggagtgctgtggtgcgatctcagctcaccacaacctctgcctcctaggtcccggttcaagaaattctcctgcctcagcctcccgagtagctgggattacaggaacgcaccaccatgcccagctaatttttgtatttttagtagagacagggtttcaccatgttggccaggcgggtcttgaactgctgacctcaggtgatcgcccgccttggcctcccaaagtgctgggattacaggcgtgactcaccacacccggcctaatttttgtatttttagtagagatggagtttcaccatgttggccaggctggtctcgaactcctgacctcaagtgatccacccacctcggcctcccaaagtgctgggattacaggcgtgagtcaccacgcccggcccatctttgcttaaattataaactcagtttctcccacagttagttcagcctatgctcaggaatgtacaaggacagcttggaggttaaaagtaagatggagttggttaagttagatctctttcactgtctcagtcatcattttgcgaaggcaaattcacaagtgggaagaaaggacgggtagatgcagggcagagagagggctctgtgcttcgagcctggatgatacagatttggcaatactattctaaggagagaccagagaaagaagtttagggtagaaggtaattaattagagtatgttgaatttgtcttgcagaaaaaccctgtgaaggaaacctctgggaggctgttgtaaatgctgggctggggatggggtgggtctagagatccagatttgaagcaatttctagtctattgatagctgaagctcaagaagagagttagatgagcagaggtgaagagagaagaggacatcagactcttgagtaaattcagcttaagctcagggaggagtaagaaagggagacagtgaaggaagcagataaggaatattgggaagctggacaaacaagaactgggtagttgacaataccaatgaagagggaagaggagaggactttaattctttcggagatgccagatgagaaaaaattaagaaatgagtgagaaaaaaatgatggagtgattaaacatctatgttgctttcctttgagaatgttaactatgaaaagaagaaaagggtggtggtggctgcaaaccataggaaggctgagaaagggttttactttggttctgcctctaatccctgacgcattcaacctcctcaagccatttgcttgtaaacataactggcataaataatatctgatatgcccattttacaggacaagtgcttccctctcagaccacatactcgaggacagcggccgtccacgccttatttacattcatcttcccaacacaacagtcatttggaagatgccgagtggcgtgggaagaacaagcgggaacgagcgccgacccgcccgcggcctgactgctagcgcaccgctgtgcggccgcctcaccgcgcactccctcctgaattattcaccaccgagacgaggacggtgatcgcccccattccacagaggacacggagtgaaggcgcagtcacaggcccaaagcccccagtcggcgggtcttggaaatggacgactttttcactcaaaagctacgaggcaacaaagcatgtggatgaggagggaagggagccggggccaataattcatctcaaagtaaaagacgtccccgggggtggggaacaaacaaacaacaaaacccggctctgtgcttccgcgcttgcgctctcctaggtctgccaggctgccgcccgcgcctaggccagagtctcagtgcgcctgcgccgagcccgacttccgccagggctcgattggcttccaggctacttctcccggcccagggagggcctgcgctgtggctagagaagggagtctggtgactgggtgcgcgtgctgatgacgaaatcggaagtgcccggagcagaggcgggaccagaacctagagggcctcgggattgcggaagtttggtggggagggtcggagctctggtggagagagtgttgtctaaaacaagttccggaagggaggctgcccttcgcggtccgagaaccaccggcctccccagtttgagggctgttaccccgtgcgcgcttcgacgttgctgctgttggctctcctcgcccctcgttcccttgggaaccgcctgggaactccgccatgtcatccacttcgcccaacctccaggtatcattgctcatctcccgtccccctagggagctgggatcgaggggaggcgcgagaagcgggtggggggcggggagaagggaggaagcggccgcgcctgtggtcgaggcgcaggagggcgggtccggggacctgcagcaggtgggagaggggcccgttttccaacggaaaggtcgtttctggcccgctcttggggtctcccgagctactggctttgtgagactcttcacttttgttgacacttcccgcttccaaaccagccaagatctgggcaggtttctccaatcagggttaacggagaaagaaagaacgtaatttttgcaaagccctattctggaccagttgaagatagggtggtcatagttcggtcttagtttctcaagctgacagcagaccccttcattctgagctgtcaggtgagtagagatatgggaacagaccaagaatctgagattacagccagcctgcatgcaatctccgtgaagtcattgaatttatgtgcacactcctgtggctcccagatggtagtgtgtaagatcgaggagtattcttaaacctctgtgtggctccacttcccctcctctaccgcaatgagcacagtgttttgtacacaaatcatggaatcttaagattttaggcttaatcgttagtcctctgtggaatggaattcgttcagaaaagaaatttcttaatgtaatggtgtctcccatccccagaatggatctagggcttcagtggcgtttagaatgtaatgtggcttaatgtagaggactcccagtccagtaagtcaataaggcacaaaagagtagcctaaaatacttgtattgagtccccgtcgtggacttccggtagtttgttgaacaagcagttattggagtgcctgayagaggcatcaaaggtaatggaagaactccttaacccatgataattgattctgaagaaagaccactcaaagtagacccacttaaacagagattaaaatttcacacacacatacacaaaaagagtgggaaaggaggcttgcttgggactttcatcttgaaaatcgacctagaagattattaaaataattgttatctttcacaaaatattataattgtataattgcaacaatgactcattttgtggaataagtcaagtgttgatttgtctgtgkttttttccttttcttttctttctttttttttttttttttgagacggagtcttgcacggtcgcccaggcttgagtgcagtggcgtgatttcagctcactacaacctccacctcccaggttcaagcgattctcttgcctcagcctcctgagtacctgggactacaggcacccaccaccacgcccagctaatttttgtatttttagtagtagagatgaggtttcaccatgttggcccaggctggcctcttgacctcaggtgatccgcctacctcagcctcccaaagtgctgggattacaggcgtgagtcaccgtgcccagatgactatctttttcaccaaggttgtattaaactaagattcagcaatcttcacttgagttttttgtagctttttgtagtcctatttggaaaggttctttttggtaaacgtatttggaaaaagcgttggtcatttggtaaaagtatttttcccttgagtattaaaggtgactcttctgaagtgcccatcttgtcatcgttggctttttaacaatttttattccaccagcttttcatttgtcagagactttgcatgtgatttcgatactctacaacataatcttcatcatttgcaggtttttgttgttgttgttttgagacagtcttgctctgttgcccagactggagtgcagtggcgtgatcttggcgcactgcaacctccacctcccaggttcaagtgattcttgtgcctcagcctcccgagtagctgggattacaggtgcctgccaccacgcctggctaattttttctatttttagtagagacagggtttcaccatgttggccacgctggtcttgaactcctgacctcaagtgatccgcccgccttagcctcccaaagtgctgggttacaggtgtgagccaccgtgcccggccccagaatgcatcatacttgaattggactgttggctgttcttcagtgaatcagccagagactgaccaacatgaaaggcataattgttactcttaagcaggaaggatcttgaattgtaattttgttagtggtaggttcacatgtgtgctttctcattcaaccttttcaaccttctaacctaggaaatttggattaatattcatgtagtgattaacttcctgctgaacaaggcaaaaatctctgtggccagatgcttataatctaatgagggaatgcagataactaaaaatcaaaattatataatgtaataaagctgcacagtattctccacttccctgtggttttactttccacagtttcaataacccraagttaacctgggtccaaaaattttaaatgaaatattctagaataaatagttcataattttgaaacactatgtcacaatgcctgtgtcattcacttcagttcatatcatgacgtaggcattttattatttcacataatcacaagaaggttgagaacagtgcaataagatgttgagagagagaaaccacattcacatcacttttattacagtatattgtaataaaatgtactgggcaaggaggcaaggtctgtgggatgggaggcggtaaggggccaaattagtagagtatccattcaaatraagtggaaaggrttgatcaaaggagaaaaattgaagatggagaagagtcaagcttgtatctgcatttatttttttttttttgagacagagtctcactctattgcccaggcaggagtgcagtggcatgatctcggcttatggtaacctccatctcccaggttcaagcgattcccctgcgtcagccccccatgtagcagctgggattacaggcatgcaccaacacacccagctaatttttgtagagacggggattcgctgtgttggccaggccagtctcaaastcctgaactcaggtgatccacccccgttggcctcccaaagtggtagaattacaggcgtgagccactgctccctgctgtatctgcattttaaaagtgagggaggaggaagagtctgagttttctcccagatttctgggttgggtatctgagtacccaactcaggtagggattggttctgggaatacaaaaggagagctatttggggccagggcaagggagcaaaataatttggttctaaacttgtcgagtttgagatgcttgtggagacaatcaaatggaaatgtccggtgaatatttgcatacatatgtgtagaagtagggagagtggactaggctggaaataaggatttattagcgtacaggtggtagcagaggttgtaggcatacagagtcacatcctggagagtttacagaataaggcaaaacaaagaccacgttagaaattctatggattagcgacagttaaggagagagaaatgggagcctggaaaagaattatgaatcaaaagtaaaaccaggccaggcgcagtggctcatgcctgtaatcccagtgttttgggaggccgaggcagcagatcgcttcagcttaggacttcgagaccagtctgggcaacatggtgaaaacccctctctacaaaaattagccaggtgtggtggtgcatgcctgtagtcccagctactccagaggctgaggtgggagaatggcttgagcccaggaggtggaggtaacactgaggcgtgatcacacccgtgtactccagcctgggtgacacagtgagaccctgtctaaaaaaaaaaaaatactaaaactagaagaaaatggtgtcatgacagccaggcaaggagacactgtcagggtatttgttgtgtgtgttaaatgctgcggagagggagtgagataagcatatgatttggctatcaggaggcagaaagcattgctgtgggagaaataggagatcaggaaactgggatgaacatgggtattctttgggattttgctgtggaggcaaagagatgagtgagatgtagggagaggagaaccgaggagctgaggagtgatggtgtgtagtttgtgttctgcagatgtgagtctgagataggacaacacatttttctgctgagggaaaaaaggaaaggttggagagaacagttgataggcatgtcattgatggagtaaatgtcagcagaggaaggtggggatcagctccacagcagaggagaaagaattggtctcaacagacagggcctgggacacctcttctgaggtaggtaattgtagaatttaccccatttctcagggttttctaaggtggatgtgtctgggactcctaagtggaacaggacaattccacatgttcccaacctttatacttccgtatggataactggatcctgactgatcctggggtgacacagtcattcagtcttgtgtcagccactgtgctagactctgggaatataaagaagtgaagacaacagacagaactgctcttctcctggagcttacattctaatagaagagagaggccaataaattaaaaaaaaacaaaaaaaacatatgcatgctcagacacacacatgcacacacaaagatcatcagccttaagtcactgatgtagggggggaggaaacagagagaaatgagtcccagcccacacctgatgaatatacttcattgtcacataagagaggaagaatcaatgaaggacgctgagaaggaggagccagaatggtgggaggaaaaccagcaaagtggtggttgggggctcagcagaggacagtgtccaagaaggaggaaataatcaactttgtaaaatgtcagaagatcaagaagacagagctggtgtttggatctagcatgctagagagccttgatatgagccgttttattatgtgatacaggaaagagaatagaggccactctggtgagatttttggctctaaaaggtagcagagaaacagaactaacaccgaacagtgttttgtcaaataagactttttaaaggagggctgtttgtatgtcgatggaaatatctagtggagagaaattgttaagaatgacagaagtgaagtaaccaaaaggaagaagatactgaaaaaggagtagggaattttttttttcattcgttaaacaatttcgagtacctgttgtatgccggcaccattctaggcatgggtagctcaaggtgaagtcctgtcctcatggaacctacctccctaaaggagacagccagtgggtgagcatacaggtaaatacaatgacagtgatgggatgagagagtgcagtgggggcagatagcaaagagaaggaatgaggtgcagcctttgytatagcaaattagggaggcctctctaaggacttgccatctgaactaggactgaaaaggagacatcatgcatctgtctggggaaaggagggaagagcattctaggtggaagggttcaactgcttgggctgcctgagtgcaggaggattctagggttcggggagaaccacacgtagctagggcccaggttatttcagaccttgtagatcagctctagcatcaggattttattgtttttaatgggagaccatcaaggttaccttttatgttttgaggtagcaagggtgggaacagactgaccactcacgaggctgggtagtagttttgacatatatgatagcagcttgaactagggtgttagcaagggagatggtgaggattatattcagaaagaaaattagctctggctgaaaagggaagataatgtttgatggaccagagcagatggagctggaagaggggaagacaggcaacagactctgccagtattatctgtctgagactgaagaactccagtcagtagtgaatgataacagccaggacctccagaggctgcaggcataaatgaatgaactcaatgcaaaagttcacctattgcaggaggagctacagctgctgcaggaacagggctcctgtataagggaagtagtccgggccatgaataaggagaaagtgttagtcaaggtgtatcccaagggcaagtttgtcttagatgtggacagaaacagcaacatcaatgacatgagacccaattgccaggggggcgctaagaaatgatagcgacacactgcacaatatcatacccagcaaagtagacccactggtgtcaccagtgatggtggagaaggtgccaaccttgatttaagagatgattggtggactggacaagcagattaaggacatcacagaagtgatcgagcagcctgttaagcattccaagctctttgaagcactgggtatcacacaacccagggtggtactgctgtacggacctctaggcactgggaagacactgtttgcctaggctgtggctcaccatacagactgtacctttgttcatatccctggctctgaatttgtatagaaattcatcggggaagggccaagaatggtgagggagctgtttgtcatggcatgaggacctgccatctgtcatcagctccatcagctcctcgcagctggaggggggttctggaggggacagtgaagtgctgcacatcgtgctggaactgctcaaccaactggacagctttgaggcccccaagaagatcaaggttatcatggaccactgcttcactcagggcacatcaacagaaaaattgaattccagctggacattttgaagatccattctctgaaaaggaacctgacccaggggatcaaccagagaaaaattgccaagcttatgccaggagcatcaggggctgaagtgaaagtcatatacagagaaagcagcatatatgccctgagggaacggcgagtgcatgtcacccaggaggactttgagatagcagtagccagcgtcatgcagaaggatagagagtaaaacatgtccatcaagaaactatggaagtgcggggatgtcctttgtatggatccctccggtaaagctttctggaatgaaaaaataaaataattagctctccagaattaaccatagaagacatggttaattttatttcaaatgaaaaatgctaacagacatggttaattttatttcagatgaaaaatgttaacagaaataaggttgaaatggtattcatcagcagaaaaaaaacagatgcatatcctcttaattcatcgtcttcgattaaaggtttaacgtgtgccacccagtacagtggctgcatgtggctattttaattacataaactcactcctcagtcacactagccacatttcaagtgctcagaagccatatacagacattctcatcatcagggaaaggctggtttaattagcactatgtttggagctagatgcttaaataatacccactgcagtataagagatttaacttaataaaaatcagtgtggtgcctcagtgaggcctgactgaatgagaggaacaagtggctgaagaggtgagtggcacagcatttcaaaatcacctgagaagaaaattatagttaggataagaaagagcttatttctaggccaggcacggtggctcacgcctgttatcccagcactttgggaggctgaggcaggtgtatcacctgaggtcaggagtttgagaccagcctggccaacatggtgaaatcccatctctactaaaaatacaaaaattagccaggcatggtggtgggtgcctgtaatcccagccactggggaggctgaggcaggagaatcacatgaacctgggaggcagagattgcagtgagccaagatggcgccattgcactccagtctgggcgacaagagtgagactccatctcaaaagaaaaaagaaaaaggatttatttctgctatgtggcttaaccactgaggctttgagatgcatttttttttttcttttttgagacagagtcttgctctgtcacccaggctagagtgcagtggcatgatctcggctcactgcaacctctgtctcccggattcaagcgattctcctgactcagcctcccaagtagctgggattacaggcgcctggctaatattttttgtatttttagagatggggtttcattatattggccaggctggtctcgaactcctgacctcaagtgatccgccctcctcggcctcccatactgctgggattacaggcgtgagccactgtgcttggcctcactctgtcacccaggctggagtgcagtggcacaatcttggctgtggtgcatttttatatgaccagtctgacctaaccaccacttgactgtgtgactccatgttttatgttcatatactagctgataaaacttgaaaatttagctttgaatttaggctacttgacctgtgagatacrtaactattacattttatcaattctgaagtaaaccatttatttttcttccctgctacaatagaggaagcatggtcttccagcgggagacctgttcctcccatttacagatctcagcccagttatatccaatccatgctcaactgccccaaaatgtaatattcttacacataattggtttttgcattgtttgaatgattttttgcttatgttatatacttactttttaatatctctaacaactgtcaattttcatttttttttactggcacctatttctgttgaatagttttactacctaaattaacccagttggaatgttttaataagtcatgtttgccctttatttgtatgtatctgtgcataatttttttttttttttttttgaggtggagtctcactctgttgcccaggctggagtgcagtggcatgatcttggctcactgcaaccaccgcctcccgggttcaagcaattctcctgcctcagtctcccaagtagctgggactataggcgcatgccgctacgcctggtcaattttttgtgttttagtagagacggggtttcactgtgttgcccasgctggtcgcaaactcctgagctcaggagaattttagtttgagataattgtagattcacacgcagttgtaagaaatactgagaatccagcattccctttatccagttgtctgcagtggcagcatcttgtagaactgggacaatatcacaaccaggatattgayattgatacattccaccactcttactcatattttcccagttttacttgtcctyatgtgtttttatgtgtgtgggtgtggttgtttgtgcagttttatcacatgtagatatgtgttacattttgagagttctttatgtattctcgatactagttctttgttagatatgttttgcaaatatttctcccagtctatagattgtcctttcatccttttaacaaaatcttccagagagcaaaagttttgtcataagatccagttacctttttttttcttttatatagtatgcttttgatgtcaaatctaagaactctgcgcatccccagatcctaagttttccatgttttttctaaaagttttagctgggtgcggtggtgtggacttgtgatcctgctatttggggaggctgatgcaggatgatcacctgagcccaggagtttgaggctagcttggtcgacatagtgagatggagccccgtctcaacaaataaataagaatcaaagttttgtagttttacatttaattctatgatccatttttgagttaatttttgtaggaagtattaagtttaagtcagaattcttttaggtgtatgcttatggatgtctagttcctctagcaccacttcttaaaaagcctgactcggtgccattgactggctttttgcrtcattttcaaaaatctcttggctttattagtatggatttatttctgggactttttaaaaaaatgccacaaaagtagtccatgttccttatggacattttttagaagatgtgaaaaagtagaaaatgaaaaatatatgttttatcaaagataaactctgtttaacaatttccttcccatctttttcctgtgctgcttttttctgctgttgtttcaaataaattcctgctacatataaaaagttgtgtcctgctttttaaaaatgcccattattaacactttccatattattacaaatatttcttaatgttattttagtgatcctttggtgttctgttttgtggcatcctttatgatttaagtttccaggttttgtttttgttayttaaaagacctctctgataatatctgtgctcagtaaaccttttagttaattactggattgaaatatatgagtatttttcagattcttgatatttcattgccccattgcttctgaagaggtttcaccccatttacatttccactattgttatatcttttagattaaagcagcatttaatttttgagaatttctctaaatgcttgtttagtttgaattttcacattctattatttcttattagccctaaatttaactttagctaagtgaaaattacatgtaaatgttagcgattggtactaaagtaacattcagtagcatttattcctataacatgtaatttgcatcttttcaacttgtaatttataataaaatacagttgtgagttagaaaaaaatgattttttagttactgtttattttttacttatttttgttttctttcacagcccagcaagctgagaagctttaaaaaaaaaaaaaaactttcagtatgattatttacttcaaatttatgtttatgctttgatttaaatgttgttattttgcctccctcaaacagaaagcgatagatctggctagcaaagcagcgcaagaagacaaggctgggaactaygaagaagcccttcagctctatcagcatgctgtgcagtattttcttcatgtcgttaaatgtgaggccataggttatattttatttaaaaacacgaaaaggaaaatttattctgtttcatttctaaaaaattgaaatataatgccagacaattctaaacgatccatttgttaaaaaaaaaaaatactccactttctttctagtgatttttaagtattgagatgtagctagcaaatgtgacagccatcatagttattactttgtatatgtaaacatcttaaaatgtagtctagtcagtggaaaataggttaggagacattctatttgtgtctttacagatatgtattgcgtgtgtaccacgtggcaggcactggggatacaatggaaagaaatggttaagacccctgccctcatagctcttaaatggaatgcagttagatgattgaagatgttcttttgagcttctcccatttagttctgaggttttatgttaaagtgagactaagaatgagtcataacctgtaagctatgtggggctcatcccatctattgcacgtgttgccaaagttcactttgaaaacagctctgacagaggcctttgtgtagtaaaatttacgatgttggtattacacagaatatatgggatttccatcactttactcttctgaaataaagcttttgtagacattcatagaaatgattaatactgctttccttcyatttgtcttttttataattgggtttgtctaagacaagcaactttgaactatctgcaaaaatgtaagggaaaaatatgaaagcttcagaatattaaataatttcctgttagttaacattaacttaatataccctgctgtcttgcttaggttgtttctgattcagacccactgttggtctccaaccctgctggaggaaggggtagaaaagaggtgataatcattggctatgatgagttagagatgatcttccctccttcttccaacatagaatttccttgtctgaaraaatacatatttaagagttcaaacctttctacatagaatactaatggaaaaaaatctctctcatttccctttaatagatgaagcacagggtgataaagccaagcaaagtatcagggcaaagtgyacagaatatcttgatagagcagaaaaactaaaggagtacctgaaaaataaagagaaaaaagcacagaagccagtgaaagaaggacagccgagtccagcagatgagaaggggtacgtgtttaaaattgttcaattttattgtggctttttgctttcgatttgtgaaatttcttttgattaaaacaggtgtcagcaaactatggctcatgggccaaagctgcccagctgcctgtttttggaataagctttatcagaacacagcygtgcccattcttttacatattgttgtctagggctgctttcgtgccgtaacaacaaagttgtgtggttgtgtggagaccgtatggcccacgaaacctaaaatatttacttgtttggtcctttacaaaaaaaagtttgctgacccctagtttgccaagttgaatggataatattcctcaaacaacccttcctgactgcctgctagtaggaggagagaatgcttgtaggaatagtactcagttactctctggccattagctaatatggaagcttaaggttataggagtgaccagagagttaaacctttgaccacatggaaaaaatgaaaagtaactccaacaaygtaaattttttttggatatcttatgcaaaattttttgatgtgaatttgtgttagatttgctttatgttgtcattgtaaagaaaacaacacagcataacttataaacgttgaaactgatttttggcatgtcttcctagatgggggatgtatcacttctagatgcagaatttgtttattcagtacatgacatatgcgtgccaagtttgtgctcagcactgggaacatattctaaccacatcctctctggctgtcctattaattgatgccagtagttccaggtaacacacccttaagaaaatgagactctgggatggagttatctggcctgcttgggtttgaaaacagcgagattctgctcagctttagaggatgtggttctcattgttcatggtatgcagtggcgcaggttatttagacaataccctgtggtcacaaggaatgaagtgccttttaggcagtgctttggggcttcgtggctgctaccacagaccatttggaagtacatgaggaatataagaaccagtgttgacttggctgcttcaaactatgtggcagagtttgaaggaaatgataagcttaagctcaaggttttatattctctgttcaagatgtgatcggggaaccagggagtttctgtgacaccctaagaacatgttatcttcttcatcgatagcactgacttaacaaaaatcagatgatagtctgatcttacaaattactgaattccaacttagggtttcttatatgaaagtgaggacatttggtataaaacagggactccaaacatgaagtgaaaatattgggaagaatttagttgaccttgactgcccaggacctccagctgtcactgagactcccttgacagcagaagcttctcttcccttgtccatagaagctcttctctcttgcttgaaaaccctgtaaggatctcttctgrgatgattacctgacaaggcgatgccagtttttcttttgtactgaacagcaatcttcgtttacagtaggacccactttggctaatttaagcaaaaagggatatattatagggtattaccttacagaatagtggggccagggaatcaggagaaatggccaacagtaccagggttgttcaagtagggatcccactgttgccaactcctctgctaagcactgatggtgcttgggagcaggtagtaaatcctctgcgcagctccctcagcaaaaccagtgccttcgcctgaagattctgtctccttgtgagcagcccccaccttcttggaagaatttaggtctcatgtggaaccctagctacaagggagatgagaaacggcagggttttttttgtttgtttgtttttaataaggacagcctttatagtactggacagcatgatagaaagaggttggagtgagtgtcatgtgaatcttttgcagtgtctacctcacccacagccccaccgtcctatgataaccaaggcaattccattttggcataaaacatgtcatgcttttatctycctttatatgttattgttttaaaaatgatataatgccttatttttggctttatcacttttatacttaacattgtatcaggaatatctttccaataaactatttctacatcacgtttaaatgttgcaatgtatcctgtcatatgctagtccctataatatgagttactttttccccttttgcaaacagtgtgggtgtgattatccttatggtcaaatgcttgaacttgtctaaaattatttcctcaagataaatccctagatatgaatgaaatgccttgatcgacctacttgttctttgggtgtagttcattgtcatcaggaagcttcctctgtcctttggaatccccagactaagggttgtagacctttgtaccttagtgttccagatttttttcctcctaatatgacctcttgttctaatttatatcttgcccagtcctgatgtttttactgttgttgtttgcagctctcctgtgattcatcttgaatccttcatggagtgatgtgtggggcatgcatttatgaattaatacatacctaaatatgtcatgggaatttggagctagttcctgacttcattctggtctttttgtccctttcttttacatgattctctattgatgataacgtgactgcttcttatttactacattctttaaaataagtaagcataacttttaatgtaaatgtctgattttgccactgaaattacaaatatttcagsttaatttttccttcatttttgccttatttgatagcaatgagtgatcatttgaatatattaaattctttttattaggaatgacagtgatggggaaggagaatctgatgatcctgaaaaaaagaaactacagaatcaacttcaaggttgctttagatttcatttttaaatttactatcctattaaaaagactcaaagtgaattgtctatttgaattgtttttgttctccctctatatttaaatgaagtttaagaactggctttggttcccaatagtcatgtgctggctttgtttagagtgttttcttagggtttgccctctaggatcatggtttggtcttttttatgtaatagttttgttggcttcacatctgcctttaaaaggctctcagtcaacttgctctttctttttgtttatttgccgccttttagagaaggtaacacttatactattagcacactgcaaaatttgatggtattaaaatttactactgtgggagaagttaggacttacacgtggcttttattgccgttgctgtagctcacttattgatggtttattttgtttcttaactgctcttcatctgcttttcagtgttcctgtttacatttaattgtttaagctttctgtgtttaccatccacacctgtaaagccctttcattctgttctactrtagcacagtggcataacagaggggacataggtttttggctccattcagatcttgattctgttcaagggtctgccacttagaactttctaattgtgggcaagtgactgaatctctcagaaccagcgtcccccatctctaaaatagaaatgagcaatagcttcctttcagggcttttaagattaatgacagtgtaaaaactacctcatatatctgacgaagtctagggactcaataaatggtagcactgtttatctaaaaaggcatctatttgttggctggctttgttaatcactgagatttgattattcttcgaaataaattatctaacaatttttcagattgaattttttgctcacccattggtagtatgtattttgttcatttgaatcttaccaaatagaatgcataactgggaaggatttccattttataggttcagccttggttactgaatagtgaaaatacttacctgagccaaacttttagccttgctatactagtgtcttcgttttggtagtatttttgtcttgcctaccctactgggatgtctaggaaaacactgtaaggataatrtgttgacaacagaccaggtaatgaatagagaacatctttagatgccaagaacttcagtggtagatatagtccaagggcaaaatcttgagtttacactcaagcgtagtggtgtccccaccacctgaaactactggcacacactgcgcactcagttggcatttattgggtaacccagtgggtctgtgccaagtggccttattccagttgtaaagcaagacactttttttgtctgctctattggatttggttttgtttccctctccctaccctgccccaggtaaaaatcagttkcatatctttaattttcgaaaagatacattttttttttcttttttgtttttttgagacaagggtgtcgctgtgttgcccaggctggagtgcagtggcgcaatcacggcttactgcagcctcgaactcctgggttccagggattctcctgcctcagcctcctgagtagctgggaacacaggcacacaccaccatgcccggctaagtttttttttttgtttgtttgtttgtttgtttgtttgtttttgtagaggtggggtttggccatgttgcccaggctgctctcgaactcctgagctcaagtgatttgcccacttcagcctcccaaagagctgggattacaattgtgagccaccgcacttggccgatacaaccagtttttaatagggatttctctaaattccctatcacttacaataaaggccagaaatgtaaaacaaacaaataaaagagaaaaaaaamcaaatacttaaaacatttaaatgaggaaatgtatttgaaatttcaggatgaaatagaatatgaaaggagtcctagccttttatatttgaatatccttttttttctactttttaatggtttgctgctggatttcatactattgtatcttttttkaatttttccyygttttttgaacagtattttaaatcttttacttctgttttagattatgatattaagtgtatatttgttaaaattaaaaatcggtttgtgatttgagttttctgttagctaattttattcagtgaattttttgtgattaagtaatatactagtaaatagtatagtcaaagaccggataaatttatatcattggaagtacattccatttgttagcatttttcataatcccatcccccctttttaattttgcaaaccatgtctagtatgagattgtttatcagtaaacattccaaagtcaccttttaacttagaagtattatatatgaaaacaaatcatgacacatttttaaaatttatagcagaaatcttgagtcagacggtatacatatataaaataaagtttatttttgtttaactgacatgaaatcctaggattactaatcttaatgaaacataaaaaagacgaaatgaatttacttttttcttactttatagtagtctgaacttttggaatacaaaatgcttatggtttcatgtaattttaatctagtagctaaagattttcataatttagggaagtaagttgctagtaactagtcttagagtaacagattatctttcctaacaagaagaaacaatcagtagcagtgatttcataaagtaatagattgtataagtggtggtgttctgttacacttaaaacaactaactacatgtcatcttagaacaggctgcttcatagtttatagtggaacagtttccatattctagaaaattagaaaagcttttgataaaagagaactagaaaatttgtcagtaggctatattaaaagacatccttcttggactcttactgcaataattgctttggcttttgaatatactgcattcagaagctaaatcttccctgtaagttaactttgttaattaacaaaagttgtaaatagatctatttagcagccaaatagaaacttgggcaaatcttaggaaagtattgcaaatctgcaggggtatcttttctcggtttcccatcatctgcttccattccttcctttcctctctccttttccttctcccttctgtctgtctgcctatcttgagttaaatttgttaagcatattttttttttcagtggttgaggagaggattagatcaccttttcttttggttaacaggagaaatggtagaacaagtacttttgatactccaaaatcaatgtattcaaatataaccaccttatggaacgtttggtgcttttccaaacactctaatattcattatgtcatttgattttcgcaccaacctatctaagtagtttgggcagatggtattattttcatttcacaagtgaggaagctgaaacagaagggtaaagtaacatgccccaggttgtctagtcatccacctggttcctagtcctattgactactccctaacacctgcttcctgctcacgctatttcaaaaaggttgttagtacataaaactttcccaattttataatgcrtttctttaacatcattatttcatgttgtcttctaactttggtgaaatagtctttcttaatttaaagataacgtaattttttgcaggtgccattgttatagaacgaccaaatgtgaaatggagtgacgttgctggacttgaaggagccaaagaagcactgaaagaggctgtgatactgcctattaaatttcctcatctttttacaggtgacataacttttaaataattttatttcatgagtttgtaaaagttcattgatgactgaggtgaagcattgtcattcttgtcactaatgaattatcttaaataaattgtgactgttaaaaggtggtgatatatctttatacaagatgttttatttcttatacatatccatatttgcagtgtatatatattgcaaaacaacctaaatgtcaaccagtagggtaattcaccaacatgcagtggaatactatgcactcagtaaaatagagtgtacatctacattaataaattgaaatctgcattgtattttattgaagaatgtccacatctattgcaaagatcaaaaagcagttataaactgaatagtatgattccatgtttgctaaatgtgtatgctgagaagtaagtatagttagattcacatagaaatattaatatatgcctaggggataagattataggagatttttacttttgactttcatctgaatttttgcaatggttatgatttttaaagagtatttcttaaaaagaggagtaagaatcacttaacagtttcagaggaagtgcataacctctagtagcaaaaggacatttcattatcactgtgaagagaatattgctgacctaccatctggggaaacttacaagttctagttccagcagtaagtgatatgtctgtgctaaaccattcctttatattatccttcttgtgactgatagccttgactgtaatatggccacacccacagtctgacagtcagaggtttttccttttgcaaacatgttggtttatgtcaacagcaaatctgcaatgttggcctcagactgaagagtccagacagtcgtatcgtatagagcagtgatgaagagcaaaaagcctgtaggccacgcactgtccgcctagcttcaaggtgcagtttactacccaacttcaggagtatgaaacttaacagcataaaagttgacatcataatcctatamaagcacaaaaatatggttgaactcattttatggtatattacttataccactttttctcaaacatgastcattgatgtatcatcttcatgaatttttccatgtatrtgtaccattactaatttttaatatttttctttgcttattttttagaacaacatttttactagagtatagcataaatatacagagacatacaggagcccctgggtgttgggcttccttaattgtcacaaagcaagcatgccagtgtcatcaaccagatccagaaataacagcattgccagggacctggcaggagccttctgcctcattcctcccgagaggtcatctctctctctcgacttctaacgccagagattattttgcctgtatttgaactttaaatcatctcacatatttttacttagtaacgttattgaaaagactgctttgtgcctttataagtgaaaaaaaagtgtttttccaatacacattaaaaaattatttaaagtatataccacctaaaagtacttcatgttataccagtggtatatgtaccatactcagacactgacttgtaaatgtatacatgtaaaataggaaaatgaaattcaagtaacagttgctttcrtaacagttaagtgaaacagtgttattcatctgcatatcattcttttgcagatactgtgtacacatccatagtttgcacctagcagttttttttgttttgttttgttttgtttctttttttgagacagagtttcactcttgtcacccaggctggaatgcaatggcgtggtctcgtttcactgcaacctccacctcccgagttcaagcaattctcctgcctcagcctcccgagtatttgggattacaggcatctgccaccacacccagctaatttttgtatttttactagagtcagggtttcaccatgttggccacagttgtcccgagctcctgacctcaggtgatccgcccatctcagcctctcaaagtgctgggattacatacatgagccaccatgcccagccatagttttttaaatgtatgtttgatagtttactgccagctgtaacccacctgttttattttaggcaggattataattgctcattagcaaaattgaggctcgaagagttgatgtattcactggttatattttggcaaaactaggatttaaagtagtatcacctttttgttacccaaccatgaaagtctgctacctagctggaggctgaggtgggcagatcacctgaggtcagaagatcgagaccagcctgaccaacatggtaaaaccccgtctcyactaaaatacaaaaactagccaggcgtaatggcgggcacctataatctcagctacctgggaggctgaggcgggagaattgcttgaaaccaggaggcagaggttgcagtgagccgagatcgcaccactgccctccagcctgggcaacaagagtgagactctgtctcaaaaaaaataaaataaaagaaagtctgctacctataacactaacctgtgctttcctgtggaatcaagaattcagcagaaactcacaagtcatccaaactttgttaggttcacttttccaaagagcataaatattcaaagaaaatctcttccagctgcccattttttatggatataatttttgtacaatattctggtatcaagcagtgtacacagtagatgatcagaaagtaccttttaactgaactcttttcccctactagactccaygcagggcagaaatccttttgcctgtgcacatgttacggttttgatacatattggttgaatgaatgagcaaacaaatgtacttcctgttagaaggcttatgttatgcaagtctctttttgataaagtagtctctagaagaaacaaaatatatttaagacataccttagattgatttatttttaaaatattgttttgatccttagaggtttagagtgaaaatctttccagagtattcctcagtatagatgatacaattaagtgttaaaattctcatgacrtttttctaaatctaaattttaggcaagagaacaccttggaggggaatcctattatttgggccgcctggaacaggaaagtcctacttagccaaagctgtagcaacagaagccaacaactcaacatttttttcaatatcttcytctgatcttgtttctaagtggctaggtgaaagtgaaaagtaagtagtaaatcaattttttaaagttttttctttgcctgtaattactgtatcactccttaayagatttcttacatcacttatagatattcagagaagtcatgtaatacaggtactcacttctctgtcaaatcagtctctaatctagaatttcttttgtgggaaaagatagcatatatctacaacctagtraatcataaagtgaattatccagttgtagcattcttattttctgtacctgaaacatgattaggctttttaatctacagagttcttgtaatattgatatattactttgttttaatcttttactattttttagagacttaaaagttttcatttatttttagactggttaagaatttattccaacttgccagagagaacaagccctccattatcttcattgatgaaattgattctctctgtggttcaagaagtgaaaatgaaagtgaagccgcacgtagaattaagacggagttcctagtgcaaatgcaaggtagtgttactaattttttttttctttttgagacggagtctcactctgtcgcccaggctggagtgcagtggygcgatctcagctcactacaacctccacctcccaggttcaagcaattctcatgcctcagcctcctgagtagctgggattmcaggcgcrcaccaccatgcccggctaatttaatgttactgatttttaaagtcrtttttgtttattttataacaatttttataacagtaatgaaaaattcaagcagaatttctccattctaacaaactgtttcattttgccatgtttcattccaattgtcttccatatgcatacrtaatttttactcaattgtaattatcttgtaggactcactgacataaatagaaaagagatttaatgtattcatttataatgtaccaggaacaacttcagtaaaagtaatatgtagacttcgaatgaaatttttcaagaaatattttgaaacgaatgttaatagtattttccacaatctgggagatttgattcatatatttgcatcatattgcatcatagtgtatttggatcatattgccgtaaggtgatatttgattaaatacagttcttttccaaagacagactctcaagatgaagcactttaatggtaaagcaccacatttcttaacagaatatatggaagaagtttaaagaacaccaaaatgacaaattaattaaagcattacctattttaatgcaggggttggtgtagacaatgatggaattttggttctgggagctacaaatataccctgggttctggattctgccattaggcgaaggtaggataatayagtaaatatcttatttctcactgcagatgtaacaagtagatgataattctctttttgtcttgtcaggaagcattctaacaacttttcaaaagatttgtaatgtgctctaaccctgttgctcccctgccttgagtgggagaagggtggtcatttgcttgtttgtttccctagtttatcaaatatacaagatttccacacacttctgtctttcatattagaaaatatattacctaatgcttacctttcattctgattaagtttggtgggcactgatgcttcaaaaatttataaacatagtttgacaattcagtaaaaaccatttatataaaattttagcaaaatggcaattctataagtcaaaataagataaccaggtaagattttttttttttttttgagtcggagtctcactctgttgccaggctggagtgcggtggtgcgatctcggctcactgcatcctccacctcccgggttcaagtgattctcctgcctcagcctcccaagtagctgggactacaggtatgcaccaccacgcccagctaatttgtatatttttagtagagacgagatttcatcatgtggccaggatggtctcgatctcttgacctcatgatccacccgcctcagcctccgagagtgctggaattacagatgtgagccaccgtgcccagccaagattttttttttttttagtaaaaactatatgtcaggccgggtgtggtggctcatgcctgtaatcccagcactttgggaaaccaaggtaggcagattgcctgagctcaggagttcaaaaccaccctgggcaacgtggtgaaaccctgtctctactaaaatccaaaaaaattacctggccatggtggcgcacacctgtctgtagtcccagctactcgggaagctgaggtgggagaatcgcttgagcccaggaggcggaggttgcagtgagccaagattgtgccactgcactccagcttgggcaacagagtgagactccatctcaaaaaaaaatatatatatatatatatatgtgtgtgtgtgtgtatatatgtatatgtgtatatgtatatatgtatacacacacacatctatctatctaatttttaagttgaaaatgaaacttcagytctaggaaaggtatacggactcttcacttttcactcttcacagttctgtattacattcatttattttgtatggtaaaaattagcacttcagtttttgccacttttatcccattcacttgatgatttgygccagcattctagcttaccatccagtaccaagaaaggaaatgtgcagggtatttttgaaaaattgccttattctgcacccatctctagaggcaacggaaactttaaattcttttcattgtcacagagwgttacctggagaaaaaacagtctgctcagaccacttaaattatccctcatcgttgcttctctgtctccaaataccgaaattctaagaaagcaagcaaaattattgttaatgaaacatagtgtttattctttataatataggattgttctggatgtattcattaaagtggacattttgtgtaatatatatcctataagattgtgaggtaattctgttttgaatgtagagaattactgtgtcatctctactcctgttttatattgttaatcattagtcccttgatcaagagttcagagtacaattttgtgggaaactgtaaccctgtaggacctctttttatttcatgaattccagacataggaacactgtggccaaaataacccaaaaatgcacgaaagattcagccacttcaaactggctcccaggctattttgrttttatttgtttgtttttaatgtgttctggatattatccctttaacctaaatatatatgtttaaccttggcacatacaggcccacttaacttagtatctgtttcttcttggaaatatcctaattttcaattaaatatattcttgatgtaatttctcttttaagatttgagaaacgaatttatattcccttgccggaaccccatgcccgagcagcaatgtttaaactgcacctagggaccactcagaacagtctcacggaagcagactttcgggaacttgggaggaaaacagatggttattcaggggcagatataagtatcattgtacgtgatgcccttatgcagcctgttaggaaagtacagtcagctactcattttaaaaaggtaagtcatttttatctatcctttcctatcwtttttttttttttttgagacagtctcactctgttgcccaggctggagtgcagtggcactatctggrcttgctgcaacctccgcctcccgggttcaagcaattctcatgccttagcctcctgagtagctggaattacaggcgtgtgccaccackcctggctaattttttgtatttttagtagagacaggatttcaccatgttggccaggctggtctcgaactcctgactccaggtgatccacccacctcggcctcccaaaggcgtgagccactgcgcctggcccttttcctgtatttttaaaatcaagtttcaagaccgtcattggtttgtcttcaaagaatttgggaggatttcagtgttgtataataataccataagtgggtttacataatagacatatttctgtgtcactgaaacaagttctttaataaagtttatttattggccatttttggctgggtgcagtgccccatacctgtaatcccagcactttaggaggccgaggtgggcagatctcttgagctcaggagagaccagcctcaggcaacatggcaaaaccccatctctgtaaaaaatacaaaaattagctggatgtggtggcacactcctgtagtcccagctacttgggaggctgaagtgggagaatctcttgagcccaggaggtggaggttgcagtgagccgagattgcaccagtgtactccagcctgggtgacacagtgagaycctgtcttaaaaaaagaaaaggccttattaatcatcctaatgtgttttaaattttcctatgaaatgatttttgaagtatttgtgtattattttgatataagtatagaaacttaaatgtacagatgtaaggctgcttctgacacatctagaatatttttgagtagaatctggtgcatttatacctcataaagtaaaaataataatagctaatatcttttaaatattcacatgcctggcactgtgttctgtcttttatcttactatttcatttggtcttcacaaaaatcagcaagagaggtacatgtagccagccacctaatggtggttagtcttggacgtaggtgctaacacagtagctrgagtgggacagacrtgtgatttgcctggaggtgaggtgtgtttccraatctgaaatctcagccattctgctatcctgcccctcctgtgttctgttttgtctgcaagaacaagttaagcatctgtggctgagataaagttttatargaaggctgtggtcttgagatacccagtttgagtaacaatgaactaggtaatctggaccaacccttttgctgtgaacaacagtatccagtattactcatgaacatacatgtgaaaaactattagcaaacctaatctcataatgtatgtcaagactaatatgactaagtcacatacgtatatttatcatgtaccataataagatttttttaagttaacaagcttgaattaaaatctgaatttgaagcctggcaccatttacttgttatacctttttgagcaaattctattacttctttaaagctcatttttatcatttctaaaatggggatgtgataatgctattttgaagtcctttccaataatgaagtgatataatactcataaaacaccagtcgtggtacttcagatgcgtagggaatgttactcatccacccttcttcagccatttcattactgaagtactgttaagtttatgccacagccattatgttttttcttaaattctctttgccatttagaaactataaatgcataggaactcagtcctttcctactgagagtttgtcactcaattctgcatattactgccagggtgagctcacatgacgctgaagccaggtccttgttagtgggatgaaggtgacacagccagatgagttttatctctgcagctggggatcaccagctgcagcagacctctcagcggctccatcctttacttcttttaaagctgattatttcagttaacaagaagaagattccctgtttattttttgcatttactartattttatttctaaaatactaatctgggaccggtggtagatcagaaagtagagcagtcaaaaaagacaaaaatccctgacctcatgcagctaaaatattagtgagtaaagacagtaaaatacacataataaggtgagagcatgtatttcttcacatctacactaatactgagataatatttaaagtcgattattgtgaaacagatgtgaaagtgcccccaagttggctgggcgcggtggctcacgcctgtaatcccagcactttgggaggccaaggtgggcggatcacaaggtcaggggttcgagaccagcctggccatcatgataaaaccccatctctactaaaaatacaaaaattagctcggcgtcagggcgggcgcctataatcccagctactcgggaggctgaggcaggagaattgcttgaaccctggaggtggaagttgcagtgagctgacatcgcaccactgccctccagcctgggctacaaagcgagactccgtctcaaaaaaaaaaaaaaagaagtgcctccaagttgatgcagactattgccatctaaatgtttacatgtgactatgtcacaaagattctttttctggatattgttaaaacttataaataagttgtacatgataaaatggcattgatactgcatttarcatacaattttgcacttagatttgagagcatttttgttgaaagagattcrgtagtttcatactaaagttccaaatattacagaagtttctcagctatagagcaacttctgagaattttttaatatatctgtttttggtctttaagattactaccacttattaagcactagaggggaaaaagagaaagccacaggtaactattttttttttaactcatcttctatgtgtgatcatacaagyaatttattgtaggaaatttcaaaatatagaaagcatcaagaaaaaaactaaaagcagctgggtgcagtcgctcacacctgtaatcccagcactttgggaggccgaggctggcggatcacaaggtcaggagatcaagaccatcttggccaacatggtgaaaccccgtctctcctaaaaataaaaaaaaattagctgggtgtggtggcacatgcctgtaatcctagctactcgggaggctgagggatgagaatcccttgaacccaggaggtggaggttgcagtgagctgacatcgtgccacttcactccagcctggtgacagagcaagacgccctttcaaaaaaaaaactaaaagcaaccaaaatctatcccattacccaggggataactactttttgttgtatattcttaattttttttccaaaagtaaacattctaataaaacatacaaaaytattatacattttaactttcctggtaatggattaagtcttaatgttcaattttgtttcaaatacatatttcagattactgtttatttcaggttcgcggaccttcccgagctgatcctaaccatcttgtagatgatctgctaacaccttgctctccaggtgaccctggtgccattgaaatgacrtggatggatgtccctggagataaacttttggagccagttgtttccatggtttgaaattttgtttgtttttaagaaaatattttaaaacattatacttcataattttcagttatataagatttgctggaaaatcttagtataaacaggtgtattttacttaatattgttgactcattaaaaattatgaagwtaattgaacttaaaatataaaaagtcattatttttaaactattttcttgggtttagaggaacctttaagtgaaaaagctattttttaaagcacaagattctgactttacaggtcttatagctagaatatctccaaaatgctcatatatagtataattattgtaaagacctaactaaaaaatagggttggtgaaatattttttttcccctgcatctcagattttttaaaataaccagaagtcacctgtaatcccagcactttgggaggccaaggcgggcagaccacttgaggccaggagtttgaaactggcctggccaacatggtgaaatgccatctctcctaaaaatacaaaaattagccaggcagtgtggtgcacacctgcaatccagctactcagctgaggcaggagaatcacgtgaaccagggaggcagaggttgcagtgagccgagattgcacarccgcaccccagcctgggcaacagagcgagactctgtctccaaaaaaaaaacaaaaaatagggccaggtacggtggctcatgcctgtaatcccaacactttgggaggccgaggcgggtggatcatgaggtcaggagatcgagaccatcctggccaacacggtgaaaccccatctctactaaaaatacaaaaagttagccagacgtggtggcacgtgcgtgtagtcccagctacttgggaggctgaggcaggagaatagcttgaacccaggaggcggaggttgcagtgagccgagatcataccactgcactccagcctgggcaacagagcgagactctgtctcaaaaaacaacaacaacaaaaacaaaaaccagaaatactaatgcttgtatcattgtttttatagtgttttctatttcacttctcaaagctccatagaaagtttaaatattgtagttctatttttatttttaaaaattacagttaatatagtttatattggaagaattaaaataatctacaagacttactttgcaaggcatgttatttttagggaacttagggtgattgaaaagttgtttacttacagaagaacattctcagttttcaaaattttctgtcagtttcagatcttcaaagacctttaatggcaggtttaatagtaacttccagaggagaaacttttacayggtacatagatatacatgtaaatgtgtatacacccatatatttgtgtgtgaactaaccataatgcttatctgagaagttactcagaaacccctttgttttaatccttggtgtattattttttattttttgtactytgttcagctttgaagaatttttagtaacttagagtggtccttttcattatttttcatatccttttacaggagtctaggcttagaagttagttttttaatgaatctctgatattagcatatttttctaaccatttcgatcttaattgtaactaattattttaaaattctggttagtwgatttttcatagaatggtattctgcttcacttaagtgtaagtgaatgatattttccttttgaattatactgacttggaaaattgatctcgtttaagaaaaagagataaggccagaaattagatcatgaacatactttggaggccttgatcctcagactaaggggattgtccttctgataagtattggggagccatttgatcagttcaggggaagaaagtatacgtttctacacaaaggaataacatgatcaaagatcatgaaagatctgtgaaagaataggggccgggtgcaggggcccacgcctgtaatcccagcactttgcaaggcagaggcaggcggatcacctgaggtcaggggttcgagaccagcctgaccaacaaaacgaaaccccatctctactaaaaatacaaaaattagccaggtgtggtttcaggtgcctgtaatcccagctacttgggaggctgaggcaggagaatctcttgaacctgggaggcagaggttgcaatgagccaagatcacgccactgcgctccagcctgagccaacagagtgagactccaactcaaaaaaaaaaaaaaagaatasggagtttatcgttagtatcttatggcagactgcaaatattcatatttaaacttaggttaaagttcatagcaataatgataatatgacggttttttattttgttaactctattattaatatcctccctacccttctttttccctgacagtcggatatgttgcggtcactatctaacacaaaacctacagtcaatgaacatgacttgttgaaattaaagaagtttacagaagattttggtcaagaaggctaagccaaagacaaggaagatgcttaccatatgtattctttctttcatagatatttttgtctatttggatcgcattaattgtttccagtaaaactcttttaccacagggaaatacacatctcacttcagagttccattaggttttatattgtacttttcctccattacttattaaatactcctrttaacaaaaggtacaaaataacaggttatgaggaaatgagcgatatatgaacggcataaaaacagaaattacccagtaaaaaggatgtcagaaattgacatacaaatatttacaatttttatgaatggtggtctttgcaaagagcatttatattttcttttttttttactaaaatgatatagggtttattttatattttcaaaaaaattgttaaacatcattcttatcaatgtwaaatttacgttattaaaaaattacaaatgatagaatctttactcagggatgggcaataaaacagcaaagagctttgtgattgggtttgaaagattttgaattayagacagtgctcttaatagtttttaataagttgatatttttttctgtgtagatttaaataatttctttaaaagcgtaagctttggctgggcatggtggcttatgcctgtaatcccagcactttgggaggctacgatgggtggatcacctgaggtcaggagttcaagaccagtctggccaacatggtgaaatgccgtctctactaaaaatacaaaaattagctgggcatgatggcgagtgtctgtaatcccagctactcaggaggctgaggcgggagaatcacttgaacctgggaggcagaggttgcagtgagctgagatcgcgctactgcattccagcctgggcgccgagatagcgccattgcactccagcctgggcgactgaataaaactctgtctcaaaaaaaaacaaaaacggtaagcttttatatttaattaactgatacctttcactgtgcaatctcaagaggaagattttctaaattagacattgtctttaccttaaagaagaaaattgtctatttcagtgtcttttttagcaagattgaccaaaacaggtggtaggtgtgtaatttttaactgtcatgaaatactgtaatgcgcacctttgctaataaggaaatggtctccctttgaattatgggaagtttcttgtctgtgatatggggtgtctgtgtacatatatgtatatttccttttttaatacaggataataatatggggtcttgtccttcaccttttaagttcagggaacagtttgtcctgaccacacatatgttatcagtgtaatgctttatgaagctttagaaatgagctcatgactcattaaaaaataataaacgatgctattttaatattttcaaataaataatctgaggatgtgtttcatactttagcatcaacgctgagttgtgccttgtagaattgcattgtctatacatgcaaaagactattaagttaggatgaactagattccctaattacagtgaaattctatcttgcaaatgctatagaataacttgcattttaaagtgtatttgcacattttacatatgctatgtggttgcctttgggttttctgtacagattgtttttgttattaaatggaaaaggcctgaattatgctcttatgtgaagtaaattgatataacctattgactgtattctgtgtattattctttattttgggaccttctgtgtaaaagaaaatattacctaaattggttagatacaaagaaatcattaaaattattaatgtatatatgaaaattctgtttttcaatgacttttatgtgaggattgagaactaacttagtaaactaacactgaattctttgtggataagataatttatacatcttacctgtttatcagcctcagaattatacagtactgctgtgtgttctttatggacagatactcaaaggaatccgaatgggcatgttctatttctctggctcttgaccagtaattataaagtttaggtagacattttctgagccagcaagtagatcatagttgttaagcatctctatgacttacaccctggatatttgaaagcattttgtctcaccctgagaaatctataaggactctataattataaaacatgtcaatagagaattgacttctgagtccactgtcaactacatgcagaaaaacagaatgagtgtacttgattagtgccacagaagcaccatttagccactttcagagttgataaagaggcatacctacctgatggtgctgtatgttgcaagtgaagcaacacagtgcccattgttgacactaatgttattttaagtttgtgagttttcacaggtgcccttttctttcctactttcatcccttcatttgtatcctcctcttattttaatatggtatctttcttttttttgctagtccacatcacgtatttccattaaaacctaatgatgatgaaccatgtaacctcttgcaggaagaccacccaaactacccccaccctacttttgrgtttctttagcagttaaattgctgctgctgctgtgttaagatttttctctggagcatgttctattgatcatgtttagatcatttagattgtaagttctgagagttacattttccccagcaattaatatagtgttgagtgcttttaggtacttagtaaagacttggggaaaaaaaaagggagttatatttttattttgatctacctcatggattatgtgagagacttataaaataggtaagtttataaagtggctttgttcttactggtctagtgaagttatgataaatttctgtctcggtgattgagaactacacaatcaaaaatgtrttcaaactagctcaccctggcccaccaaaaccgatagtacatctttcccagctgcgagttcagtgacctcatactagtaatttaaagtctgctctgatgggaatatttataccatagaaaccagcaagagttcagttagccgtaaaaaatcaaggactgcctgtaacttaaaataggaagattaatactatttactgcatttatggaaataaaggagacaagttctttatagatgcataaaaagcaatacaattcagcacttgctttttttttaactgcacaaactaggaatagaagggaacttcttaatagaagaagttctacaaaaaaaacctagagccaacatatttaattgtgaatttttgaaaagcgtattcctccagagatcaggaaaaaggcaaaggtgcccactatcaccactttttctcaactttgtacagattctagccagtgcaagcaaaagaaatgaaaggcttacagataagaaataaaattgtcattcacagatgacatgattgtagaaaattgatataaacgtagaaataatgtgaatttaacaaggttgcaggatacaaagtcaaaattatcttagcaacaattagaaattgaaattatgagagtggtgtgtgcctatagtcccaactattggggaattgaagtgggaggatcacttgagcccaggagttcgaggctgcagtgagctattaccacaccactgcactccagcctgggtgagggaacgagaccctgtctcaaaaaaaaaaaaaaaaaaaggaaaatactaattacaatagtatcagagagcatcaaatgcctcaaaataaatctgctcaaagattggtgagactgacttgtagaaaaccatggaacgttaccaaaagacactaaggaagacctaaataagaggagggatcgaccctgtttatgagatagatgacttaaaaaaacaaagtcaatttaaccaaatcaatttatagatttaatgcaattccaaatctggatctgggtggttgatacaaagggtgtgtgtgtgtgtgtgtgtgtgtgtgtgtgtgtgtgtgtgaaaactcatatgctttacgctgtgcatttatatccagatacatagatatccagaaataggcactaaataatttactgattcttaaaaatcttttctagtttgtttttatgatagtgtctcctaagtagatttttctgtccatccatccataatcattcatccagaaatctgcatgttcacacagacatctggaatgacttccacataatgctcatgatgttattagattgattttttttttttttaacttactttacttcttgtatccccttcaggtctattccgatgtctctttttcagtgaaaccttccttggccatcctactgaaaatgacaaaccctcctgatgctccttatccccatccctggctgtatttttccccatagtgcttgtcatctaacatacgatataatttactattttccttaygtgatttctcccactaacaggtatgctatgaaatcagagtttcttgtctgttttgtcctctgctgtatctccagtgtctagaagagtgctggtgcctgatgggtgttcaacaagtgtttgttgagtgagtgaaacttactttgtattcttcctaaatttgaacaatcagcatgtataatttctgccccccaccccccagtgttcttctaaaaagaaaattaggactgaaaatacctcaagaaattaagtgactaaattctggtgaatagaaatatggacacttttattcttttctttatattttatctttatttttaatttctcaaaatgaagttttarggggctgggcgcagtggctcaggcctgtaatcccagcactttgggaggccgaggcaggcggatcacctgaggtcaggggttcaagaccaacctggccaacatgttgaaaccctgtctytaataaaaatacaaaaaaaaatagcttggtgtggtggctggcgcctgtaatcccagctactcaggaggctgaggcagaatcatttgtacctgggaggcagaggttgcagtgagctgagatcatgccattgcactacagcctgggtgacagggcgagactccatctcaaaaaaaaagggaattttaaggaagaatttggttgacagcaaatcacaggaattaggactcctctccctctagaactcaagaaataacaggaaatgtattaaaaagagaagaccaggacagtcagacagtcatcaaacagatgtactctggagaggcactattcatccaaatgccttccggcctcccaacacaggaaccaaagtggggagatcctatttttcttcatcacttggtagccagtacctgggccctttatgtaaccttggcatatcaggtgctgccactcaggtycttcagtcttgaacaagtaacagagatggcaggacatttaaaatagaatcatagcagcatcaccagcatctaactggatgggactctggtagctcctagtgagatagctgactatattattacctatggtcacacggaatgaagtgcccagtgaggacaagacattggagagccacttggcagctgctgtagaacaaaatacagagcatgagaacttcaaacggctggtcagggcagagaaggaaaaccagggatcttctatgactgtcctaaaataatttcttacagccagtgcctaagtaatcaaaagccaaactcagtatttgatcttgcaggttgctggcaatcagttgaattcacagattcaccacattttgtatgtgaaaggaagaaaatttagtaggaaaacagcaggccctgtagtattagaatgtgtatatttgtgaaaatttggaggattctgaatatcagcaactatctggaacatatgtgacagtgggttatgctgatgatcaaaaagcagaggaatcaagtttcagatatgattggatttatcactatgggttcagtcaacagaaattctatattcagtttttggtttgagccactgagagtgactttcattgtttgcctgactgcttgaagaaactgaacttgacagtggaccctctctgaactccagtaacatataatgtaaaagaaaaaaagctaacaactttagaaaataaagctttagtggatttaccacataagacctatccacaaagccacagtgttcctagagaactagaatctggttccttaatccaagctttggtaggtggaaagaatgctttcttactttttattttattttattttttgaggtgaagtctcgctcttgtcacccaggctggagtgcagtggtgccatctcagctaactgcaacctccacctccagggttcaagcgagtctcctgcctcagcctcccgagtagctgggattacaggcacccgccaccacacccagctaattttttggtatttttagttgagacagggtttcaccatgttggccaggctgcaagtgatccacctgcctcggcctcccaaagtgctgggatcacaggcgtgagccaccgcgcccagctgaagaaatgctttctaatgtgcttttcttgtcatctgattgcactggggccagaaagcaatccacttgggttgcagaagcccagcagtggcaccggggctagcacaagccaaatggactttggtaccatgtcaggctagtgtgatcatcagaaaggtctttcccacagagtcttaagcaacaattcatgagcgatgggatccctgcaacaaaaacaaatgcctgttcagctcactaaggggctacttcattagcctaaccaaaacccaagtctggtggatacctgaccagaaccatcatgataataggcaaagcatgaagcacagcattgattttgtaccacttgaaacaagcataagcttggtattgttgaggaaggatcctgcaataataccacaagtaccttcctttcggccttccccgaagggatgggaggctacttaccaaagctgctaggaaatagtgaaacagaaatatgaagactttagaggactgtgggacactggctctgagctaataatcttaactggagaatcagaaagtcacatggtccactggtcaagagggtacttatgggggtttagtgataaatgaggtggagttttaaccaaagtgtgcattggttaagctgaatgaatatctccgggaatgatcagtcaccagagcagttctctgacatgtggggtgaaggttaatgtaaaaagaagggtctaggagaaccccctggaactttcccctcttacagaaacagtaaataataaacaattgttacaacactagaggaaatcacagaaatactgccaccatcccgaatatgagaagtgtaggtatggtcttacctaccagggccccgtttaactctgcaggatggacagtatagaaaataaatgaattttagagaataacagtgaatacatactttacatgttcttccactggcctggtatttcacaattaagaaaataatgaagatatatctaaggtaagttgagaattgaaatagatgtagaagaaagaatagacattatataaacttaatcttacaaatggatagtaatatgagattccaaaagttggtggagcaagaaatggaggtttaaaaacagtttcaaaggtaggtgataaaattctaaaccattaaaaaattggaagggacaagtgaggggttaatgcaagtgagctaaagtctcatctctcaaagtaggaagcaatcatgtataaggtcagtaaattgagatgtagtacgataagcagacagggaggtaactcagaaaaattatttgtttggaattgctgctttagaagtcatccccaaacttcatggtttcaattattttctcttggttcctgtgggtcaggaattcaggaagggcttggccaggtgcttctggctaggagagctctgcacaggtgcagtcccacagctgctggacagctgatgcaactgggcgctggctggatagccctcttcatggagacctggggttgctccaagtggctgctctgcgtaggatgtttgggcttccacacagcatggctgccacggggcagtctgactgctgacatggtgactgatgactgcaacttcaggagcaagtattccagggaccaaaatggaagctgtaccacctttagcaatctagcctctgaagtcacatagtgtctctcctgccatattccatggatcacaatattcacagaagccaacccaattttgaggggaggggacatggattcccccatccctggaaggaatgtcaaggtgacattgtaagaggagcggttgagttggcagatgttgttgtggccacttttggaaaataaaatcatccacaggaatcaaacctaaaaaaagactggaagtcattgcccctggggagtggaatcagggctgaggagggtttgagggtagggaactgtgaagttagatcttagcccactgtactgttatttttttgtccacacacagctattcttttgattaaaaaatcaaatgggccaggcacgtggctcacgcctgtaatcctaacactttgggaggccgaggcgggcagatcacgaggtcaggagttcgagatcagcctggccaacatggtgaaaccccatctctactaaagatacaaaaaaattggccaggtgtggtggcaggcacctgtaatcccagctactcaggaggctgaggcaggagaatagctagaacccaggaggcggaggctgcagtgagctgagatggtgccattgcactctagcctgggtgacagggtgaggctctgtctcaaaaaataaagatgaaataaagtaaaataaaataaaaactaaagtatcaagatcacctctaaaaaaataattgcaggatttaaaaaattgtaagtattatctaagctatgtaaaatgtatgtccaaaataaaactaaaagaagtatggtagaaatctagtaccatctatccagatgtcagaactttatatatactggccttgagcctataatgtccctgccctcaagaaacttacagtccagttaaaaggacagtcaagtgaatcaatgattatagtgcaacactttgagatcaaggacagatgtgcaaagcgcaccgcacagccattgaagaggaacagctaaagactaggggaaaaagtggagggggagagcctcatttgccaccactggtggtgaatatcacacaacttcttagtctgaaagctaggaattatgggagacattgaacatttgctcttcctctttaagaggaatagcagttgatacctagatgatgagggaaagctctctctctctctctttctctccagaagaatgccagctaataaatgtgaagggaacagcagaatttaaaataccctttgccaagcccgatgaaatgattcaggcaaagatcattgatggatgttaaaattattgagtgagatgatatttacatggcctatgagtgtataataaaccactcaaaatcttaacggcttaaaatggccatttattattattcacaagtctgcaattcaggcagaactccatggagagggtttgcctctgctccacatggtgttggctggggtgaggaatccaagatggctccatcacatgtctggtgtctcaagttgggctggctggactgttctctttgatgtgatctctcatcatgcagtagtccagcctgagtttctttccatggcagcttactcccaatcccggaarcttcaatgcctcttaaggcccagaccaagaaataaacaagttagaagaccagtcaagatttacggcatgaaaaataaattctacttcttcatgggaggaccagcatatgcagataggaaagggaggaactgttggtgatgacccacccacattcagaagtgtcctctcagattacttgctcaccgccaaggagaacactggctttacaatggagagctatggctgtcaccaccttgccaaggaaatcaaattgagtatcactaacaatggcaaccagacatcatgtgccacctggtaggatgcaacatgaaaaccacttacaaagtattcttataaaaaaatgtgtagtctgaatctaattgagccatagacctaatgccaggttacagaaaattcactggagagagaaataacaccacaagaaatcaatcagtcagaagagaatgcagggtcttctacaagacaactgacccagtctcttcaaaaaagttaatgtcatttttctaaaaaggttggaagattcttctattcttctagattaaaaaaagttggagatgtataactcaatgcaatatatgaaccttgcttggatcctagtttggaaaaaaaaaaaagctataaaagacaatttgggctggacacagtggctcacgcccgcaatcccagcattttgagtggtcagggcaggtggatcacttgaggctaggagttcaagaccagcctgcccaacatggtgaaatcccatctagaaaaaaaaatggggggcaattgaagaaatatgaatatgggctggattgtaggtaatattatggaattgttattgccttaggtgcgataatggtattgtaggtaatgttagtgtgcattgtacccttcactttagaagacatatgcttaagtgtgctcatacagggatgcagaggaagtgccatgatgtctataaattactttgaaatggttcggggaaaaaaaacccacacatgcacttaaacactacatgaagcaaacatgtctaaataaataacactgaaggataaagaatcgtttctgcagtttaaaaaatatctagtgatagaatctatgactaactgccgggcgtggtggttcaagcctgtaatcccagcactttgggaggctgaggcgggcggatcacttgaggtcaggagtttgagaccatcccagccaacatggtgaaatcccgtctctactaaaagtataaaaattagccgagtgaggtggtgggagcctgtaatcccagctactcgggaggctaaagcatgagaatcacttgaacccgggaggtggaggttgcagtgagcggagatcgtgctactgcactccagccagggcgacacagtgagactccgtctcaaaaaaaaaaaaaagaaaagaaaaaaaaagaatcaatgactaactgatcttcagtgcttcccacacatctttcacgtttttctccttcctctcccaaaatttgccctttgtattatttttgcatataacatgtacatacatattattctttaccctacatctcacatttgctttaggctttggtgtactgttaaatagattcaattttcaaaagattgctcttttactatgcttttcccagtcagctattggctggctgagtcatcctgtagtcttaataatttcctcaagaactgcttatgggaaaaagatttccttggttattagatgttcaaaattatttgtctgaaacttttatgggtgaaatacagattcgctgaacgtgaaaccttgacacaacattccttccttgaggatctgacagatgttgcatcgttctctcatgttgaatgtcactctggagaaacctgaaactagcctgatctctttttaagacaactgacctgatgattttgtctaactgaccaaagtcttcactcttttaaaatccaatacttactagagaatgactcaatgttgattattttcagtcagttttccctggtgtaaaatatcatatctatctacctatctatctatctatttatgtgtatgtgtgtacacacacatataaatgttcaaatgctttagtattttaggaaagtgtatttgaaatttttaaaaatatttctaatgtcttgttttttttcttcaggtattcctattctacatatgtcgactcacatcctttgtctgttttcttatctttttttctgtcttttaaattctttgttttcatttcattttgtttgctttactcattatttcctttctgttccttactgtgtttttcactctattctcctcctgcgttcactttcattttcatatctgtgatgatttttacttttacttctttcctgatttctgccagtgtaacttttatctcctcttgttgtttcatcattcttccctgagtccttgcatttgtagtcttccttcataaaataactgcttcaccaaatgttttaaatcatggtgaaatatttaagtatccaaataaaagattttttgttttgttttgttttttccctgagtgtaaatctattgaggagtctttctgctcttcaccgctctttcccctctttttttttttttctctcataatacctctgtatcaggattgtgccagttcctttcaaaagaaattacttacctttcaagtcgagcacggtggctcaca

SEQ ID NO: 95622 - DNA, 15171 bp, Homo sapiens
agggaaactaggactgggaccatctacaagactaggccaggggtgacaagcatcccaccctccccaacacaggatattgctaagccaggatgccaccttagcattcttctcatcacatgctccaggcagcactaccaactgaacaggttgtcacccaacaggaaaactatcatccctggacaagctctgctagccctaaggtgtggagttctctgagggtatagatagaggggagaatgcagagaaggaagcttcaactaggacagggttgccctgtgggagcttggtgtctgtcatcagagcttccccaggcaacagtcccacagaagcccctggctgtctctgtgatgtacaccatcaacactttccagagtttaagggccaagagggccaggccacattaaccagctcggtgccagggtgtgagaggaagtataagtgatgtgcagggagacagggtaactaaccatcatcagcggcaaacggcaccattgattttacctttatctcatgctttccaaaggaaaattctgtaaatgttgcactttttttttttttttttttggagacagagtctcactctgtcaccaagctggagtacagtggtgggatcttggctcactgcaacctccgacttcttggttcaagcgattctcctgcctcagcctccaaagtagctgggattataggcacgcgccaccatgcccagctaatttttgtatttttcgtagagacggagtttcaccacgttggccaggatggtcttgatctcctgacctcatgatcggcctgccttggcctcccaaagtgctgggattacaggtgtgggccaccacacccagcccaaatgttgtagtcaaaaacaaaaacaagaacaaaaaacagcttggtggccgagctcagtgactcacgcctgtaatcccagcactttgggaggccgaggtgggtggatcacttgagctcaggagtttgagactaccctgggcaacatggtgaaaccccatctgttaaaaaaatacaaaaactagctaggtgtggtggcgtgtgcctgtaatcccagctacttgcggggctgaggtaggaggactgcttgaatccaggaggttgaagctgcagtgagccaagatcgccccactgcactccagcctgggtaacagagtgagaccctgtctcaaaaacaaaacacctagcttggtaaatgattaatacaatttaggaaaagtacgtaatgtagagaaataaaatctagttacactaaaattactctttcagtttttccaaaacaatgcataaataattcaggcaaaacttggcttgttgtctatatcccccacaccccaaatatcctttaccctttttttctcctgtagatattgatgccatgcaaattcttgaagaggaactaatataggatcttcaaatttggatggatgattattcttcagattctggatttcgaaatagaataattattttagagttagttctcttttaaagtcaaaatcatgttccccaatttttacggggtttccagaagttttatacaacacaagcccaggccatgcagtccgactgagatattccttgctcgctgtcagaggcccttgtgttcacctccaagttgctccccagtccagggagcttatttgtataagtgcctcgaagccaagaactatgtcttagaggctgggcgcagtggctcacacctgtaatctcagcactttgggaggctgaggtgggcagatcacctgaggtcaggagattgagaccagcctggccaacatggcaaaaacgtgtctctactaaaaatacaaaaaaattagccaggcatggtgggtgtgtgcctgtaatcccagctacttgggaggctgaggcaagagaatcacttgaacctgggaggcagaggttgcagtgagcagagatcacgccactgcactccagcctgggtgacagagtgggactctatttcaaaaaacaaaaaacaaaaaaacaaaacaaaacaaaaaaaactctgtcttagtattcctatattcccacctgccacaatctctggcacacagcagctgaataaagagaggaatacataaatgggttaacgccaatagctttgtgatatgctatgttctttaagactagtttttccctaagtacaactcttgctaaacctcggtggatctacagatactttacttataactaaaataaataaataaatgttcttgctttaattcactgatgaatgggggatgaccaaaaagataataacgttgtggttataccccttaggaaaaagagaagtacgaaatcagtttaggtttagatacggaatatgttctagtttgacatagattgtctgcaggaatcagagaaaattcttattggttagcaatccaggcttggttcttgatattcgttatactttgtctccctctaaagcaagagaacacaggtgaagcagtaacaggcctcttttctgagtgggtttgggaagtagatggaccaaagggaaaagtgacagctgctgcaggtggcacttccctgctagggacagtgcttggaggtcctgtcatggtccaaaagagggtgctggcctagcacaggtcatcaggggtgagtattccaaggggagaaaaccaggatgtgagtgtggcctactttgggaatactcatgaagagggcaacaataattaggccatttccttctgtccccaagcaatagctgacgcatcttgtttctcagttccagtgtctgtgctcagtttgaggcaatactgcaggttgactactatttcttttcttttttttttttttttttttttttgagacggagtctcgctctgttgcccaggatggagtgcagcggtgtgacctcagctcactgcaacctccgtctcctgggttcaagcaattctcctacctcagcctcccaagtagctgggattacaggcacccgccaccacgcccagctaatttttgcatttttagcagagacgaggtttcaccatgttggccaggctggtcttggccaggctggtcttgaactcctgaccttaggcgatctgcctgcctcagcctcccgaagtgctgggattacaggcgtgagccaccgcacctggcccggttgactgctatttctaaccatctggaataaactataaatccagcagttttcaaatgaaacacatgtctttttagtaatttagtatttgttgtagaacggactatatccaaatgaaaatgtatgcaatatttgttcctattctctacaaatttcaatcttttgtgtgtttggtttttacattttgttttttatttttcaattgacatataataattgcacatatttatggggtagtgatgtctcaatacatataatgtatacttatcattagcatatccatcatctcaaacatttattatttctttgtgttgggaacattcaacacaaatctaaatctttgtcagttaatcaggcatctgggatcgctcacaaattatcatgttaggaatacattcagatatcctttattaagacagaactagaggctgggcatcaccgtggcccatgcctataatcccagcacttcgggaggtcgaggaggattgcttgagcccaggagttcaagaccagcctaggcaacacagtgagacccccatctcttccaaaaaaagaaaaaaaaaactagctgaattttcatatttgaatataactacagtaggtaaaagtttaagaaagggaaaattgacattattaatacaataaagatattgttttctcgacctactgtcttctacatcaggggttggagaggaataatttttagatttgtaaacagttttttgtttttttttttaagacagagtctcactcttgttgcccaggctggagcacagtggcacgatctcagctcaccgaaacctccacctcccgggttcaagcgattctccagcctcagcttcccgagtagctgggattacaggcgcccgccaccatgcctggataatttttgtatttttagtagagatggggtttcaccatgttggccaggctggtcttgaactcccgatttcgtgatctgcccgcctcagcctcccaaagtgctgggattataggcaagagccaccgcgctcggcctgtaaacaattctaaaaaatcaaaagaattgtatttcacgttatgtgaaaattatacgcaagtcaaatttcgtgtccataatatggttttactggaatactgtcattcatttccatctctgtgtctgcttttgcaacacaggaaaaagctaaacaggtgtgactgagaccctattgccaagaaggcctaacatatttactatctggactttacagaaaaaaacttgtcaacactttctttacaatgtggagtcggcacagaaaatatgtgccttcagaaaaagagcgaaaaaaaagagaaaaaaaatctctgaaactcattaatacattaactttgtaattaacttcatggccattaactttggtaataaaaggttgctgatcccgtctgcccaagcaacacagaccacaatttctacttttgatgattcatgtattattttcacagacttctgatcacttgttttctttttattatttatttattttgagacggggtctggctctgtcgcccaggctggagggcaatggcgcgatctcagctctctgcaaactccgcctcccgggttcaagcgattcttgtgcctcagcctcctgagtagctgggattacagagaccgccaccacgcccggctaattttttgtatttttagtagaaacggggtttcaccatgttggccaggctggtctagaactccgcctctgcctcccaaagtgctgagattataggcgtgagtcaccgcgccaagatatcttctatttgggaacattttgttgtcaagtatccagctgggtacttcgggagttaaaaacattaattaaggcatggtcctggagtcaagtgagcttcggcgagaagtttgccatggacagcatttctggagcaaaccctgtaagaagggctgaattctacatgccgacatttcatacatttctcctgcatttcaggttgtaagtgtgctgcagcatgactgatctggccaaattcttccagtttcctcaagtgcttttcctttagtatcgttctgagtgtttacaaagaaatgattttccaaagcacttgtgaagcatctagttcgattggaacgcagtgacggctctataaaattcaaagaaaagaatctccccgcatgaatagttaacaaaaatcgcttgggccgaggtggcggggttgtaaaaattagctagttatatagtaatcatttttccataaatttaaatatctctaattaaagaaaaaattgacgtagaacaaaatctgcgggtgtgtgtgtgtgtgtctcggaggggattaccttatctcccagcgcggttctgaacccttccttcgctcagttctccctttaaaagtcgccaagtggaacgcccgcccccggacccgcacttgcccccctatactctcctcccggtcctccagacggagcccgcccggccaggacacgccagccccttcctcggccggtggggcctcgacccccgccgcctcgaggaggcgcggcgcctgcagtccacgcggccgagagcgggtagcggggagggccgcccacgacggaggtttctctgtggttacctcagcggcgctcttcgcaatctgaaagttggggcagctgaagagccccaccaccttcacctgcagcggccgctccggcagcgacggcgagccgcacctagcgtgcgggggcccgcacggctgcggccttgccatggccgcgcccggggacgcccggtgaccccaaacactgcgcgtcgctccggcaaccgcgcggccccgcctccgccgctcgcaggaggcggggcccaggggcgggtcgagggcggcccgtggcggctgggcctttcctcaactttgcgcctgttgctgggccgccggcgcgcgggcggccgcgaccgccggggacgagcttggaggaaaaggaaccgggagccgcccacccgggggcgctctccggacccccagggtcctagcgcgcggcccttaccgagcctgggcgcccggatttcggyagcggatcgcctttccgggttggcggcccgcctgattgggaacagccggccgsttgccgggggaacgcgggagtcgggcccgacctgagccacgcrggcttggtgcccacctgtgcgcgccgcctgcgaagaaggaacggtctrgggagaaggcgccgccggccgcccccgtycccaccgcggccgtcgctggagagttcgagccgcctagcgcccctggagctccccaaccatgaagcycaacttctccctgcgactgcggatcttcaacctcaactgctggtgagtgcgtctgcggagtgcggtctgggggccaccttccgttcgcacccatgcagccttcctccccctatcccgccccacgatctcagggtgtagggaaaacccgaacctccaaagtccacatctggccccagcgccggtggtcccagcagtcgyctcccctgccccgctcttcccttccttaggggcattccgtacttgagcaagcaccgggccgaccgcatgmggcgcctgggagactttctgaaccaggagagcttcgacctggctttgctggaggaggtgagattgtgcagcacggtgcggaacccaggctgggaggagggacagaccgtcccactggggaaagaccaagcaggcatcctcaccgcttccctcaggtgtggagtgagcaggacttccagtacctgagacagaagctgtcacctacctacccagctgcacaccacttccggaggtgagaagcccactggcctgaagcctgttgtcatcccaggaggctcttggccctsccagcccttccctatcctgcctgcactctccagtctcctccagcctcctctccctctggatgtgagagaaggagaagggtgaaccaagaaggtcctatgacttcagcccatttcagctttgttttctggctgccctatactcctccaaaggctstcgccttggttctagggctagtcccagcagtagaaaaagaaaaaaatagctgatcagagctggaagacaagggaggggaagaaggctgggtgtctctccctgtttttctggttattaagcagggcttggctttcagcggaatcattggcagtggcctctgtgtcttctccaaacatccaatccaggagcttacccagcacatctacactctcaatggctacccctacatggtaaggcagacctttgacctcttccacctcccttccccacctccagtaatacaaggtagaggaggcagccctctgagagctgcaggggatgggcagaaagatggtggcrgtgccctgagtttctatctcctcctgcctgcagatccatcatggtgactggttcagtgggaaggctgtggggctgctggtgctccatctaagtggcatggtgctcaacgcctatgtgacccatgtgagtgaagctggcagtgcctagggctgggacatgcagcccagtcctgggacagagagatggtacttctctagctctcatacctggggatgaggtgtgggggcaagatcttataaggaagcaatgggcaaggcttatccattgtataccaaacaccatgccaagtgacagacacaggcttgattcagacatacccctgggaccctcagtcttatctgctgtgatctcatctatcttgctcagctccatgccgaatacaatcgacagaaggacatctacctagcacatcgtgtggcccaagcttgggaattggcccagttcatccagtgtgtgagcctgggcttgaaatgggaagtgggatgggacccaggggctgagggtgaacaaggccccagtcatggggaagagctggtgatggaagaactcccgcctcaccaacctggttcccccagccacacatccaagaaggcagacgtggttctgttgtgtggagacctcaacatgcacccagaagacctgggctgctgcctgctgaaggagtggacagggcttcatgatgcctatcttgaaactcgggacttcaaggtgaggacttgcctgttacttccccacctatatccccagcttctctccctccttctcccccacatcctagcatgagccaatgattcccttagggctctgaggaaggcaacacaatggtacccaagaactgctacgtcagccagcaggagctgaagccatttccctttggtgtccgcattgactacgtgctttacaaggtcaggctcctcccttcaacatgctttcatatgctgtgtctctttgtctactaacctgtgtagatcctttgctcagctagtctagtcttggaccactgatgggtggaaagtggggtagcygggagctggttctctgggaagaggccctcatatataagcttctctctggcccttacttttcctaggcagtttctgggttttacatctcctgtaagagttttgaaaccactacaggctttgaccctcacagkggcacccccctctctgatcatgaagccctgatggctactctgtttgtgaggcacagccccccacagcagaaccccagctctacccacggtgagtcacccccaccctttccttggcccttgccccgcttgaagcagcccttccactcttgactctctcctgccccactgccctgctctgttgtaggaccagcagagaggtcgccgttgatgtgtgtgctaaaggaggcctggacggagctgggtctgggcatggctcaggctcgctggtgggccaccttcgctagctatgtgattggcctggggctgcttctcctggcactgctgtgtgtcctggcggctggaggaggggccggggaagctgccatactgctctggacccccagtgtagggctggtgctgtgggcaggtgcattctacctcttccacgtacaggaggtcaatggcttatatagggcccaggctgagctccagcatgtgctaggaagggcaagggaggcccaggatctgggcccagagcctcagccagccctactcctggggcagcaggagggggacagaactaaagaacaataaagcttggccctttagtggctctgcctttttccttgtagaggcgatgggagccaggggtcagtgtgactgtcacactacagaccttaaggctcctacacatcttctcctgtccccatacacgcccccacctcccacctgtaggcggtgtgaacgctgtttgtggcagaaacattttaattgtaaacagcaaggctctctgccaggcagcccagatgaacaggggtggcactgtgctggggtgaggtgctttctttgtgggaacgaaagcagacggcccaccctcgtctagccctgggcccctgtccccaaggccagctcgctgagcctgcgctcctcctggaagcggatgagggcatctctctggttgaccaaatccaccagcttcctcaggacctggtcctcagcctgccgatcagcagctgtctttaggttttctaaaaggaggagacaaagcttagagaacagggaactgggcagggaagcaggagggccacaacctaatcccagcctatgtgatttctataacccgggctttgtttcctaagctgccaaattaggagggttgccaacaccagtggttttctagcactactgagcagcacgattttttttgaaggagatcttatacaaaagccaactgtgcagctctgattgaactgaagtgagaaggggctttggagccccctcctctggcttcctcctgaattgtctcagaggtacacagactagagcatcatgttgcttggtcagtatctgagatcatgaggcttgcatgacacatccctgggatgtgtctgcttctccccacatttcacctaccttcccggttcatgtagcctcgtagctcctggtccagctgccactgtttctcctccagattcaattcctgcaccctgtggaggtcagggattgtagaagcagagctgtctaaggtgcccaaggggctggagcctggcccatgggccactgtcaccatccccttccccttacgtgatcatgagctcggcctcctcagccaccaggctgtttttcttgtcaacgagctgtagcagctgtcctacccatagtttcttttgctgttctggggaacctgagaagaaggaagatgggtagggtgatcaggaggcttccagccagcaccacaggagttacaggcttaggggagacaggagagccgggtgtcacaggtatgtgttagctgtgtggcatagccactgggactcctacgggctggagcgtggagctgaacacagtgctagaaggcagaggggtgtcctagcttgtcactcactgctctggcgcctcaaggccagctccagcttcacgccctcggcctctagctccctcaaggcagcctcaatctcatttagtcgccgttggatggtctgaggggtacaagacagaatatccaggagtctctaggttgctcaagaacagagcactggaggaactctgatctcagtctcagaactttgaccccatcagaattttgggaacccccgggcttcacctgggccttgcagaacctcttcatctcctcctccttcgcacggcgcagcagagtccgacgccatgttgggtagttattcatggtgcctgaggtcttggcaaaggtctgcagggcctataggagggtcaggccagtcagggatagggcctgggccccctggtggataggagtgttgtttggaaaggcagaaaataacccgtgctgaagtggggtaagctctggtagaaaaggtagaggccagagatatgacaggccaagtgagaagacattccaagagaagggtgcagtggaccagtgcaggtttctcctgtagtgggctggagagcgttttgtggctgcacgctggcccactcacctgttccacatctgagtccaaaggcacatcttcttcttcctcttcactggagaagggactctctttttcctccttctccatggccacaagagctgagaagaagaactgagacgttctactgcctccagcgcctgccccagtcaggcaacaaagagcatggtggtgacggaggccctgcaagtctggtaaagactgaatgtatgtgttggggcatgggaggaactgagaagaatggagcagaggagaggctgccacggcctgggatccccacaacttccctctgtattccccagaattcctctgcaggaagccagtgctcccaccctgtcccaccctgggtcagcacatctgtgaggatgggttaccttgagggctctggactggcaggccccagcccacaaagctgctctccagggcgtggcgggccaaggcggagcagctgcggggaggcttgggtggaggctccatttccgggtcaggggtaaggttaagggaggacaaccgctggcgctccgggctggagaggcggatctgccgacgggtgggctggctgggatctggaacaggaccggccccctcctgcgaggctgtgggagttgagaggcctggtggcatgctattctcacttggtgtggggagctcctggaaaagccaccatgtggagtgaggtcggggggtgaggccaccccttcggagcaaaggtgagccttggcattcattcacttaaaaccatttacaaacagtgtctggctgtgttttagatacttgagagaacaagaagtgtaagcagacaggcatccctgccttcacagagcttacatgctagtagaagacgacattcagttacccccagcaaagcgctggtttgacgagaccctcttcctcttcccatgccccaatatacatacacgccttcagtctttaccggactctcagggcctctatcgctgccttccgctttgtggtctgtctggggcaggtgctggaggcagtagaaatgtcctggaaagggtagagaggggaggaggcatttggtgtgggcagcccagtgcccagacacgcaacagtttatgaaggaaggtggggaaaacaagacagatttgcaggtgaatttctgccagcctcctgttcctcagaaccacacatctggagctttgcaggggacagagaagaccctgagctcaggagaacgaagtgccatcttgagcctgtttccatcctgtgcctctctacctcaagctctgtgtcccccaagcagggccaggcccagagtctctctggaggtctcccaggcccactcaccatctcctgggtgctgctcrtagccacctggccacagtgtggcctcacaggtatggcagcggaagcagctccggtggaagaaatggccgttgacacagaggcgttccaggacatagaggtgttccccacaaagtgcacacaggtccccagcaccggcctgcgtggacccccaggacacagggtcaggtggagccaaggccagctccaaagttctttccctcccatgaaacgcccctgccctgccctctccgggcctctgcctgcacacaaagcctggctctcacctcctggtgttgggatgggggtgtcaggggtacaccaggctctgggtcaggtggcacctcagtacttggggtctcggcctccatctaaggaggtaagtgctcaggcagggagggtagaggggcagggccagctgggaggggatgcgtacagatgaacacaaggggctgaagggaaggggagtgagactaggcagggaggctggatgggggggttacaggacctggggtggggaacaagacatgggatgagaaatagggaagacagtaccaggaaaggggataaaatgtggggtaggagaccgacccgcccctgcctgcattcacctccaagcgcagcttcttgccaccagcatcctctgcattttcctgcaataagtcctaacagctctaagtgtgatgttttgaggtcccagtcctccccactttctgaatgtcctcaccatcaccccaggatctccactgggtacccccctgcccactcctccctgctcagctccagccctgcctaaactctccaccttggcccgggatcgctgcagggtcctctgaagtttactaaggaataatacagcactggaggtccctggggaggcctggctgacagggcctgcggggagagccagggcatcagtgtggatggggggtgccaatactgtactctcagaacagtcactctccaacccagaaggacacctctcccaggctggccctcagagggcgccttcttcctctttctgacacacacacacacacacacacacacacacacacacacacacaccgccttctccctctgtcacacacacacacacacacctccccatcccagttatcctgcccgcctttccttcaggtcacctgggctgtgggccatgctcttgaaggcactgtggaagtggctgaggtaggcaatgaggcccagtgggtcactccctgctaccacggcctgtgcagacaccaccggtgtgatgcccagctcattctctgccacctttagtgcccaagcagttgcttccagagctcccagcccctgcagctctgagggttccctgtgggatgtcagggagaaaagccaactagagacaagaacctagccccactgaggggaggaagggcagcaggaggggagggacagcaagcagcagctggggtacaagaaggcttgaaggtaggtgtgtagtctctgctacccagtgcccaacccagtgacactactcctggctttgggggcctgtgccattcacaaagctctccactatctgaatgcattagagtctcacaagactgtcggcagatgcagggaagcacactgtctctaggattcaactggatatgctaactcctacactgagatcatgagagagaggtgggtctgccagggactcacagcaggccaggctgcagccggtacaccagggcacacagagctagcccatcagcccaggaggaagacaaatcggagacgtggactcccgggtacccagctgtctgctcctggcaccagcgtagcagctcctcctgggtgcctgccgaccctgggaaagaaggctgtgctgtgcccaaggccccctctgcccatcccaggcatatagggagcccagctgctgcatgtgggggttctgtaggggaggaggagtcagggacccacctctactagggcaccagcctaaagctgactatcagcagctctccatcccaattctcttttaaaaaaaatctctttggaataaagtagaggagtgaataaagtgaaatcgcaactggccacatagagggcagcagactaaactgggggcaggggaggttgccagcaccactatggctgtaacggtggttcaaacactaacgcgcttacattcagactggcagccaactgctgcctgtgcggtgctgcccctccgttcctccagcaggcccccaaccaacccaccagccaacaatgagtgctccggcacgctgctcctgtcctgaggctgcagctgctttgcagggaccacctgggcctcgctgggtagtacatattttggtcaccccttgggaggaaggcctgctcaccggtggctggcatccctgtatctgtcttgtcgttgttcctctgcacaggctccttggctagcacatcatacaggtctcgtacctaaggcagccccgctcaggtctcaaggcaggctggccacacagcccctgagtccaggggtaagggcctgccgggggtaggattgaccccaaagggcagcgactgggcagggagggcctgacctgggggaagggggttggcttgggaaggctggtgggtgtgtcgggggtctgacctgattgggrgtcactgcccggaggttcaggttggggtagcgggtggctgggtccagcccatactgggccacattgcgatgcatgttttctggggatgtctgtgacagaagctggtacaggctctcactgagggggtgasggtaaggggcaggggcatgaatgggagggcacctgtcagcacccacctctcaggaactgccaggccttttcttctgcctattcctccgtctattcactcagcacccctgcccct

SEQ ID NO: 95623 - DNA, 60052 bp, Homo sapiens
tctaccctttccaggacatttctactgcctccagcacctgccccagacagaccacaaagcggaaggcagcgatagaggccctgagagtccggtaaagactgaaggcgtgtatgtatattggggcatgggaagaggaagagggtctcgtcaaaccagcgctttgctgggggtaactgaatgtcgtcttctactagcatgtaagctctgtgaaggcagggatgcctgtctgcttacacttcttgttctctcaagtatctaaaacacagccagacactgtttgtaaatggttttaagtgaatgaatgccaaggctcacctttgctccgaaggggtggcctcaccccccgacctcactccacatggtggcttttccaggagctccccacaccaagtgagaatagcatgccaccaggcctctcaactcccacagcctcgcaggagggggccggtcctgttccagatcccagccagcccacccgtcggcagatccgcctctccagcccggagcgccagcggttgtcctcccttaaccttacccctgacccggaaatggagcctccacccaagcctccccgcagctgctccgccttggcccgccacgccctggagagcagctttgtgggctggggcctgccagtccagagccctcaaggtaacccatcctcacagatgtgctgacccagggtgggacagggtgggagcactggcttcctgcagaggaawtctggggaatacagagggaagttgtggggatcccaggccgtggcagcctctcctctgctccattcttctcagttcctcccatgccccaacacatacattcagtctttaccagacttgcagggcctccgtcaccaccatgctctttgttgcctgactggggcaggcgctggaggcagtagaacgtctcagttcttcttctcagctcttgtggccatggagaaggaggaaaaagagagtcccttctccagtgaagaggaagaagaagatgtgcctttggactcagatgtggaacaggtgagtgggccagcgtgcagccacaaaacgctctccagcccactacaggagaaacctgcactggtccactgcacccttctcttggaatgtcttctcacttggcctgtcatatctctggcctctaccttttctaccagagcttaccccacttcagcacgggttattttctgcctttccaaacaacactcctatccaccagggggcccaggccctatccctgactggcctgaccctcctataggccctgcagacctttgccaagacctcaggcaccatgaataactacccaacatggcgtcggactctgctgcgccgtgcgaaggaggaggagatgaagaggttctgcaaggcccaggtgaagcccgggggttcccaaaattctgatggggtcaaagttctgagactgagatcagagttcctccagtgctctgttcttgagcaacctagagactcctggatattctgtcttgtacccctcagaccatccaacggcgactaaatgwgattgaggctgccttgagggagctagaggccgagggcgtgaagctggagctggccttgaggcgccagagcagtgagtgacaagctaggacacccctctgccttctagcactgtgttcagctccacgctccagcccgtaggagtcccagtggctatgccacacagctaacacatacctgtgacacccggctctcctgtctcccctaagcctgtaactcctgtggtgctggctggaagcctcctgatcaccctacccatcttccttcttctcaggttccccagaacagcaaaagaaactatgggtaggacagctgctacagctcgttgacaagaaaaacagcctggtggctgaggaggccgagctcatgatcacgtaaggggaaggggatggtgacagtggcccatgggccaggctccagccccttgggcaccttagacagctctgcttctacaatccctgacctccacagggtgcaggaattgaatctggaggagaaacagtggcagctggaccaggagctacgaggctacatgaaccgggaaggtaggtgaaatgtggggagaagcagacacatcccagggatgtgtcatgcaagcctcatgatctcagatactgaccaagcaacatgatgctctagtctgtgtacctctgagacaattcaggaggaagccagaggagggggctccaaagccccttctcacttcagttcaatcagagctgcacagttggcttttgtataagatctccttcaaaaaaaatcgtgctgctcagtagtgctagaaaaccactggtgttggcaaccctcctaatttggcagcttaggaaacaaagcccgggttatagaaatcacataggctgggattaggttgtggccctcctgcttccctgcccagttccctgttctctaagctttgtctcctccttttagaaaacctaaagacagctgctgatcggcaggctgaggaccaggtcctgaggaagctggtrgatttggtcaaccagagagatgccctcatccgcttccaggaggagcgcaggctcagcgagctggccttggggacaggggcccagggctagacgagggtgggccgtctgctttcgttcccacaaagaaagcacctcaccccagcacagtgccacccctgttcatctgggctgcctggcagagagccttgctgtttacaattaaaatgtttctgccacaaacagcgttcacaccgcctacaggtgggaggtgggggcgtgtatggggacaggagaagatgtgtaggagccttaaggtctgtagtgtgacagtcacactgacccctggctcccatcgcctctacaaggaaaaaggcagagccactaaagggccaagctttattgttctttagttctgtccccctcctgctgccccaggagtagggctggctgaggctctgggcccagatcctgggcctcccttgcccttcctagcacatgctggagctcagcctgggccctatataagccattgacctcctgtacgtggaagaggtagaatgcacctgcccacagcaccagccctacactgggggtccagagcagtatggcagcttccccggcccctcctccagccgccaggacacacagcagtgccaggagaagcagccccaggccaatcacatagctagcgaaggtggcccaccagcgagcctgagccatgcccagacccagctccgtccaggcctcctttagcacacacatcaacggcgacctctctgctggtcctacaacagagcagggcagtggggcaggagagagtcaagagtggaagggctgcttcaagcggggcaagggccaaggaaagggtgggggtgactcaccgtgggtagagctggggttctgctgtggggggctgtgcctcacaaacagagtagccatcagggcttcatgatcagagaggggggtgccmctgtgagggtcaaagcctgtagtggtttcaaaactcttacaggagatgtaaaacccagaaactgcctaggaaaagtaagggccagagagaagcttatatatgagggcctcttcccagagaaccagctcccggctaccccactttccacccatcagtggtccaagactagactagctgagcaaaggatctacacaggttagtagacaaagagacacagcatatgaaagcatgttgaagggaggagcctgaccttgtaaagcacgtagtcaatgcggacaccaaagggaaatggcttcagctcctgctggctgacgtagcagttcttgggtaccattgtgttgccttcctcagagccctaagggaatcattggctcatgctaggatgtgggggagaaggagggagagaagctggggatataggtggggaagtaacaggcaagtcctcaccttgaagtcccgagtttcaagataggcatcatgaagccctgtccactccttcagcaggcagcagcccaggtcttctgggtgcatgttgaggtctccacacaacagaaccacgtctgccttcttggatgtgtggctgggggaaccaggttggtgaggcgggagttcttccatcaccagctcttccccatgactggggccttgttcaccctcagcccctgggtcccatcccacttcccatttcaagcccaggctcacacactggatgaactgggccaattcccaagcttgggccacacgatgtgctaggtagatgtccttctgtcgattgtattcggcatggagctgagcaagatagatgagatcacagcagataagactgagggtcccaggggtatgtctgaatcaagcctgtgtctgtcacttggcatggtgtttggtatacaatggataagccttgcccattgcttccttataagatcttgcccccacacctcatccccaggtatgagagctagagaagtaccatctctctgtcccaggactgggctgcatgtcccagccctaggcactgccagcttcactcacatgggtcacataggcgttgagcaccatgccacttagatggagcaccagcagccccacagccttcccactgaaccagtcaccatgatggatctgcaggcaggaggagatagaaactcagggcacygccaccatctttctgcccatcccctgcagctctcagagggctgcctcctctaccttgtattactggaggtggggaagggaggtggaagaggtcaaaggtctgccttaccatgtaggggtagccattgagagtgtagatgtgctgggtaagctcctggattggatgtttggagaagacacagaggccactgccaatgattccgctgaaagccaagccctgcttaataaccagaaaaacagggagagacacccagccttcttcccctcccttgtcttccagctctgatcagctatttttttctttttctactgctgggactagccctagaaccaaggcgacagcctttggaggagtatagggcagccagaaaacaaagctgaaatgggctgaagtcataggaccttcttggttcacccttctccttctctcacatccagagggagaggaggctggaggagactggagagtgcaggcaggatagggaagggctggcagggccaagagcctcctgggatgacaacaggcttcaggccagtgggcttctcacctccggaagtggtgtgcagctgggtaggtaggtgacagcttctgtctcaggtactggaagtcctgctcactccacacctgagggaagcggtgaggatgcctgcttggtctttccccagtgggacggtctgtccctcctcccagcctgggttccgcaccgtgctgcacaatctcacctcctccagcaaagccaggtcgaagctctcctggttcagaaagtctcccaggcgcckcatgcggtcggcccggtgcttgctcaagtacggaatgcccctaaggaagggaagagcggggcaggggaggcgactgctgggaccaccggcgctggggccagatgtggactttggaggttcgggttttccctacaccctgagatcgtggggcgggatagggggaggaaggctgcatgggtgcgaacggaaggtggcccccagaccgcactccgcagacgcactcaccagcagttgaggttgaagatccgcagtcgcagggagaagttgrgcttcatggttggggagctccaggggcgctaggcggctcgaactctccagcgacggccgcggtggggacgggggcggccggcggcgccttctccccagaccgttccttcttcgcaggcggcgcgcacaggtgggcaccaagccygcgtggctcaggtcgggcccgactcccgcgttcccccggcaaccggccggctgttcccaatcaggcgggccgccaacccggaaaggcgatccgctgccgaaatccgggcgcccaggctcggtaagggccgcgcgctaggaccctgggggtccggagagcgcccccgggtgggcggctcccggttccttttcctccaagctcgtccccggcggtcgcggccgcccgcgcgccggcggcccagcaacaggcgcaaagttgaggaaaggcccagccgccacgggccgccctcgacccgcccctgggccccgcctcctgcgagcggcggaggcgggsccgcgcggttgccggagcgacgcgcagtgtttggggtcaccgggcgtccccgggcgcggccatggcaaggccgcagccgtgcgggcccccgcacgctaggtgcggctcgccgtcgctgccggagcggccgctgcaggtgaaggtggtggggctcttcagctgccccaactttcagattgcgaagagcgccgctgaggtaaccacagagaaacctccgtcgtgggcggccctccccgctacccgctctcggccgcgtggactgcaggcgccgcgcctcctcgaggcggcgggggtcgaggccccaccggccgaggaaggggctggcgtgtcctggccgggcgggctccgtctggaggaccgggaggagagtataggggggcaagtgcgggtccgggggcgggcgttccacttggcgacytttaaagggagaactgagcgaaggaagggttcagaaccgcgctgggagataaggtaatcccctccgagacacacacacacacacccgcagattttgttctacgtcaattttttctttaattagagatatttaaatttatggaaaaatgattactatataactagctaatttttacaaccccgccacctcggcccaagcgatttttgttaactattcatgcggggagattcttttctttgaattttatagagccgtcactgcgttccaatcgaactagatgcttcacaagtgctttggaaaatcatttctttgtaaacactcagaacgatactaaaggaaaagcacttgaggaaactggaagaatttggccagatcagtcatgctgcagcacacttacaacctgaaatgcaggagaaatgtatgaaatgtcggcatgtagaattcagcccttcttacagggtttgctccagaaatgctgtccatggcaaacttctcgccgaagctcacttgactccaggaccatgccttaattaatgtttttaactcccgaagtacccagctggatacttgacaacaaaatgttcccaaatagaagatatcttggcgcggtgactcacgcctataatctcagcactttgggaggcagaggcggagttctagaccagcctggccaacatggtgaaaccccgtttctactaaaaatacaaaaaattagccgggcgtggtggcggtctctgtaatcccagctactcaggaggctgaggcacaagaatcgcttgaacccgggaggcggagtttgcagagagctgagatcgcgccattgccctccagcctgggcgacagagccagaccccgtctcaaaataaataaataataaaaagaaaacaagtgatcagaagtctgtgaaaataatacatgaatcatcaaaagtagaaattgtggtctgtgttgcttgggcagacgggatcagcaaccttttattaccaaagttaatggccatgaagttaattacaaagttaatgtattaatgagtttcagagattttttttctcttttttttcgctctttttctgaaggcacatattttctgtgccgactccacattgtaaagaaagtgttgacaagtttttttctgtaaagtccagatagtaaatatgttaggccttcttggcaatagggtctcagtcacacctgtttagctttttcctgtgttgcaaaagcagacacagagatggaaatgaatgacagtattccagtaaaaccatattatggacacgaaatttgacttgcgtataattttcacataacgtgaaatacaattcttttgattttttagaattgtttacaggccgagcgcggtggctcttgcctataatcccagcactttgggaggctgaggcgggcagatcacgaaatcgggagttcaagaccagcctggccaacatggtgaaaccccatctctactaaaaatacaaaaattatccaggcatggtggcgggcgcctgtaatcccagctactcgggaagctgaggctggagaatcgcttgaacccgggaggtggaggtttcggtgagctgagatcgtgccactgtgctccagcctgggcaacaagagtgagactctgtcttaaaaaaaaaaacaaaaaactgtttacaaatctaaaaattattcctctccaacccctgatgtagaagacagtaggtcgagaaaacaatatctttattgtattaataatgtcaattttccctttcttaaacttttacctactgtagttatattcaaatatgaaaattcagctagttttttttttctttttttggaagagatgggggtctcactgtgttgcctaggctggtcttgaactcctgggctcaagcaatcctcctcgacctcccgaagtgctgggattataggcatgggccacggtgatgcccagcctctagttctgtcttaataaaggatatctgaatgtattcctaacatgataatttgtgagcgatcccagatgcctgattaactgacaaagatttagatttgtgttgaatgttcccaacacaaagaaataataaatgtttgagatgatggatatgctaatgataagtatacattatatgtattgagacatcactaccccataaatatgtgcaattattatatgtcaattgaaaaataaaaaacaaaatgtaaaaaccaaacacacaaaagattgaaatttgtagagaataggaacaaatattgcatacattttcatttggatatagtccgttctacaacaaatactaaattactaaaaagacatgtgtttcatttgaaaactgctggatttatagtttattccagatggttagaaatagcagtcaaccgggccaggtgcggtggctcacgcctgtaatcccagcacttcgggaggctgaggcaggcagatcgcctaaggtcaggagttcaagaccagcctggccaagaccagcctggccaacatggtgaaacctcgtctctgctaaaaatgcaaaaattagctgggcgtggtggcgrgtgcctgtaatcccagctacttgggaggctgaggtaggagaattgcttgaacccaggagacggaggttgyagtgagctgaggtcacaccgctgcactccatcctgggcaacagagcgagactccgtctcaaaaaaaaaaaaaaaaaaaaaaaagaaaagaaatagtagtcaacctgcagtattgcctcaaactgagcacagacactggaactgagaaacaagatgcrtcagctattgcttggggacagaaggaaatggcctaattattgttgccctcttcatgagtattcccaaagtaggccacactcacatcctggttttctccccttggaatactcacccctgatgacctgtgctaggccagcaccctcttttggaccatgacaggacctccaagcactgtccctagcagggaagtgccacctgcagcagctgtcacttttccctttggtccatctacttcccaaacccactcagaaaagaggcctgttactgcttcacctgtgttctcttgctttagagggagacaaagtataacgaatatcaagaaccaagcctggattgctaaccaataagaattttctctgattcctgcagacaatctatgtcaaactagaacatattccgtatctaaacctaaactgatttcgtacttctctttttcctaaggggtataaccacaacgttattatctttttggtcatcccccattcatcagtgaattaaagcaagaacatttatttatttattttagttataagtaaagtatctgtagatccaccgaggtttagcaagagttgtacttagggaaaaactagtcttaaagaacatagcatatcacaaagctattggcgttaacccatttatgtattcctctctttattcagctgctgtgtgccagagattgtggcaggtgggaatataggaatactaagacagagytttttttgttttgttttgtttttttgttttttgttttttgaaatagagtcccactctgtcacccaggctsgagtgcagtggcgtgatctctgctcactgcaacctctgcctcccaggttcaagtgattctcttgcctcagcctcccaagtagctgggattacaggcacacacccaccatgcctggctaatttttttgtatttttagtagagacacgtttttgccatgttggccaggctggtctcaatctcctgacctcaggtgatctgcccacctcagcctcccaaagtgctgagattacaggtgtgagccactgcgcccagcctctaagacatagttcttggcttcgaggcacttatacaaataagctccctggactggggagcaacttggaggtgaacacaagggcctctgacagcgagcaaggaatatctcagtcggactgcatggcctgggcttgtgttgtataaaacttctggaaaccccgtaaaaattggggaacatgattttgactttaaaagagaactaactctaaaataattattctatttcgaaatccagaatctgaagaataatcatccatccaaatttgaagatcctatattagttcctcttcaagaatttgcatggcatcaatatctacaggagaaaaaaagggtaaaggatatttggggtgtgggggatatagacaacaagccaagttttgcctgaattatttatgcattgttttggaaaaactgaaagagtaattttagtgtaactagattttatttctctacattacgtacttttcctaaattgtattaatcatttaccaagctaggtgttttgtttttgagacagggtctcactctgttacccaggctggagtgcagtggggcgatcttggctcactgcagcttcaacctcctggattcaagcagtcctcctacctcagccccgcaagtagctgggattacaggcacacgccaccacacctagctagtttttgtatttttttaacagatggggtttcaccatgttgcccagggtagtctcaaactcctgagctcaagtgatccacccacctcggcctcccaaagtgctgggattacaggcgtgagtcactgagctcggccaccaagctgttttttgttcttgtttttgtttttgactacaacatttgggctgggtgtggtggcccacacctgtaatcccagcactttgggaggccaaggcaggccgatcatgaggtcaggagatcaagaccatcctggccaacgtggtgaaactccgtctctacgaaaaatacaaaaattagctgggcatggtggcgcgtgcctataatcccagctactttggaggctgaggcaggagaatcgcttgaaccaagaagtcggaggttgcagtgagccaagatcccaccactgtactccagcttggtgacagagtgagactctgtctccaaaaaaaaaaaaaaaaaaagtgcaacatttacagaattttcctttggaaagcatgagataaaggtaaaatcaatggtgccgtttgccgctgatgatggttagttaccctgtctccctgcacatcacttatacttcctctcacaccctggcaccgagctggttaatgtggcctggccctcttggcccttaaactctggaaagtgttgatggtgtacatcacagagacagccaggggcttctgtgggactgttgcctggggaagctctgatgacagacaccaagctcccacagggcaaccctgtcctagttgaagcttccttctctgcattctcccctctatctataccctcagagaactccacaccttagggctagcagagcttgtccagggatgatagttttcctgttgggtgacaacctgttcagttggtagtgctgcctggagcatgtgatgagaagaatgctaaggtggcatcctggcttagcaatatcctgtgttggggagggtgggatgcttgtcacccctggcctagtcttgtagatggtcccagtcctagtttccctgccccaccccatctcccccatggctgatgaaacctcatttcccttgaccagagcagtttcgattgttctgtgctgggttgcacaaggatgtcctgtgatcctgtgattaattatcatggaagcagcacggttttatgagaccacttcattctctgttcagtcacatgaatggtgcaagactgaataagaataccatttgttaagcctcacatgttcatagccttaaaagattctcattggaattcaaatagaaccaaacacttacaattctgcttattatatgacagacagtattctagacacacacacacccacacacacacacaaacacacatatatattcttttttttctttgtttgtagaaacagggtctcgctattttggccaagctggtctcaaacttctggcttcaagcaaccctcctaccttggcctcccaaagtgttgggattacaggtgtgagccactgtgcccagcttatatacataaattataatccttccaacaactcgggtgacaaacggtcctggtttgcctgggactgaggggtttcctaggatgtgggaattttggtgctaaaagtaggatagtcctaggcagaccaaaactgttggtcaccctaatataaaacaatactttttttttcttttttatcaaacttgttatgtgacctaccagtgtcatgctctccacccacaggaaaactgtctcatggtttgtggtttgcacccactcctcttttgmattcccactggactctaggaaattggtgtggattctattccccagtttccctcccctttcagcctaggttacctcaagatgttttgtgttctcttcctcctgcctttctcatgggtcttgaatgaggctttccagttcatcattgctgcttcgttccacctgtgatattccttatccttcctttcatccccctccctcccttctcctctggctgtttgttaccttaaccttttcttccttctcaggtagtcccttgtccttcatcaatgtaagtattgtgtcttgtgtcataagtagtgcttcttagctcatttggtctctctgaactcactaggttcaactggccttaggcttcagcagaatgaagtgccaccctaagtggatggcttcagggccattgggaaggtccctctctctgctccaaagaaggcagcctcatactcttagtgctgaaggccctagaaaccatcaggtccatgctgttcacatgaggcaggcgagcacgcctccctaagtatagaggagacagaggaaggcatttacatctttagcctccaaataaaacataccttctactgcatttttcctaccaagctagctgaaatatccacagtgacatttttttctcccgtttagaaagttctgggtcctggcagggtgtggtggctcacgcctgtaatcccaacactttgggaggccgaggcgggcagatcacctgaggtcaggagtttgagaccagcctggccaacatggtgaaaccccatttctactaaaaatacaaaaattagctgggcatggtggtgggcgcctataatcccagctactcgggaggctgaggcaggagaatcacttgaacataggaggcagaagttgcagtgagctgagatcacaccattgcactccagcctgggtgacagagcaagactcggtctcaaaaaaaaaaaaaaagaaagttttgggtcctgtaaaatatggtaacactgataaatttaaacactccaggaagtatcgaccaactggctctatcagtgatttatagytcagcataagcaagtctcttctctgcctagaagcaggttttgataagggcataggaagcaagcaataggatattaaatctgctgaggagaatgaagcaagttggcaagttgaatgtaaactgttcctcaaactagtgtttctcccaagtgcagtctctagaacagcaacatcagcacctcctaggaggttgttagaaatccacattctggcgggttacagtggctcacacctataatcccaacactttgggaggctgaggtgggaggatcttgagcccaggaattcaggaccagcctaggcaatatagtgagacctcatctccaaaaaacaaataaataaatgcaaattctcaggcaccatcctagaatcagaatattgggggaaagggagaggggactcagattctgtgattctgagaatctgagatcaatgagaatctcagattcagtgattctcattgcccacgaaagtttgagcatggctgttccaaattattcatggtttgcctggctggtactgggtaataataaaccagatctcctcagaggggaagtccctcaagcccaccggagatttagaaggtttaccatcagcgttgtgttgatgaaaacactaacacactgcattttgaggggctgaaggcactgtgctgaggaaggtgagttttcttcctcactgctcctagttgtgccccagaaatccctgttgaccctcgtaagtcatttcctaaccttaagccccacactacccaaaaaacattttcccagtcctctgcattgaaccccatgtcttacctggaccccctatcctttccaagtatgcacacagtaaaatgtgctttaggaatgaagacagagactgaattttgtttgcaagttaatatattaacaggtatgccaggctcatgatgatttttgttaccagattaccatttatcttctattaatgtgtcgacctaaaaggaagaagctgaaacaaaattaatatagagtgttaatttgggccaaggttgaggactgcagcccaggacacatttccaagttgccttggggagtgctccagagaacaaaatagaggctcaagtgtttaaagaaaaaagaatgaatcagaagaagggcgattacaaaagctgttggtcaggaattgtcattgatttacagaaataacattggttagcaattggctatatgttgttgaactatagggtggatggctttttatggctgtttggtgtcagtctagagcccacatagtaagtggaggtaattatttagctcaagggagagtgagacataactgctattacattttaaatgcctttctgggcatgataatttaaaggggctcacattcctcagataaattttttttcatttgtaacatttttatgatactttttagatcattctttacttttagtgatgtcagattcttaaaaatgttcttaagttctttctgagagcaaaattctgaaggacgataaaaacttatttttaaaagattcaatactagagttgacaaattcagacctagagttgatcctaagctctggcttatgggtttagcaagttttccccccacttcttacgtttttttttttttttgtccttttcccttacaggaactcaaaaatgaaacctgggaatattcttcctctgtgatttcttttgttaatggtcagtttctgggtgatgcattggatctgcagaaatgggcccacgaggtgtgggatatagttgacattaaaccctctgcactttatgacgcactcactgaggatttttccgctaagttcttaagagacaccaaggcaagttatactaacttttaaagaaaaattgtggaatctttgaccctttatattgattcagcattaattattgatgtcctaatgaaggagattataaaaaagtaggagactaagtttaaagcctagttccatttccatttgcaaaagattgtaatatggtggtatgtaaagcaagtgtgtctcacagcccgtgggctgcacggggagatcatctctgtgcagacatttttacttcccattagagatttatatgcatgaattacctattttaaaatataaagaccaccccctcagagaaggtaaaacctatcatccattcatcttgagtgtgaaatatttaaattaagactgtccaacatctaggcaagagctgctgagctaagagaatggaaagttgtttgaagaaaggtgacattttaaagcatgaacacaggccgggcgcggtggctcatgcctgtaatcccattactttgggaggccaaggcaggtggatcacaaggtcaagagatcgagaccatcctggccaacacggtgaaacgtcatctctactaaaaatacaaaaattagctgggcgtggtggcgtgtacctgtaatcccagctactcgggaggctgaagcaggagaatcacttaaacctgggaggtggaggttgcagtgagccgagatcgcaccactgcactccagcctggtgcagagcgagactccgtctcaaaaaaaaaaaaaagcatgaacacatagttagcaagagcaagcccagayaggctgtgccagtggggaggtttccagtggcagaggatagtcatgaagcatgaggtccagggatgagagatagttatcaggatgtgatggcagtaggggtggaggkactttgcagtcctgctcagaaaccttcttgtagcaacaactgcattgtgcagaaaatcatttcatgcccatggcggcctgtgcctacagtgagccaatgctaagatctgagttgtgcataggtaaaggccttgtctcattcatccttgttgaaccactgctcaaacagacctgaaacataataggtgctcagtgcatgtttgattgaataaacagtgcactttgacaatgctagaaactctggggtgtggggaggcatttaatgttcaaacagttaattcccaaagggtcaggagtctagctgtacatgccctgggaatggcagggggacagcaaggaggccagaatttgtggggaaagaagctgggaagatgagtttcagtcaagattcttggtgccagcattaccaagctcctctgattgatcgaaggcgaaaaggtgtgtattgaaaggatgctgttatctcacaattgacaggaaagctggacaacagctttggaaaacaggcgggaaccaatgaggcctggcagcaggaagacatggccagagtcacactgcagggatgtgctgccagggaactgccatggcactgctggcccttgttcacacctccaccttcaatgagattaactgttcaatgcttcagtgtcttttcatcactccctggagacctaagcccaggcaggagcacctagctggcaaggctaggtcatattcccaaaacctggtgctctcagcatggggagagggagaatctggcccctttaggttctagtgaaggtggtgggaccctgtgaggagttccccagataggaagggtactcagattttaattaggaaaaaaaaaatccaatagatcctaaagaaagattgaggctgggttatgatttattgtccatctgaacgaaggagttggattttatccagaaggaaactgaaccaacagagctttccataaaagagtatgacgtaatcctctgtttttctggaaaaatgtttaggtctgtgcagaagcaggctggagtaggggagagcttgggagcaggggattggatagcagcatgggctggacataatgaaagcccgaaataattcgtggcagtgaggatagaggatagtcatgaagcgttccagagacaatagattttttttgcacagagggtggacttttcttcctgaataaaacccagggatttgtttacttccggttagaaccatatggtagataaatatgcttgcctgtttggctgctagatgactgggacattaccttgtgttgcattcatttgaactcttattggcattttcagaactatctattctggactatctcataaagataatatcttgatgcgcagggaagtttaatggtgtctgaatggacagtaagtccatttcctaagtcagccatgatttccaatatatcctctttatcctcctgagcctctgaagtttactatattatgccwcctattctttagttacactattctgttttatacttaaaaacttgtagtatagaagctgagaggcacaaattaattataattagtatggatggaacagttcattgctagatgccagatagcacaatattatttcagtcttttcattaaaaaaaagttagagtgacataaaaaatatgatacatttaatttcatgtttcctagattcttaagaaagaggacaggacaagttatgcaccttgctcaataaggtggttttttttttttttttttcttcatagggtctcactctgtcacccaggctgtagtgcagtggcacaatcatagttcactgcagcctcaacctccctgggctcaggtgatcctattgcctcagccttccaagtagctgggactacagacacatgccatcatgcccagctaatttcttaatttttttgtaaagacagggtctcaccatgttgcccaggctggtttcaaactcctgggctcaagggatccacccaccttggccccctaaagtgctgggattacaggcatgaaccagggtggcattttaatgtaggagaatggtgcccaagacttgaaatgtactccattaaatgtgctttagcccctaaatgaatgctattatgttgaaactagcattttcattttgaatgcctctttgtagggctagacaaggtctcacaaatgttttcctctatgagaaaggatatcaagtgaagacaagctgagggcatctgtgcacatgagggtattattgaatataacttgaaagcccagcatccttctcttccctatctctggtgctacacctgctatggatatagggacctgattttcccactcagaacagatgtggcctggctctggttagctaatctgtgctgtctctgaaaatccaggacgcacagtaaccaaatccatgatgttcatgatggatccttcccaaaaataggaaagaagcgaagtagagaagaatcccctgtctgttttcttccccacactaggtgtggctatttccacacctagttgtgatgtggtagatatctaggccatgtgtttcactcctgtgagataggttaatgttctccagagctttcactctggaaaggtttttaaaatgtataatgtgggctgggtgcggcggtagctcacgcctgtaatttcagtactttgagaggccaaggtaggcgatcccttgagctcaggagttcgagaccaccctgggcaacgtggtgaaaccccatctctatcaaaaatacaaaaattagctgggcctggtggtggtgcatgtgtgtagttccagctacttcagaggctgcggtgggaggatcacttgagcccaggaggttgaggctgcaatgagccaagatggtgccactacaccccagcctgggggacagagccagaccctgtctcaaaaataaataaataaataaatacaataataaaaattaaaatgtgtaaagtgggttataaaaacttgataaaatgaaataaactaatacaagtcattcacttaattttactgtaatattatccattggtaatgttattgaaatcttttcactaaaaatattgtatctgctgtatttttggtcatttctgaaaactttcttgtaagactttgacctgcattatatgattctccttaatcttcacagcatgatttcgtgtttttggacatttgtattgattcttctccaattggaagattgatttttgaggtgatacttttttttatatgtaagtttgtgggggtaggatctataactgttggagtgttaaatatttaatctttgaaaccttttgtctttattttgtagctatactgtgatgtgtgtcccaaaacatgtaaaaattttcaggtcttgtgcacaggaaaagcagggttttctcaacgtggcataagactacattacaaaaattccatttttcatcgaatagtacagaatggctggatacaaggagggggtaagtttaaaatcttaaatacgagttaattgcaatatcaaatgagaaggtccaaactttcatttatctttatgaaatgtatgtagaattagatatacttaaaattagacgtatttaaagaatgctttatatagccaaataatgaagtaagatatttgtattctttaaaaaacaccctaattattaaaataaataaatctaatttatgttaccaggaatattccaaattcaaaaatgacataggagagtagggtgacattttattttaccaattttatttttacaaattttaaatgctcacctaaatacatagtacctagaaatacagyggttttaataagtatgctaagagtgggaatttgaaaatatagtaaatggaaaacaacttatttctcaccaaacatgttacattattacaagtaaaaagaaatgtctaaaggattttggtttctatgttctctttcttttcaggtcagtcctttggttttacatagactaggtgtctgattaaaagcatggaattgaatattgggcgccttttgggggatagtccataggaagcaaccaggcagtaatttacacataattggcttagtgtcaaaggaaatttgcttgaactcgatgacacatggagaagtttaaattagtttttaccattttttatatgatctggaacattctgaggctgacgaggagaaaaatatagatatattccaagcatcctacatgttaaagcaggtattttccctttggtttctccacagtgagatcataccacaaatattgttatctaacctcactttcaagtgtttttccattttgtgtctttccactgaatatgtggtgtctatctaaccatgccaatgaacataaacatacaaaatgtttagcatctgcctagttttttttatcatattgctataccagtttaattaattccccattggtgaacatttagatggttttctattttttgttagtataaaacatttctcaaggggtcctgttaatattaggggctcctgacaatgagttcagtgttgactctcatgtgctaggctttcagatgctgtgttcttttttttttttttttttttgaaacggagtctcgctctgtcgcccaggctgtagtgcagtggcacgatctcggctcactgcaagctccacctcccaggttcaagtaattctccctgcctcagcctcccgagtagccaggatagcaggggcccacccccacacctggctaatttttgtatttttttagtagagacaggtttgccatgttggccaggctggccttgaactcctgacctcaggtgatccgcacgcctcagcctcccaaagtgctgggattacaggcatgagccaccacacccagcctcagatgctgtattcttttgtttcgttttatttttgtttttgcttagctcccaccacccttgcaagatttgggaaaagtaggtcatattatttgtttgtgtttttatttatttaaagtaaaatttccaaatagtaaagtgcacagatcttgggtcatattttcaaacagtgagacagcaatgttaaggacggcttgggaaaaagttggattgctagattcaaatccaagctctgattcatgtaagttataccatcttgataagctgcttagcctctctgaatcagtttcttaatcataaaatggggataatgataagaatatcacaggatgtggtgaggattcaatgacctggtgtgttggaagtgccaaactctggaaacatcctctctccctacagatgtccagttcccaygatccagaccccaagagagggttcttgaatctctcacaagaaagaattcagggcgagtttgttgagtaaagtgaaagtaagtttattaggaaagtaaaggaacagaagaatggctactctgtagacacagcagcccctgagggctgctggttgcccatttttatggctatttcttgattatatgctaaaggtggataattcatgcttccctttttcagaccatacagggtaacttcctgatgttgccatggcatttgtaaactgtcatggcgctaatgggagtatagcagtgaggacsaccagaggtcactctcatcgccatcttggttttggtgggttttgsctggcttctttactgtagcctgttttatcagcaaggtcttaatgacctgtatcttgtgccaacctcctgtctaatcctgtgactcagaatgccataaccatctgggaatgcaacccagtaggtctcagcctcattttacccagctcctattcaagatgaagttgctgtggttcacgtgcctctgataccacgggactatgtagaattttggaggacaggagctaaacgtggttttgtgctgtgccttaggatgcctccaggcactgttgcttgccctttgggactaacaggctgtacccagtcaacactgcctgcccctcctcctcacatcttatcttctgacctcttacacactcggttgcacacacagcctctggctgcctcctaagcacatcaagcatgcatkggccctgaggcctcgtttattttgcctggggcacataccgcccagcctgttcctgcaggtatcccttgtttcaccccctgcccccaaccccactgtctgtttctgattattgcccagagattgtctgggcaaggccttaccggaccaccctatatgaaactgccatcttcctgtccacacactccgctcacccctcctgccaccctcctactccttaccttgttttatctttcttcctagcacttttcatcattagacatactaccatatgtttcttagttcatttgtttattgtctgtttctctaaattccatgggggcagaaatttttatctattttattcactatggtatcccacgtactacaacagtgcttgagatatagtaggtgcttaataaatacttgtagaaagaaaagaaggaagagagtgtaagaaggaaaataggtggttaaacaggaaacatacattctctgcatttttaaagtccaaagttaagatagcaagtcattataccactttggttggattccccctctggctccctcgaggcctacttccttcagaaggattaaaaaaaattgataccaacactttgttaatcaaagaaaatgaaataaacttttttacacaaaaaatgatcatgttttacataagactaaaagatatatatatatataaaatgggtgaggatatccaggacccaccaaataattccagtaagaaaattcaaacacttaacaaagattcatttttcaatagcccattagtcacagaacaattacccaactattaacaattaaacctacctgtatattaraaatacatttcatttcacccatacatccaacacactttaaaatggatagaggaaaattttattaactggctttagaaaaaaaaaagtacctattgaactcatatattattattattattttgaggcagagtttcgctccgtcatccaggctggattacgtggcaccatctcagctcactgcaacctccacctctggggttcaagtgatcctcctgcctcagcctccygagtarctgggatacaggcacrcgccaccatgcccagctaattttttctatttttagtagagatggggtttcaccatgttggccagactggtcttgaactcccaacctcaagtgatctgcccacctcagcctcccaaagtgctgggattacaggcatgagccaccgtgcccagctgaactcatatattattgcttaaagagaacataccaaattcttacctcagtgttcccttgtaaaaaaaagtggaaatccatagtccagagagactctttaagaatgagcgctgctatggtgtgagttggctgaaggttaagagatatgaatgaaagtagtaaaaacaaataaaaacagaagaatgagccgctgataagtacaatatgtttataactcataaaacatttcatgttgtgaattttctcgagcataccaaataattaatatgcttcaggctttccatttgacttacatttataggatttctttccagtaggagctttcacacgacttttaaattaattgtctaaatgaacttttctgtgtttttctaactactagggttctaatcaagtgtgcatttttatgttcataaggtccatctccagtgtatattattatgtgactttgaatggatttgagagaaatgaagacattcccacattcttttttttttgagacagggtcttgttctgtcgctcaggctgagtgcagtggcacaatcacagctcgctgcagcctcaacctcctggactcaagtgatcttctcagcctcctaagtagctggaactacaggcacacattaccatgcctggcaaatttttaaaaatgtttttgtaaagacagggtctctgtatgttgcccaggctggtcctgaactcctggactcaaacaatgaatcctcttgcctcagccccaccaaagtgttaggaatataggcatgggtcttagcctgtcacccaggctggagtgcaatggcacaatcatggctctcactgcagccttgaactcctcccacttcagcctcccaagtagcagggattacgggcacatgccaccatgcccagctaatttttaaaaatttttgtaggccaggcacggtggctcacgcttgtaatcccagcactttgggaggctgaggcgggtggatcacgaggtcaggagttcgagaccagtctggccaatatggtgaaacccccctctctactaaaaatacaaaaattagctgggcgtggtggcatgcgcctatagtcccagctgctcgggaggctgaggcaggagaatcggttgaacccgagaggtggccgttgcagtgagccgagatgatgccactgcactccagcctgggcaacagagcaagactctgtctcaaaaaaataaattttttttgtagagacagagtctcactatattgcccaggctggtcttgaactcctggcctcaagtaaccctcccacctyggcctcccaaagtgctgggattacaggcatgagccaccacacctggccactttccatacattcagagctcttctccagaatgagttgttttatgttatcaaatagaactagaacaccaaaggcccttaccgcatttcctctattcataagacgtttcttcagtgtgagttcagaaggatcttttgagataaatttaatgcattttattatcatcatcatcatattgagcagaatgatgaagatgatgataatgagaaggggcattctagaagcatgtgatgctgcatgggcatgacactctgccaaacactgcctgagtgctctacctatgttatttcatttcatcctcagagctacctgtgaggcagttaccattatccctgtttgtacagataagcaaacaggtttggaaaaagtaactgacatcagcattttaatcaaagatcatctgactttaaagtttgcttttaaccactatttggcatctctgaatttgttgtcagaagtatagcaataatatcagatatacaaggctgaattcaagagggtggatatggccacaaaaaagaatagtaaatacggattgaaatggtgtcaatataaaatattcacctaggagatctgaagcagaggacaagagtaatgttggtgggtgtgggagggagggggcaagggaatgtgaccaacgggtaggtaagttggcaggggagaagaccacctgggtggatttccctgagagaaccaacccctaggatctgaagggattgatggtgggggggccctcagcttccccatttccagattcagccttcagccatgacaacttcctttcaagagctgcctggggctgggtagtgaaccatggctgagttttaggtgagtcaggttggagacttaaggcttgtcaattaacttctgagccagctttctgagtagtataatttaaatgctgcatggcctttctgggataaattctctctacatgcttggtgctgcatcagttttctttgaaaaatagcacacacacttttattgtaggtaaattgctcatactgactttaaaaagcatagtccttcaataaatatttattgagcactgtattaaaggaggcagcagaatagagctgaagttagtagacagatactgatggggaggatgggggagagaggacagacctcagagcccgctcttttcactagagttagctttgctcctcttttagctgtggatagataaaaaataacttgttcatggagtctttttatagtgggagcattgcctaaaccaaaatatgcgtagcatgtgaacacctgaaaaaaaccttgttacattataggaaactttatttccaatatgctaggtaaataaatgagttatcactataggatatgaaattttgaacatgaattctgtttgcagcacctattttttattcatattcttttttttttttttttttttttttttttttgagatggagtctcacactgtcgcccaggctggagtgcagtggtgcgatctcagctcgctgcaacctctgcctcccggattcaagcaattctcctgcctcagcctcccgagtagctgggattacaggcaccagccaccacacccagctaatttttgtatttttggtggagacaggtttcaccatgttggccaggctggtctcgaactcctggcctcaagtgatttgcctgcttcggcctcccaaagtgctgggattacaggtgtgtcaccgcgcctggctctattttttatacatattctaaaaataacttacttttcctgttttagcctcttagtttaatcttgatctcagaaaaacaagatagactggaataacttatgaagaaagcagaatttatgtgaacatacttttgaaaaattgtgaccacaattataatttaatgcttcatcctttcaaaagtttgcattatcatgaatgtaaaagtgcttataaaatacaagtgaaattattatagtaatattttcatagtgtggatattgaataattaggtaacttattctattcattggtataagtggaatcatattgcattcttttgtttttttttttgaaatggagtttcactctcgttgctcaggctggagtgcaatggcgcaatctcggctcaccgcaacctccacctcctgagttcaagcaattctcctgcatcagcctccctagtagctgggattacaggcacatgccaccacgcccagctaatttttgtgtttttagtagagacagggtttcaccgtgttggccaggctggtctcgaatgcctgacctcaggtgatctgcctgcctcggcttcccaaagtgctgggattacaggcgtgagctaccatacctggctgattcctcttttttttttttttaatcgagatggagtctcattatgttgcccaggctggtctcaaactcctgggctccagtgatcatcccacctcagccttgaaatcatcattgaaagcaaaattttttccctgtcattattgtatcctaaatcttttcatctcaaaattctaatgtttatttgttgctatttctcagatatagtgtatggaaaaggagataatggagagtcgatttatggtccaacatttgaaggtatgtatctttacattttgttagttatatattagttgattattcaaacttaacaggactggacagtttcacaattccaaataagatatcactgggggcaatacttacagtacaagcaagaggtaaaaatgagcagatcggggggaagcgccctaaggcccgaccagagcagcttcatacacacatatttttttcacttacctaatgatattatttctttagggtaaatcccagaattaggattgtagagtcaaagggaatttatatttttagggcttgtaatttcccgtgctgatacttagaactggtaccttgataatcattctatttagattgctgtcaggtggccaggtatggtggctcacgcctataatcccagcactttgggaggccgaggtgggtggatcatttgaggtcaggagttcgagatcagcctggctaatatggtgaaactccatctctactaaaaatacaaaaattagccaggcatgatggcgcacgcctcccagatcctcaggaggctgaggcaggagaatcacttgaacctgggacatggaggttgcagtgagctgagatggtgccactgcactccagcctgggtgacagagtgagactcggtctcaaaaaaaaaaaaaaaagaaaaaaagattgctgttggtagaaaaaccctgtataacatttacaacaaaagcaggtgacaaggtatctacctaaattccacaatacaaacagttaaggacaaacaacaaaccaacagccatgaaatctgcacagtatcagcatctgtgtaggggagggcagggcttcccaagaatagggtacttaggatcccctaagtagccaatagtgtgtgagtacagggggcccccaggaaggttggaagaggcaggagcagtctaacccctgtgtactctcgaaactgatctgacaaggctctcttccaggacaggctcccatgcagatggaactgttgggaatggcatcaaaattatccaggatacagggacaatcatgacaaagagggaataggaacagagtcagaaatttaaggaagaaagccacatgcttcaatatgcaagattttcaacatgcaagagggagctttttgaaactagaaaatctactttctttctaaagacacatcttctaaacatttaggaaaactaatgtcaccctatataacaaagagagtttctctgaaagaaaataatgtttattcaggaatagggtattgctgtaggcatayatgtgccataggaaacgatgtgcatattcaggaaggtaaaggcagacaaagggttttaaaggaaaattggggaagattacgtaattgttttgaaatgattatccttggctatagcgatcagtaacaagagtccaaggttggactggacaggtgtccctgcagaagtattaatatttcctgcataaggtcgcaatggcctttatgcaaggttgtggcttttgtagttctttgtgattgttttgctatcaggcatacaagtgtgagagttctctgttcatagctttccttggctctatttgtcagcattttttaaacatgactacattttgattctgaccactattacactaattttatattagaatgaacaatagaagtttcaaggtgattataagaataaagagaataaagagcagagtaacatcagcaytgatagtgaatgtaccctagaaagacatgctcataggatacagttgacccttgagcaacatggatttgaaatgtacgagtccacttaaagaaacttacagtcagtttctttaaaaaaaaaaaaaaaatagagacagggtctcactgtattccccaagctggacttgaactcctgggctcaagcaatcttcccaccttagcctcctaagtaggtgggactactacctacttggaggaccattttttggagaagctgccactgcagctataccatcaggtgtgaaaaccttgcacttttttgtgaaatacttttacctttttttttcttttttttttttttaagagacaggatctcactttgtcgtccaggctaaagtgcaatggcgtgatcatagctcatggtaaccttaaactcctgggcttaagggatcctcctgcctcaacctcccaggtaactaggactacaggtgcatgccaccacgctggctaattttaaaaaaaagatttgtagagatggggtcttgctctgttgtccaagctggtctccaactcctgggctcaagtggycctcctgagttggccttctgagtcattgggattacaagtgtragccaccaagcctagcctgcaaaataccttttttgtcttgtattgaaaatgcagcttttatgtgggcacaggatggctataagaaaggcagacctgtagactctaatatgatttgagaaaaatcaaagctattatatgacaacttaaagcaaaaggaaggtaaaagatctaaaactggataatttaattccagcaaaagatggtttgataattttagaaaaaagtttggctttaaaaatgtccagataacaggagaagcagcttcttctgaccaagaggcagaagataaattccaagatgtcattaacaaaatgagaagaaaaaggatatctacctgaacaagttttatggcagacaaaagtgacctattctggaaaaaaaaaaaaaaaagccacaaaaaggycaggcgcagtggctcacacctgtaatcccagcactttgggaggctgaggcgggtggatcacctgaggtcaggagttcaagaccagcctggccaacatggtgaaaccctgtctctactgaaaatataaaatttagctgggagtgatggcaggtgcctgtaatcccagctacttgggagactgaggcaggagaatcacttgaactcgggaggcagaggttgcagtgagccgagatcacgccactgcactccagcctaggagacagagtaagactctygtctcaaaaaaaaaaaaaaaaaaagccacaaaagacatttattagtaagagaagcaagcactatcatttaaggcaggaaggaataggctaactgtactgttgtgtgccaatgcagttgggtttatgatccagactgctcctaaccataaagctgctaacctaaacaccaactgccagccttttggttgtacaaaaaggcctggacaatgagaaccctttttctagattggttacatcaatacattctccctgaagttaggaagtaccttgccagtaagggactaccttttaaaaagttcttttgatattgaacaatgatgcccctggccaccagaacaccatgagttcaacaccaaaggcatcaaagtggtctactagtccccaaacacaacatgtctaattcagcctctagtcagggggtcataaggacctttaaggctgattacacatggtactctatggaaaggattgtcaacattatggaagagaaccccaatagaaagaacgtcatgaaagtctggaaggattataccattcaagatgctattgtcgttatagaaaaagccatgaaagccatcaagctcaaaacaagtttccgctggagaaaattgtgcccagatgttgtgcttgacttcacgggatttatgacagagcccatcaaggaaatcatcaaagagatttgtggatatggcaaaaaagatgaggggtgaacgttgtcaagatatggatcttggagaaattcaaggcctaatatataccacagcagaggcattcaaagatgagttgatagagatgagtgcctccgaaccagtgycagatcatgaggaagaagacgtagaaggagcagtgtcaggaaacaaactgacactagacaatctggcggaagggttccagttactcaagactacttttgacttcttttacaacatagacccttttatgataagagcaatgaaactaaagcaaagagtggaataaggattgatactgtatggaaacattgctagagaaatgaaaaagcaaaaagtcaaacaaattataatgtatttccgtaaagttaacactgagtgtgaccacctttcctgcctccccttctacctcrtccacctctctgcctctgccaccctgagacagcaagaccaactccttctcttcctcctcctcagcctactcartgtgacaaggatgaagactgttatgatgatccacttccacttaatgaatagtagatatattttctcttccttatgattttctttataacattttattttctctagcttattttattgtaaggatacagtatacaatacatgtaacacaccaaatatatgtaatcgactatttatgttattgataaggcatctagtccattgcagactattagtagttaagtcactggggagtcaaaagttatatgtggatttttgactgctccgaggggttggtgtccctaaccccccgcattgtttaagggtcaactgtagatcaaaactgtaacagtctatatcaaaataagctaaaagaagcctgggcaacatggcaaaccccatctctacaaaaaatacaaaaattagctgggcatagtggcacacacctgtaatcctagctacctgggaggctgaggtgggaagattgcttgagcctgggaggcagaggctgcagtgagccaagattgcaccactgcactccagcctgggcaacagagcaagaccttgtctcaaaaaamaaaaaaaaaaaaaaaaaagctaaaagacattaagaaaatgatacaagacatgaaagagctcataaatcagaattagaaaaaaacatgatgcaacagagctgaggaaagaagggctgaggaaagcaatgaaagaaaaataatttcagaagtgagtaaactacaaggaacataagaggaaataaaaatacaacatatgtcctraaagaagtacaaggtaggcagaggaatttttttgtttgctttaatttttgtgggtacatagtaggtgtgtatctttatgaggtacctgagatattttggtacaggcaagcaatgtgaaattatcacatcatataaaatagggtatccatctcctcaagcagttattctgtgtgttacaatccaattatacacttttattttaaaaggtacaattattattgactatagttgccctcttgttctatcaaatacgaggtcttactcattttttctttttttttgtgcctattaaccatcctcaccaccctcctttaaccctcactacccttcccagtttctggtaaccatccttctactctcgtctccatgattttatttgttttgatttttagatctcacaaataaatgagaacatgttatgtttgtctttctgtgcctggcttatttcacttagcataatgacctccagtcccatccatgttgttgcaaatgactggatctcattcttttttatggctgaatagtattccattgtgtatatgtaccacattttctttatccattcttctgttgatggacacktaggtagcttccaaatcttggcaattgtaaacagtgctgcaacaaacataggagtgcaggtatctctttgatataatgatttcctttcttttgggtatatacccagcagtgagattcctggatcatatggtagctctatttttagttttttgaggaacctccaaactgttctccatagtggttgcacattagtttacattcccaccaacagtgtacaagggtccctttttctccacatccttgccagcatttgttattgcctgtcttttggataaaagccattttaactggagtgagatatctcgttgtagtttgggtttacgtttctctgatgatcagtggtgttgagcaccttttcatatgcctgtttgccatttgtatgtcttcttttgagaaatgtctgttcaaatcttttgcccattttataatctgattattaggttttttcctgtagagttgtttgagctccttatatattctggttattaatccctcgtcagatgggtagtttgcaaatattttctgtgggtttttgtttgtttgtttgtttgttttgagacagagtctcactctgtcacccaggatagaatgcagtggtgccatctcagctcactgcaacctccgctgcctgggttcaagcaattctcctccctcagcctcccaaatagctgggattagaggcgcacataactacacctggctaatttttgtatttttagtagagacagggtttcaccatgttggccaggctggtcttgaactcctgacctcgtgatccacctgcctcagcctcccaaagtgctggaattacaggtgtgagctaccacgcccagccatgtcttcactttgttgtttcctttgttgtgcagaatctttttaacttgatatgatcccatttgtccagagagtttcctcgatgttttcttgtagtagtttcatagtttgagggcttagatttaagtctttaatccattttgattttatttttatatatggtgagaggtaggggtctagtttcactcttttgcatatggatatccagttttcccagcattatttattgaagtcttttcctcagcttatgttcttggcacctttgttgaaagtgagttcactatgagtttgtggatttgtttctgggttctctattgtgttctgatggtctatgtgtctgtttttatgccagtatcatgctgttttggttactatagctctgtagtataatttgaagtcaggtaatgtgattccttccgttttgttctttttgcttaagatagctttagctattcggggtctttcatggctccatgtaaattttaggattgttttttctatttccatgaagaatgtcattggtaattcctttttagaagaaaacagctttattgaacaggcagtgttacagctccagtggtgttatagctctgtgactgctcctgcagagcagagctaccctgtaggcagagagtagcagctcaggacagttttacagtcacatttatacccacttttaattgcatgagattaaggggcagtttatgcaggaaagggatagtaacttttggatcattagatgccatggaaaaggccagtaactcccaggtgttgcctcggcaacagtagattgacatggcacattgatggacaggtctgattgaaaggtgctttcgccctggccctattttagctagtcctcaatctgatccccacctctggagtcctcaatctgagccccacctctggagtcaagtcctgcctcctacctcattttcccctcagaaattagatcctcctccttaatattaagagggctgcagaagggtgaaggccagtcttctgtaactgcttgctgctgagctcatggccataggccctgcctagcactggaggagtaaaaaaatctctggatacctgttgtaacgggcccacaggcaggacactttcattctccaggtcagtagatgggataggttggaagccttgtgccagcattgttttttacctggaactgttgtaatctagaaaacacaaacttttactaagaggttaaataagcaagggccaaaaattggaaacaagaagataactatccaaggttctatgagaggtaaaaaccaggtgagacttgggaaagcacttgataattgaccagctatagttggggtcagtgccctggttatatctgtgtaaccaggtagcttgttcatagatcttttgaatgttaatctcaacttgcctagagttgttaaaatatgtgcagcaggttttattaataactacacagactccaccatgttcagctagtaaataatccaatgctagtctgttaatgagaactgcatttgccaaagagcctaaggactcttgaattccctttaatgcctgacctgtgttggtggctaaggattctagggattgagtcaagttcattagagttggctcatggtaggcaaagctgccccggggtgctgctagtcctatcactgccaattcctgccagaattactcctattactcacttacttctggtattcttgggtgttatgcggttatagacagtgactcctggaggggcaagagtggccagcatacattcacctctgttccaagtttttgatatacaagggaaagctactcctaagggaaaaggtgacttcctagggagttgggagcagttcaggttgtaacttcttcccattcatgccacaaacaaaaatgagccggttggggcacaaacagaagccctattgggatgtggtatttatgctttactgtgaaattgtgtctagagagatatttttcccctgttccgatgggggtggcgggacaccctttgttttctggaagggggcagtactcccaccttcccagactaggcagttgtttttcccttatatgttctgatccagaaggcaccatatgtggtctcctcacttacaagtagaatcccatttaccttgctgtggccttgggaatgtggcaactaaagttgaatcagagcatcacagggaggcttccactcttgtgtcatgaacacaacagtgaatgcaaaagatagaatcattagtgcgctagagatatagatacccaatttcccaggtccaggtaatgttggcagggggttcaagtggaatccgttaagtgggggagagttccattcaacaagtaggagtttgggatttgaagatcactattttaggaggtcagcggggatggtagtgaggtttcttaggtaagccagaagacagaactctctatcctgggaatgttcatgacaatccagcagccatgaagatgattccctgatgcaatacttgtcgaaatatttattatagagttgtgttcccacccatactggaccaaggtgattaggagagcaaacaggatgaacagtgacaacatggtgttccgttgggccttagcatggcctctacacccaacaaggacaaaagaggtgtttcccaggagcttggctaaagctacagaaaataagtattataatcaggaagaagaaaaatattaaagctccagcagaaatggtgccaactgatcttccacatgggacacgggtgaagatctctccaggatacctcagctgcgatgggctcagcgaggctgcctcagtgggaggggcttgcatcaggtggtaatccatgggtctgctggtcagagaagcgggccctacacgaggcagatggcactatggccaccctgctagtgggctgtcattggtattttgatagagattgcattgactctagattgctttggatagtatggacattttaaataatattgattcttctagcctatgaacatgaaatagctttccatttttggggcatcctcttcagtttctttcatcagtgttgtatagttttcattgtagagatttttcactttggttaattcctattaatttagttttatttgtaaatgggtttactttttagatttctttttcagattgttcagtgttggcatatagaaatgctattgatttttgtatgtttttgtatcttgcaactttactraatttatttatcagttctaatagacttttgtgtrgagtctgtaggtttttctaaatatgagatcatgtaatctataaacaaggataatttgacctctttcttttttttttttgagatggagtctcacgacactgtcgcccaggctggggtgcagtggcgtgatctcagctcactgcaacctctgcctcctgggttcaagtgattctcctgcctcagcctcctgagtagctgggattacaggcacctgccgccctgcctggctaatttttttgtatttttaatagagatggggtttcaccatgttggccaggcttgtctggaactcctgacctcaagtgatccgcctgccttggccttccaaagtgctgggattacaggcgtgagccaccgcacctgacctgacctctttctttccaatttggaccccctttatttctttctcttgtctggttgctctagctacatagtactaggagaactatacccagtcttttgagggtttttaatcatgaagggatgtgaattttatcaaatgctttttcagcattaattgaaatgatcatatggtttttatccttcattttgtcgatatcacattgattgatttgcatacattgaaccatccttgcatctcaaggataagtcctgcttggtcatgatgaatggcccttttaatgtattgttgaatttggtttgtaagtattttgttgaggacttttgcatcagtattcatcagaggtagtggcctgtagttttctttttatgatgtgcctttgtctggttttggtattcagggtaatactggccttgtaaaatgagtttagaagtattccctcaggaggaggaaatttttttaaaccaaaagtaaatgaagaaaggtaaaaattatttacaggaaagtgacaaatattaaagaaagaggagatttaacatttagatgatacgtatctctaaggaattaaattaatgcaggggaacagaatgaatgctaagactataattaaagaaaacttccctaaaatataaaaaggatttgaggttctatatcttattttaggtggtggttatacagcatcaaactgatcatcaaatatgtatttattaaattttaataaaatgcatatatcttagatgtttgatgcattttgacaattgtgtatacctcaagcatatgtttataccgtaagtaaaaatatttatatatctcaagtgaaaatgtttatacctcaaataaaagtatctaaaaaattgaaaccacttattgaaaatgcataccatgaacctgacaatttgaagcagaacaaccaacaccaagacatattttcctaacattattggacattgaagaaaaattatttgggcatctagggaaaaagagcaagtgatttataagggaaagaaaattagattatcatattctttgacagcaacactttatgccagaagaaaatggaataatatatttatgaactcaagcaaaggaaatgtgagcaaggattttatatccagtcaaactgatgttaaattataaagggcacacaggtttatcaacatgcaagacttcagggaatagtgttgccatgagccctttctgcagaatctcctgtagaatgaatttcacacaaccaaatattaataataagagagaccttgacacacaactggtggtgagcattaatcatattattatttgtgaatttattatattcagtgaggagtacgccaggtgtggcagcatgcacctttagtcccacctacttgggaggctgaggcaggagaattgcttgagcccagaagcttgagaccagcctgggcaacatagcaagaccccatctcaaagggtgagagtatgctgtatgatgatatgcttgggcagtggagacaaagtctatttaaaaaatagaagaaaatgaatatatacaagttttattttttaactattctcagtaaagtacactggtgatggtattattagtattgttattttgagactgttgtatatgtaatgtgggataaagtcattgagtaattatggaatataaaaatttcatcattttgtttgtccttgagaatcaggattctcaatgtggaagaaagaagatagagatgaaatgtaatagaggctaataagaatattccatagtcctggccgggcgcggtgcctataatcccagcaccttgggaggcygaggcgggcagatcacgaggtcaggagatcgagaccatcctggctaacacggcaaaaccccgtctatactaaaaatacaaaaaattagccaggcgcggtggcgggcgcctgtagtcccagatactcgggaggctgaggcaggagaatggcgtgaacccgggaggcagagcttgcagtgagccgagatagcgccactgcagtccggcctgggcgaaagagcgagactccatctcaagaaaaaaaaaaaaaagartattccatagtcctgaacatgactttaaactcaagaagtatcaaatgtgtatatatatagctctatccactgaaaaggtctataaacaayggccacaacccagtagcaatgtgtagtcctagaatttagattgttgttttgaaatgtcatttcttacttaaagaaaccagagtctctgggagaaatggcagatgccagatctcacgggggaaatctacaaaatgagcctggaacctcatgttctattagatagcaaaagtggcctttgttgtacgatgctgcaaagtgtggagatttcttttctgaaagattactggggtcatgtcaaaaggcctcaggagccaatttgaagagggtctcactgaccaaagatggagtaattggagcttcacaaacaataataattgcagttgatcaaaacccaacaaatatctcaaatctgtgagtttataatgatattataaaataaaggctaatgggttacctttggaggaatactagaaaatgaatttatcatgaaaagtggtatgtatagggaaagaatcaagcaccacctttcctatatgaactgtactaaattgtaggtaaggggagaaacatctctttataaaagtattgccactgataaatgaaaaggaaataatagaattggaatgtcaccattttgctgcccccagtgaaataatggatctaagcatttgctgcatcaatctactaatttcacaaaaacagagacaaccagacatgatgaggcttctgttgaaagaacacactaccaaagaatatgagtctgactaagcctctggactcagctgccgatttgcaagaaatacagtcagttctgttgtattgcgacatatgtgttcctaaaaaatctccacactttggccagacatggtggctcatgcctgtaatcccagcactgtgggagactgaagtgggaggattgcttgagcccaggagttcaaaaccagccagggtaacataacgagatcccatctcttaaaaaaaaaaaaaaaattagctgggcgtggtggcatgcacctgtggtcctagctacttgggaggttgaggtaggaggatctcgagctggggaggtccaaggctgcagtgagccatgatcatcatgatcatggagccatgatggactccatcctgggtgacagactgagaccctgcctcaaaaaacaaaacacaaaccaaaaaaatctacactttgcagcattgtacaacaaaaaccactgagtttattgtgaaaatgaggtttaagaaaaactttcttgatggcattaaaaaacaggatagtagcccaaaaaacccagcaatacagttttacatatgttaaatggtcacgaaacatacakaccttgcaaaagacctgaagttcatgaaggtgggtatggaaagagttgcagcttttgagcaattttgaagtggcggaaggagggttttctgcaatcagaaccctaggtgtgggtgggagaggctcagaacagctccagggtagctggtagatatctgaggtgtgtgtgttcctatgtggctccatgtagctgaatgcagttttcatttccctagtgtttctcatggtggaagaatgtaagtgggggcgaaatccataatgtacaaggctttccctaatatatccatcaagttgaagcaaatgtgcattttcaaaacaagtattatagcagaactgacgggacagaggacagagcaacatgctggactgtaccatgtgtgcaatcaacagactccagactgggagaaattctcgaggttaaacagctcaggttcattagtaatagataaatgtaaggaaaagaaagggatggaggtaagaacctgcagattaaaagaagcttaaaagcataaccaattttttttaaatgggaaagactaaactatagtgcttaggaatgcatatttggatgttaaaactataaggaaacattaagtgcatggttatataaaagtcgggggaatgattccttttgggtgagagaggggcttgacaaggaactttgggcagaagccagcaaagtttcttttcttggcctgagtggtagttaaaagggtatatgccttatgataactttatacattagttttctgtggctttttgtgtctatatttgaataaaatgaaaaggttatgaaaagatatctttttttttttccttttttgagacggagtctctctgtcacccatgctggagtgcaatggcgtgatctcggctcactgcaacctccacctcccaggttcaagtgattctcctgcctcagcctcctgagcagctgggattacaggtgcgtgtcaccatgctcagctaatttttttgtatttttagtagagacggggtttcactgtggtggtcaggctggtctcaaactcctgaccccgtgatctgcccacctcggcctcccaaagttacagacgagagccactgcacccggccgaaaagatatctttattgaatcgatggccaaagtgaaagggaaaaagtaatagctactttccttctgaattcctgcagacagctctatcaaatgaaaacatgcaagtgacaccattcctttagtcattcataaaatactaaactccaaagtaggtgctcacatggtgctagggcctgtggcaacaaagatggtataaccgagtttctactcggaaggcttgtagtagttttgtgcagacagatgttaaaacagatcaactacaggtgctgtgccagttgctgttagagaggagggaactgagtgctgtgggaaaagaaagaatagctgcctggagagttgggtgcggcagcacagagaagctttgagttgggtctgcagcaacacgttgcagatggagaaaggactctcctggccccaatccctgatgagaatccactgtacctctccaccccacagccattatcagagcacccaaatgctttgtgctcggaggcacagcctcagatggaacgtgggcctcctgtccagtaggagactgatctgttcactcatctccttgcctgacctcctagacacccctgagtctctgctgattatccctcaccccatccttagactgttgtagtatctgctctccagatagaatctttgctgtcctcactgtgcccatggagtcccagtgcattcagtgaagtttttattattcggttggtctggtaggacaaaattagaaaaaatccaggaagcaatcaagtgggaagaagagatgttccagaaggaaagatgagtaactgtgaaagcgagagcacagctagtcctcagaacagytaaggcatgggtctttctccctcatcccttcacctgcctgggaatgtgaatgcagcagccagccagtccttcctccacatttctctcatgggttcctacttccatgagatgcagaattaaaactggggctgtgaaaaactgcaaccacaaaactcacttttgttaagcttaacacaaaaataatgcaataagtaatgtatcatttaattagattatyattttataaacgaattaatttttttttaacctagggaaagtctgttttgctttgttttgaatcacaacttttaaagtcctaaataaataggctctttctacttaggcaagtttcagctattggtttctgtgtaggttgttcccacacatactttatccctggcagaagcactcaggagaaaataggcttgaatcaaacctatttactgaccagtggcctcactcctcaccaaacaaagaggacagaaattcctctatgggggctttcactctgtttaaacctaaagaggctcagcccccttcagcagtgctgtttactgccaaagggtgcattttgatatcatggaagtataaagcaacttaatgttttaagtgttaaatgaaatgtaccaaaaatttactattagaaaaaaaatcagggaaatttatgttggtaaataattttttwaaaaaaaattagagctagccaggtgtggtagcacacacctgtagtcccagctactcaggaggttgaggcaggaggccttgagcccaggagttcaagactagtctgaacaactagcaagatgccttctctaaaaaaatttaatttaatttaaatttaaattatagctctttaattttagagctttatggaagcttgaaaagaagtgtaaagaggcagaaggaaagcagaggggttggaaagatcgagaaataccgaggtgagcagacgattaaagagtgagtcagagagacacggcagaacaaaataacacgtaaattacccttgtcttgtaatactttatgtctgcaaagctagttagagttaatatttaaaacggttctttcttacacatcattttatttgatgcatacaagatcatgccaagtaggccagttacggcatgaccactgagcgatttccgtaggccctggcattactgcctggctggaagcagcatagcctcgggttcttaagattcacatacacattctggacttagagaatccacacayagtcgtttagttttcacactttttttcaggtccatacatttttaagtttctaagtcagggactacctgcaccttttaaaaatataatttattctgtccctttatagcaatggttctcaaattgtctctaaggatttccatgctgtcctaaataaatgtgttcaggagatgagagggctctaggcactttttttttttcttgagaccgagtctttctctgtcatccaggctggagtgcattggcgcaatctcagttcactgcaacctccgcctcctgggttcaagcgattcttgtgcctaagcctcctaagtggctgggattacaggcatgcaccaccacacccagctaatttttgtgtttttagtggagacggggttttgccatgttggccagactggtctcgaactcctggcctcaagcgacccacccaccttggcctcccaaagtgctgggattacaggcatgaggcactgtgcctggctgctctaggcactttttgcactgttttatacatgggttttcacataggtagcagtttctttgataggtattatgattaactgctttaaaattatcccacaatcacagaattttttataaaaatgttacaactcatcaattttctttcccaatttttaaagaatttaagaaaaataaatcagaatatgtaaaagcaatgacaaataccattctgttaaaactctctgaatctgggccgggcgcggtggctcacgcctgtaatcccagcactttgggaggccgaggcgggtagatcacgaggtcacgagatagagaccatcctagcaaacacggtgaaacccygtttccactaaaaatacaaaaaattagccgggcgtggtggtgggcgcttgtagttccagctactaagggaggctgaggcaggagaatggcatgaacccgaggcgcagcttgcagtgaaccaagacygcgccactgcactccagcctgggcaacagagcgagactccatctcacaaaaaaaaaaaagaaaaactctctgagtctttgctgtgggcagatttccatttcatgcaattttctgtgaaattatgagtttttttctttatttcactgaaatgaataaggagcatcagcgtaattatatagactcatttgtacaaacatgcctcatcagcatttcataaggtttcaggggtctttattcagttttcaacttaccaggctgaaagtaactacccagatatggcttaatcacttagtttgcttagttttgaaacttaataacagcagttgcagtttaataaaatcttatagacagttaatattcatatttctcagttattctcagaaatttatgaagttattgaatgaaaaaattcactgaatttctcatccattatttccttctgtgtatttgaacttggaggcaaagctgggaatggtacgtcttcaaattggtagcctaataatcaccatacaactctttttacttctaaatcttacactaaaaaagctattgctttccacaaaatcttggtcaatccaaataaggtttcagattaaaatttatttgaagattggccaggcacggtggcttacgcctgtaatcccagcagtttgggaggccgaggcaggcggatcatgaggtcaggagattgagaccatcctggccaacacagtgaaaccctgtctctactaaaaatacaaaaaaaaaaaaaaaaaaaaaaattagccgggcatggtggcgggcgcctgtagtcccagctactcgggaggctgaggcaggagaatggcgtgaacccgggaggcggagcttgcagtgagctgagatcgcaccactgcactccagcctgggcgacagagcgagactccctctcaaaaaacaaaaaaaaaattttatttgaagatcactaaaaataaacaattaatttcctttcatcatcaacatttttaaactacatggaatgggaaagtacatggaatggaaatctgcccaaacatttagggccacatttatgccaattaatgtgctgagaagcctggagctaaagccatgaggagacaaggttcctgccttcacctactagagaagaaatgccatgtaaaccaataattacatcgagtgttataaggactgtccaagaacgatgtgtaagatgcttggggggttcgggggaaaggtcaggtccacaaaagacttctcagaggaggtgtttttaatgagtatggtggtagtttgaaagaaataccaaaacagcacgagaaagtttgctgacctttattcttgattagaatactgtatatatttccttgtacattattaattttcttagcacacttgtttatggtaaagacaaactaaagctgaatgttccaatagttctaataaggttttacaggtttttttaaacagcccatttgcatgtttgaaaataatttgaaatgaatagaatatttacaatttggaatccattgataaatatgattgagagtgttaccaagggttctatttgttccttatatgttacaataaattgagataatagaaatgtgctaatgacctactgattattgtctttcctagatgaaaacttttcagttcctcataataaaagaggagtacttggaatggccaacaaaggccgtcacagcaacgggtcacaattctatatcacactgcaagcaactccttatctagatagaaaatttgtggcttttgggtatgtataktgtagatctatttatataatattcacacctgtaaaaatgtcatttaaaaatatttggataagtattgtatatagtgtataggtagctaaaaatagggcttaaatgcaaaaataatacaaatagagacaaaagtatttaagaaatattttgcaagaagtttgctatctataaaaacacagaaactggccagacacagtggctcaggcatataatcccagcacttttggaggctgaggtgggagattgcttgagcccaggagttcaagaccagcctgggcaacatagcgagaccccatctctacaaaaagattaaaaattatctggcttggcatggtggctcatgcctgtaatctcagcactttggcaggccaaggcaggtgaattacttaaggccaggagttccagagcagcctgcccaacatggtaaaaccccgtctctactaaaaatacaaaaattagtcaggcatgatggcatgtgcctgtaattccagccactccggaggctgaggcaggagaatcacatgaacctgggaggtggttgcagtgagccaagatcatgccactgcactccagcyggggtgacacagcaagactctgtctcaaaaataaataaataggccgggtgcagtggctcacacctgtaatcccagcactttgggaggctgaggcaggcagatcactcgagggcagaagttccagaccagcctggccaacatggcgaaaccccatctccactaaaaatacaaaaaattagccaggcgtggtggcatgcacctgtagtcccggctactcgggaggctgaggcaggataattgcttgaacscaggaggcagaggttgcagtgagccgagatcgtgccactgcactccatcctgggygacagagcaagactctgtcttaaataaataaataaataaataaataaataaaaattagctgggtgtggtggtgtgtgcctgtagtcccagctactgaagaagtttcggtgggaggattgcttgagcctgggagccatgattgtgccactgcactccagcctgggcaacagaatgagaccctacctcaaaaaatatataagacaaaataaaaaaataaaaacagaaaccatttaggcatagtcacaataatgttctttctgtgtctctatctatccatctatcaaatcttcagccttaaggatattatcaattctttattactatgaatcataccacagtgcttaataatatactaatatgtagaagtgaagaggtgaagtcatttcaataattgtccatggacatcatgaagaggtagatgaaaactattcaagttacatataactttttttactgaacgattttaaatatgaaaacatcacaggtaatagttattattagaatattattagcaagatgcttaaagccatgtggacctaaaatggatgatagaaatacttttcatcactccagtgtttcatctctctctttaattactgagtgaatatgaggcagggcttacttcttcttccctgagataatgtaaagtgtttgtatttttctgaataactgttagatttattccacccactccatagggataattattgactctccagcacctggaatgtcatgccagtgttcattttaaccacagtaattcctttagtgtaatgctttctgtgatacttccaggttgaaaaaatagaaagtgtattttcatccataggatatctttaaagagataacattacattaatagatgcataacgtaaaacaatgacttgtcttaagttttccctggtccccaataaattgtattctgatttcgaaaatgcattattaaattagttttaaggctggacgcggtggctcacgcctgtaatcccagcactttgggaggccaaggcgggtagatcatgaggtcaggagttcaagaccatcctggccaacatggtgaaaccccatctctcctaaaaatacaaaaattagctgggcatggtggcacacacctgtagtcccagctactcaggaggctgaggcaggagaattgcttgaacccagcagggggaggktgcagtgagccgagatcgcaccactgcactccagtctgacgacagggtgagacaccatttaaaaaaaaaaaaaaaagttttaaatccaaataacatttcttgaatcatttaaatccaaataacatttcttggaccatttaaatctctgtcatgttgctgacagtctctgtcctctaccaacttcctggtgatcttttatatctcagctaaaggtacctttctcaaacacaaacatgactactttaaaacatttagtgcctccattaccacctccacatctgcacagcctgaagtctagagtggcattccaggtcctctggccccacatcctttgttcagccttcacttctgctgttttcccaactcattcaagcagaatttctttaggcacctgcagtatgccattcatggtactcagtgctggggaaaaagagcgacaaggtacaatccctgctcttcagcgagcttagagtatgttatgaaaacaaggtcaaatagccaatagctatgtgacagtgagacatgggccatgcaaactgtgtacagggtgcattgggagatgggtaagaaaacaccctccaactccyttcaccaaagcgaacacagagcsttacagggcggcaatggagtggagagcactcggtctccttttgatggttcctgttctctatgatccaccttcctcttggagaaatctctaatttttgttatcaccactctgtcctcagggaggcactgccctccttctattctgctattctgcctcaagtatgatctcagtgtattccttaaatctccaaattaaaaacaaagtctccaaatcacagttggggctgggctggaatatttaaataagaccttacagagtgctaagggagaagcagaaatgtaaaacataataggcaactagataatctagttaaactaatgaaatagaactccttcagggataccttccttcccagttgtagggctgcctcttccctatcatctctcagtatccccaggtgtgtctgagcttttggaagcccagacatggttagcaaggtccagagagataaagaatattcctctctgatccaagacaggcactccttccaagcccagtttccaggtacatgaacctgccgctctctcagatggatgacactgggaatgtccttcaggaaagactgtagcaatccacagagcatggctggcccagtgggctcatagggaaagaatatcacaaaacaagcctgtaagctctccattcacgtgcacccattgtagaaggggtttgggggagggggaattatttcattttaagagacttgtaaggtgggagggggtcatggaaagtttcatgagaaggtgagctgaggagtgaaatgtcacgtagaagttagccagatagagaagctagaaatcacaatgagtcaaatcagttttaggaagagtgaagaggtttcgcagagaggccctgaggagtaagagagcatcttatctacaagtcatctgttctgggcagagcttggtacttaggggagaatggaaagggtggaggccggataagagggtcagcaagggtccaactcccaatggactgcgggtgccatgctgctgagcaggaacctcacgcaaaggtgatgggggccatgggagaattttacattgtgagcgacataaccagcttctcattttgaagaaaaaatctctttagcagaagtgaggaatgaattggcaaagaatgaaaaggaagtagcaagaccacttaagaagctatggttataacaggccataaatgaagtcctgctctaaagcatcagcagtacagatgagcaggtgataagtggacaaactcaagacattgagaagttagagtagagaagcactttgggagtccgaggtgggccgatcacgaggtcaagcgatcgagaccatcctggctaacacggtgaaacctcatctctactaaaaaaaatacaaaaaattagccgggcgtggtggcaggcgcctgtagtcccagctacttgggagactgaggcagaatggtgtcaacccgggaggcggagcttgcagtgagcsgagatcgcaccactgcactacagacttggtgacagggtgagactccgtctcaggaaaaaaaaaaaaaaaaaaagagatcgagaccatcctggccaacatggtaaaaccccgtctctactaaaaatacaaaaagttagccacgcrtggtggcagatgcctgtaatcccggctgctcgggaggctgaggcaggagaatcgcttgaacctgggaggcagaggttgcagtgagccgagattgcgccactgtactccagcctggcgacagagtaagactgtctcaaaaaaaaaaaaaaaaaagaagttagagtcgggggtgagggcctgagaggagtccaggccagcactgtccagtagaactctctgtgacgatggaaatgtcctgtattctgcacggcccagtatgacagccactggccacatgtggccactgggcacttgaaatgtggctagtgtgactaaggaactatatttaattctaattaagggttttttttttttgagacagggtctcactctgtcacccaggctggagtgcagtggtgcgatctcagctcactgcaacctctgcctcccgggtttaagcaattctcatgcctccgccacccaagtagctgggattataggcatgcaccaccatgcccagctaatttttgtatttttagtagagatgggttttccccatgttggccaagctagtcttgaactcctgacctcaagtgatccacccgcctcagcctcctaaagtgctgggattacaggtgtgagccactgcaactcccagcctataattaagtttaaatagcgatatgtagctagtggcatccatattgggcagtgcaggtctagagtaactcctaggatttgggaactggttggaggggtggtaccattcaccaagatagagaatataaggaggaggatttgggagagaaaatcatgagttcaagttggacaagtttcatattaggatacctataggatagccagttggtggcatcccaggaggtggatattcaagctgagtcagagctggaaatgtaatttggaaacaatttgtagactggcagccaagctgcaaccaaaccatagtaccatcactccaagaacagtccctgtgcctttgcttatcttgtcttgttggagaacaggcttcatactctctttggacagaaatgaatctatttatcctctgcccttcatcctcagaatgttgtcctgtgtcatggttttttattgggatggcaaaaatagagcccaaaggcaaagagagggctagagtacacttggtgtcggcactgaccatgctcctataaaggctcatgagatggaagttgcacccttcccctcagccactgtccaagcccaagcactgacagagggcaccagtcctatgtcttggcctgtctctctgcccttttttaattgaaagaaccatcagaagtctagctccactccccaggaagttctagctcatggccagcaattgtctacagagatgtaaactagcatggcttttttttttttttttttttttgagataagtctcgctctatggcccaggctgagtgcagtggtgcaaactcagctcactgcaacctccacctcctgggttgaagcaattctcctgcctcagcctcctgagcagctgggattacaggtgtgcaccaccaagcccagttaatttttggtattttattagagacagggtttcaccaggttgtccccaggctagtctcaaactgctgtgctcaggcaatccagctgccttggcctcccaaagtgctgggattacaggcatgagtcaccacatccagtcgaaactagcatggctttgagctgtcttttattcatcactcagtggatgttgtcaggtgcctggtagtgccaggcattatgctaggcactgagcctgagcacaagcatgatccctaccatcatgggagaattagaaatcaatcaaagaagcatacaaataaatgtaaggtttcaaccctgggaacttctctaaaggagcgacagagaayttaatataagcaaggtggcctgggaaacttcccccaaggaggtgatgactgggctgaggtctgaaggaagaccaggaggtgaccatgccaaagggtaggggtgggggagtaatgcaggagctgtggaagaagggagtgtggagctcttgaggtactgaaagccagtctggctgtagcagagagcaacaggaagcatgtggcccgacctccccgagaggccgtgggagatagactgtgcaggccctggtaggcaatggcagggacttatagtcttcatcctaaggataatgggaaattactgtcgtgttttgagcaaggaaatgaaagcagattgctatttctaaaagaccatgctggccaggtgtggtggcgcacacttataatcccakcactttgggargccaaaatgggaggactgcttgaggccaggagttcaagaccagcctgggcaacatagcaagatcctatctgtacaaaaataaataaacaaaaatattggccaggcctagtggcacacacctggtaagcactggctactcaggaggctgaggcaggaggatcacttaagccaggaggtcaaggctgtagtgagctaagatcatgccacagcactccagcctgggcaacagagtgagaccctgtctcaaaaaaaaaaaaaatcaccctgactgcagggagaaaaacagaggggagggtgccaagcagatggaggaagccagcttagagctgcggcaggaggccagctgcctggatgatggccctggatactgcaggtgtggtaaagtgcacacatccagagaggtttaggatacttagagctgatgttcattcaatttgtaggaaatagtcttagctatagctgggtaggaccccatttcggaatgttaagctaaatatgaaaacttatgactgactaaattttccatttttttctcctatgtaggcaactgattgaaggaacagaagtgcttaaacaactagaattagttccaacacagaatgaaagaccaatacatatgtgtagaattactgacagtggagatccttatgcttgattttcatatcaatattttctgtgataatttattactttgtatctgatcagctgtttgtggatttaattaaaaagtacttgataaattgtaatttgaaagccgtggcagacactgtaggttgcctcatctacacccaatccctccccatcttcctttcctgtctctgtcatagagactgtgaaagggtggtactcaatttcctagactcctttgcagccacgggtggccatgagagatggttctggccagtgggacaggaatagaacgccagtggtcctgccccttccccttcatccagtctggaatgtggagaggctggagctacagctgtcatcttgtggccataaagaaaaggctgaggccaggtgtggtagctcacgcctgtaatcccagcacttgggaggccgaggcaggtggatcacaagatcaagagattgagaccatcctggccaacatggtgaaaccctgtctctactaaaactacagaaattagctgggcatggtggcatgcacttgtagtcccagctacttgggaagctgaggcagaagaatctcttgaacccgggaggcggaggttgcagtgagccgagatgccgccactgcactccagcctggcgacagagagagactgtctcaaaaaaaaagaaaggccaagtactgcagagatgtcagccccagtctcttgagctgcgggaccaataccagcaaccacctactctggacttcttagtataggagactaacagagccctgtgttgtgttgtttatgttactgttggttgagaattttgttacttgtggacaaaaaattcttaatttagcaacacacctgatagcctaagacatttgtaatagaattatgttcttgtttgtaactacatgtactcctaggagaaacttggtaagtaaccaaataggaatgatgcagaagaaaaagcaattcattgtaatatttcattgtttataccagcattcagaaagagtatctacactttggatgttttcatatatgacatgaacatcatccttatctctctgagccataccaaccctatgaaaaccaagggcttgttttacagtgtccgtggtggctgactcatgtgatgttattggagattcagctttatcactactctgtaatctaaagttctcaagctcatatcacctggggagcttttaaaatgtaacctaacagaccttgtccttgacctactgaggcagagttcccaggcgtggggcagagattctgtgttcatttggttctttccccagggttcccaggcgtggggcagagattctgtgttcatttagctctttccccagggttcccatttagacagctgggcactagtcatctgggaatcactgcaagacataaggaactggttccagtccccatggtgtaatgtagtcagcagagtgcttgactctgctattggtgaccttgctcagctcctgttaccaccactaccctgtgcccctgctctgcccagactaagagtgcttttctttttttttttttttttttttttttttttgagacggaatctcactctgtcgcccaggctggagtgcagtggcacaatctcggctcactgcaagctctgcctccctgattcatgccattctcctgcctcagcctcccgagtagctgggactacaggcgcctgccaccacgcctggctaattttttgtatttttagtagagatgggatttcaccatgttagccaggatggtcccgatcttgtgacctcgtgatccgcccgcctcggcctcccaaagtgctgagattacaaaggcgtgagccaccgcacccggctgagagtgcttttcttaccctaagcagaatgaggtttgtcttccaagaacaatctctatttacatcagtcttaaagaggcaggcttctaatggatatgaggcttgccaaaagtaggcgtaggcttttttaactttttattttgaaatatagattcacaggaagttgcaaaaatagtacagagcagtcctgtgtacctttcacccattttccccagtggctacgcttacaaaacggtagtacaatatcaaaccaggcagctgacattggtacaatgtgtgtgatgccattttatcatgagtatattcatgtaaccaacactatagagaaaatatagaacctttccagcacctcaaagacccccttccagtacccctttacagtcaacccactcccctgccctctgccatccctaactcctgacaactggcatttgcttttccttttaatgacagctttattgctatatgacatatgctttatgctaagacctgaggtggatgggaggaagcagaccgcctatgttacattctcaactgacccagagcaacatagtgttaagaatgtgtgttctagggccagaatcctggctctgccattccctagctgcacaaactcaggcaagaacttttctgtgcctcaattccttcatctgagaaacagtggtacctaccacataagattgctgtgagggttccatgaatcaataatttctataaagaacctataagagacctggtctgctgtaagcactcgataaatttaataataaattactaatgtgtaaccttcagggtgtagcctcagagcttggactttttgaaagctctccaatgactttgatagccagatttgggaatccctgaggagagtctccctcttcctgtactcacagacttctgggcagtctgagaactcgggtgatttgtctagagcttccagaccctctcgctgggcctttgcccaggttcctcaggtcacactggggacatctcagacaaaagggagctgggcttgccaccaggattcaaaacaattggtgaatgaaaactgattctttgcaaggagcccggttaaaacacatgacaagcgttactcatgtaataacaaacagcagggcagttcttactggtgatgaacctatatattaatggcattaggcattttatctgatgttgtgaaagaactgggatatttgtgtgggtgtaagaaactgattccagctccctttgtcagcagcaatagaaaggtagaactctgccagtcttctcaaggatggcgagttcatggtccctttgttcactctaactttccacttctgggctgtggaaacctcaaccacagatccatgcagtggttcttatcaccagcacttaaaagtatacacactgatacttctgtgctagaatgatttgtatgtttaacctcatagttgaagaaactgattgttagaaggactcaaaagtttactccaatgaactccacatgtaagactttgatttaaccaaactgaaatacactaattaaacagaagggattctagatttttccacatctacaaataggacaataaaggccttctgatgatttacacaaaatgctaagttatatgtctaaacttgccctaattgctgatatggcaaagtcaagtacatacgctttatcttatactaggccgtgtgaataagggagggcatatctaaacatttttcttatatggggagatttgaggtaaatatttaaaattctatccaaggaatttgtttgcccctactgcaaacagtgccagttatttgttaaggaatggataatctggcaacctcaggattccagaccctgagtttttatacatattttaaatgaagcattatttgtttgagaaccacctgtccagcaatgtgatggtcaaatcacttaacctttcactgtccccatttgtaaaaataacagaagttgagttgctagctttcttctggctctaaaacttcagtgattattctgaggaaacgcataaaatcaacaattttaagtgaaatgggggtacatctgtctcagtgttctgaggattgacacagcaggtgaatctattcacagcaggtgaattatgagaagcacagcacagtgcttctaataatgcttggcacacagcagatattccttaagaattagtttcccttcagaaatgtctccccacggaaaccagtcaagctaccactgacagaatatcatcatcctaatttcaagaaatatcaagctctttttatactgagtattagcagttctcacatcagattaactttcaatcaactgaactagttcaaaggtatatctttaaaattaaaattggtctctaccacacctagcaatattctcccttatggagactcattttttaaactatattgatcttaccatcccctacacttcccaaagtggaatcaccaccacttaaatctggcaagtcttaagacttttgtatatcatacgaaatattggtgactaactcagtagtaatgtatacaacatgaattacaagttgcatatttgatagagggctttgtaaggtgataaatcacaggttcttttactttagcatgcatcagagtgcctgggcctgtcaaacagattgctggacctcagagtttctgattcagtggcactgggttgggctggagaatttgaacaagttcaaggtgatgctgctgctgctgctgttctggagacaacactttaagaacagatgggatatatcagatctctcatagatctgtggcacacaggtatgtagaagagaaaagtcataacagtaaagtgtaacctacaacagaaaaggaagaatgaaggaaactgacaagaaaccttgatttcatcaaggcagcagaggaggtacacatacgttgaccaattagacagtgaccagaattctgttgcaaggtcctgaggttcttagcagggccagatgtgagacctccaggtgctggacagtggcaacgtggtagtcagatccttaggaagggacttggacacttgggccgctcaggacacgcactttgccagtcagtacagaattactagaatattttaataaccagagtggccatgaggtgtcttctggctgaaaatcagctctccaagacaggatcgggagaagcacagtgaatacctagggacaaggggaagccatagctaatccaagatatcagcaagccgcctgaggtgtagtttagcttgaacttggaggttattcctaaggaacaagtcaggaaaaggtttcatttcctgaaggaccaagagacgtaatgcaaagagctctagcagacccagggtttgaagcagaatacaaataaaaatcatgcatctcgggtgccagccttaagggaacctgggctgggctccctgactcctgcacatccaggaggtttgtgctgtttgtatgctaaccttacatatgtttgtaaagaaagaagcaaaaacagtatatcttgatgtaattttgtaaatgaatcactgttaagaattgcaggcctggcatggtggctcatgcttgtaatcccagcactttgggaggccaaggggggaagattgcttgagctcaggagttctagaccagcctgagcaacatggtgaaactccgtctcaagcaaaaatacaaaaaattagccaggtgtggtggcgcacccggctattcaggaaactgaggtgggaggatcacttgagcctggggaggcggaggttgcagtgagccgagattgcgccagtttgactgaaataagccagtttatttattcatttttttctcaaaaaagaaaaaaaattgcagcagttcaggatagaatagttctgtgcaagtcatagtgtaaagcagtgttctccaacttttttttttttttttttttttttttttttttatgagatggagtctcactctgtcgcccaggctggagtgcaatggcacgatcttggctcactgcaacccccacctcctgggttcaagcaattctcctgcctcagcctcccaagtagctgggattacaggcacccgccaccacacctggctaatttttgtatttttggcagagatggggtttcgccatgttggccaggctggtctcgaactcctgacctcaggtgatctgccgcctcagcctcccaaagtgctggaattacaggcgtgagccactgcatccggctgttctccaactttaatactttacacatgtacatatcttctgggaatcttgttaaaatgtaggttctgattcaggagatctga

SEQ ID NO: 95624 - DNA, 64413 bp, Homo sapiens
acagatcaaaaccaacaagatgaaatcaggaataaatacactgaagttagaaaaaatggttacgggaacaacaggaactgggatcttggttgagagcagttcatgggaaaatatgtggggaggctctatctactgcgccttctggtggatcaatcatgtgattaagcctgtgagggaaacctaacagtctagctttgttaacaaaagtgcagtacatcaaggaaagtaactaatttccttcagtcctctgccccgtctgggcattttcatacagactagtctactctaaacacactgttgtatagagaatacagatgttttcacaaaagaggtaacgcaaaaccagagttttgaaagagtacgaagagacagagggaataggacgtacaaaggtgacgatgtacatttggggaattacaatggccctatgtggcatgaatcaaaggaatgaatgggggacatgaactgcactggatgggagtggaggagactgtgacagtatcgaaaccaggagtcttcaagatttctgatcctatgtttcctaaaagaattttgaaaaactaccctttcacaaattcttaatatctaaaatatcaaatagtttaaattgttaaaaaggctataatttccagcatatttaaaatactgacattttaaaataagctgtcacatcactctttaaattgttttcagtagaatctaaattaatagtaagttgataactacctacatcatctatttaaaaattacaagaactataaattcaagtagatgaaaaacaacttttcgtcaaagggcactccaaaataatgtaaaaaagacaagcctgagtgggagaagctaaaggacacacacaaatgaaaaacaaaaacaaaacaaaaaatactctaaataaataagacaaacaatccaataggaaaatgggcaaaatatttaagtggatatttcataaaggaaattcaaaaggccaataaaaatgtgaaacacactatagcttgttattaatcagagaaatgcttatttaaatctcaatgagataccattacaaagccaccagattaacaaaaatttgtaggtctgacaatatctattgacaatatcaatatcaggtgttggtgaggatgtggggcctcaacagtttggcaatatcaggcaatgctgaatatatacatattctctgaccaggcaattccacagcgattttcacacatacccacatcctcagaaacaattggactcatgcgccaggatgagatcaatcagctttgtacataattgccccaaactggaaatggagaattgtggcacagtcatataatattatacagcaggccgggcagggtggctcacacccgtaatcccagcactttgggaggtcgaggcgggcggatcacctgaggtcaggagttccagactagcctgaccaacatggagaaaccccaactctactaaaaatacaaaattagctgggcgtggtggcgcatgcctgtaatcccagctactccaagggaatcacttaaacctgggaggaggaggttgcagtgagcccagatcgtgccattgcactccagcctgggcaacaagagagaaactccgtctcaaaaaaaaaaaaagaattatatagcaatgagaaagcattacagctacgcaaaatgaatgaatgaatctcacaatgtaaaagaagatactaaagcgtatatactgtatgaaccaattcatgtgaagttcaaaaccaggcaaaactatgttcttgagatgcacatatggatgctaaaactactataggaaaaataggcaacctaacagtaactataaaaatgagaacagtgtttatatctgggggggaagtagagaattttgatacataggggagaggaggcttctggtagtgcactgttttgacctgagtgttaaacaggtgtttgctttagaactgttaaatcattcatgcatactatataaaattttcttcatatgtattatatttcgcgaacacaaaaaatactccacataaaaaaagcttttctctaacggtaaaatttacatcgctgcattttcttgactgatctcgtatattctcccacaaaatgttatcctaacaatatattttgtgtgaaagtaacttactgagcatcctatggtatttggatgatttttaactttttgcaaaaagtacttaacgtgacggcaacttaatttagtcgcctttacttctgctatctctcagtcaagaagtcctcataccagcccttgtgccgggggctgtagttaaaaattaaattagccttcaagcttaccatgtgtcaggcactgcccaaaacgctttacgtgcattatctcatttaatccccaggtaggtggttatgacccccattttagaggtgtagaatcttaagttaggagacattaattctcaaggttaaaggtcgtgaatggcaggtcgtagcctctaaatcagaaagttaggtgagactttttggtttccctcgccccctccgttccagtttctctggcttcttttctagggaaaaaaagctggtaaggaagcggcaaatgcgtgacacacaggcccgcgtgagtccgagtcgggggacttggtacgggctgccggtcacaccgccccagagaaaattgggcgcaaccttcttaacttaaataatgaccctttttgcttgttaacctccagtctaaacgcccattccatcccgcaccagtttccccttctgtgaaggcatgcatggagtatrtcgctctycactgacctgaagctgctctcactgcaccagcaaaggcagaggcagccatcttcaccttcgcctacggcggccgctttgggtttaaaagcacaagagcaaaagagaatgaagggaaagcaaggaggcggagtcaaggaagaggaaaagaacaaagttgtccactcaacatttattcaatgtcatctgccgggttccgttcttcgccgctgtaaaacgactgcctatagaaggttctacaaaatttcttattaaaaaaaattcttggggccgggcacggtggctcacgcctgtaatcccagcactttgggaggccgcggcgggcggatcacaaggtcaggagttcgagaccagcctggccaacatgatgaaacccccgtctgtactaaaaatacaaaaagtagccgggcttgggaggctgaggcaggagaatcgcttgaaaccggaaggcggaggttgcagtgagcagagatcgtgccactgaactccagtctgggcgaaagagcgaaactccatctcaaaaaaaaaaaaaaaattcttgccgggcgcggtggctcacgcctgtaatcccagcactttgggcggccgaggcgggcagatcacgaggtcaggagattgagaccatcctggctaacagggtgaaaccccgtctctactaaggggtacaaaaaattagccgggcgtggtggcgcgcgcctgtagttccagctattcgggaggctgaggcaggagaatcgcttgaacttgggaggcggttgttgcagcaagccaagattgagccaccgcactccagcctggggtacagagcgagatatagggtgtattaccttggaacactattgttgccaacttgatctcccacctatggtggccactttgagtccaaaaacaggcacatacgctagacaagtatattgaaacattcataaaagctctttgaattggcaacgggagtcattgcacactttttttttttttttgagactaggtcttggtctgttgcgaaggcttgagtgcagtggtgcgatcacagctcactgcagcctcgacctcctaggctcaagcaatcctcccacctaagcctcctgagtagctgagactacaggcacacacctggctaatttttaaattttttgtagagacctaggtctcactatgttgcccagggtggtctcaattatttggtatggaatcaaacaggtctcccaccttggcctcccaaagtgctgggattacaggtgtgagccactgagcctggcctcactgcacatttttgaacaagtgagtgacttgatttaaattttgttttttagagacagggtctgagtgcagtggtgcaatcactgcagcctggaattcctgagctcaagggatcctcccaccacagccttccaagtagctggcaccacaggcatgcacaatcatcccctgctaatttaaaaaaattgtttatagagatgaggtttcacttttttttttttttttttttggagacagactctcgctctgttgcccaggctggagtgcagtggtgcgatctcggctctctgcaagctccgcctcccgggttcacaccattctccgcctcagcctcccaagtagctgggactacaggtgcctgccaccacacccagctaattttttgtattattattattttttttagtagagacgggttttcaccgtgttagccaggatggtctcgatctcccgacctcatgatccgcccgcctcggcctcccaaagtgctgggagaggtctcactcttttgctcaggcaggtctcaaactcctgggctcaagtgatcctcccacctcagtctgccaaaatgccgggatatgagccaccacacccagcccctggtaacaaattttttttttttgagacggagtttcgctttgtcccccaggctggagtgcagtggtgtgatcttggctcactgcaacctctgcttcccaggttcaagtgattctccttcttcagcttcccacatagctgggattacaggcgcgcaccaccaagcctagctaatttttgtatttttagtagagacggggtttcaccatgttggccaggctggtctcgaattcctgacctcaggtgatccgcccgcgtcagcctcccaaagtgctgggattacaggtgtgagccacagcgcctggcctgcctgataacattttaaagcaaaaatattgacaacttccaagtggagagtgaggactctccacgtaggttatgaggggttgggaggctaattttgaggtttgagatcttgaagctagagaggttgctaatgatgttcaggcgcaagttgtggctgtgacgtgcatgactgaagcaggatgaaaacattcactggcattgacaaattcaaagccaagggtgttagaaaagtcatcacactggcaccacatgactgaagcaggatgaaagcgttcactggcattaagaagttcaaagacaagggtgttagaaaagtcatcacaccggcaccactgggcatgacagcagtgggcagggaggcagcaattcaattgctaaaattactaaagaaaacgggagactgctctggaagctaagtgaaagagatatgaaacatatgtaattactgtagtcccctaaaaaccatagaacatagaacatatacaaacataactattgctttcagataattttcaagtccatctctccatgctacaagtcatagcgcagtctacctctagagagaatacatattgtaataaattacccagttaagacttggaatactttgcaaatccaatagaagatagaaaagttagtttccacgatattgcaataagatgctaatagtattaatacgaacatattaattctggagtatacatggagtattaataccatgcttaatatttaacgtgttttattttgattacagaatcaatggaatacttttgttttttgagacagagtttcgctcttgttgcccaggctggagtgcaatggcgtgatctcggctcactgcaacctccgcctcccgggctcaagcaattctcctgcctcagcctcccgagtagctgggattacaggcacccgccaccatgcccagctaattttttgtatttttagtaaagacggggtttcactattttggccaggctggtctcgaattcctgacctcaggcgatccacccgccttggcctcccaaagtgctgggattacaggcgtgagtcatagctcctggccctacttttctttttaaattttttgtytgtttatttttctatatagagacgaggtctcactgtgttgcccagcctggtatcgaacctctgggctcaagcgatcctcccgcttcggcctcccgaagtactgggattacaagcgtgagccaccgcgccctgcccagtggaatactttcaacggtgcttctgcattgacttcccattttccaacccatccacaaactgcagccaaaatgatgttactacagtaacaacttggagaaagcagtgtggyttaatctggaaggagcagaagctgtggagtccaaaggacccgtgttcctatccttgttgtgccacttgacacgtttagcacaagggtccccacagtgttagttcaccgtctccagcaatcackatgactccctgragggctgtcaaacgaaacaaaggcgcaaactgagacaattccattgtttacgtaactttcgccaaatcggctcyttcctacgaaatatscagctcatagagcaggctgagatgctttgttgctttaattctctttaagagtcacagctgtccattttccacgtgcggctgaagaatggatttcagagcgctctccctccggcmgtgttcacctagtaaccccttcsggataaggacctgcagcccgggcgcgacccggaaagggaatccgcccttttcgcctccttcgcgccaatcgcctggagttggcgtttccgcagccgggacacagcccaccctctaagagccgcggagtcggggacggtagaaggggccgcgcgtgcgcagtggcgtccgctgtgcttccggtgcgccgggygcggacgcgggcacgcacacacgcaagcacgcctccacttaactcgcgccgccgcggcagctcgagtccaccagcagcgccgtccgcttgaccgagatgctgcgggcctgtcagttatcgggtgtgaccgccgccgcccaggtgagcactggggctcccggaggcgygtgaggaggctgamctagraccgtcagcgaaaaacrggggagccttggtcgctgcctagcctccaggacaaaggcgagcctcagggccaccctcgtcgggagaggcccgggcgggcagctaggcagccaccagggagttcgccggactgggatgacttgaggttattgcagcagcggggtggggtgtggagagtagcgggaggcgcggcttcgtgggcatgtagtccaatcagggccgcgctgcccccgtccaggaccaatcctggctsctggcgtctgggtcgccggttgggcgcgcgataggttttcagtgctgaaggtcgacgggcgagaactacagttcccgtcaggacgagcggagsggcggcttgttgcatccttaataaggaggtgcctggacttctagcgagagtccacattttaggggtcaaggttgtaattatctgggagggagtgcctttcttttcgcagctgagaacacttctgagttattcttaatccaaacaaaagcgaaagattttcatttgtggagctgaaactcctggtcttcaaggaaagacaggagtcatgaccttgtggctcatttctgagattagggcagggatctgtgtctccaggcgctgggactactttgacattcaaggagcctaaatacccagttacttctagttttgcgtaattgccaaagttactttctaaaattgaaaattaaaaagcctgtttccactgctcrtgattttcaggaagttgatattttggcaaaatgtagatagcaaaccaagtactgtgactcaagcagtaattgaacagaatccctaggaatagtgagttagagatcataaaagtcaagctttgttttttcaagttcgcttctcttcctatttgctgctaggtaacagaagcagccccttccataggaaagtggaaygaacctgtgttagttttctattgctgcgtaacaaataccacaaatttagcagcttaaaacaacacccatgaatgaccttacgggttctgtaggatagaagtctgggcacggatgatctgtgttctccgctccaggtcacataaggctgcaaagtattagccatgctgtggttcttatttggagatcagggtcctcttccaggctcatgcagtttgttggcagaattcagtcccttgcagttacaggactgaagtacttcttttcttgctgcctcttgccagccactgctcccagcttytacagcctgcctacagttccttgcctcaaggcctctagaggccattcataacattgatgtttgctttcgtgcaggctaccaggagcttgcctctctgacttccaaatttcttttactttggtctttcctctctagacccagatttaaaaggcttatgtgattagaccaggcccacctggatgacctccttttcagttaattcagagtcaactttttgggatcccatttgggaattaagaaaactaattaaaacttggtaataaaaaatgaacccttttatagctctgaatcaagatgtctaagcttcttgaaattgctgtcttgtaaaattctttggtttattctcaccatctccttaattctgtagcatttgacattgctgctttatgaggctctttgtacttttggcttctctcaagtaatattttgggtcccatctctcttgttttcctttactgagtctgcttctgctttgtacctcgaaatatacaccttctcatctcttcctgtctctttatagactctctaatttgagattacatcaactctcagaactttaatccccaagcaggtgactctctagcctcgtcgtatttgattgtatcaacgtatccagaatatctcacttgtcaagatcctttccactttattaaaccccatctttctttttttttttttttggatacggagtctcactttgtcacccaggctggagtgcagtggcacagtcatggctcactgcagccttgacctcctgagcgcaagcaatcctcttacctcagcctcctgagtagctgggaccacaggcatgtgccaccatccctggctaattttttaaaaaatttttgtagagacggagtctctctgtgttggccaggctggtctcgaactcctgggctcaaatgatcctcccacttctgcctcccaaaatgctgggaatataggcacgagccactgtgcccagccaaccccatcttcttaaatgtcttactgcttttactgttccctcctagagtccattctttactctaggagggaatagtaaaagcagtaagacatttagtaaaaggctttttaaaaggcaaacatgaggtcatgctctttggagacatcgcatcacattcaaaataaaatctaaactgcttaccatgggcccttgatctgactcttctcatatttcatttttctactgcctcactcagattctcctggtaatctccagcatgtgcctcactgccttttcatcaggtgtttcttttgccctgaactcttctcacacgtttgcttaacttattcccttcagttaatttctcaaatgtcaccttcccttcagagagggcatcctgatccaaaatagaattctgactactcttgccttccttgtatcactatatctttaccccatcctactttgttatactttgtagctcctagcactacctgatgttataatgtgtatttattacacagtttccacctttaaaaagtaagctccacaatggaactgtgtccatatttactgctgtatttccagtattaacaatagtccctggctccaagtagatgctcagtgaatgtttatgacatatataaatgaaagaatgaatgkgttcatgaatttttttttaatttaaaaagattttttagagatggggtctcattatgtttcccaggctggtcttcagcttctgggctcaagtgatatgcccacctcggcctcccaaagtggaatttttcttaatctgtgtaagtggatgtgacctccctttaaacatcccatagattttcaaacctctgattatatattcagattctccagagaaacagaaacaataagggtgtgtgtgtgtgtgtagagatagggtctcattctgttgcccaggctggagtacagcagtgtgatcataactcattgcagtctcaatctcctgggcttaagcgatcctcccacctcacctcctgagtagctgggactacaggcttrtgccaccatgcccagccaatgttttggacttttagtagagatgggatctcgcaatgttgttccagctcattttgaacttctgggctcaagcaatatccccaccttctcctccccaaagtgctgggattacaggcgtgagccatagtgcccagcctaggaagatttattatttatttattaattttttttgagatggagtcttgctctgtcacccaggctggagtgcagtggcgccatttcagcacactgcaagctccgcctcccgggttcacgccattctcctgcctcagcctcccaagtagctgggactacaggcgcctgccaccacgcctaatttttttttttttttttgtatttttagtagagacggggtttcaccgtgttagccaggatagtctcgatctcctgaccttgtgatccccccaccttggcctcccaaagtgctgggattacaggcgtgagccaccgcgcctggctgaaagatttattgtaaggactctactcacacagttatggagactggcaagtccagaatctgctgtgtggtttggcagactggagacctaggacagccaatattgcagttgcagtctgctggccagcagcctggaaacccaggagagtggatggtgcagtttcagtctggaggcagtctgctagagaattgcctcttgctttttgttgtttttgagccctcaactgattgaatgaagcccacccatgttatagggcaaatttttttttttttttttttgagatagggtcttgctctgtcacccaggctggagtgcattggtgcaatctcagctcactacaacctccatccaccagactcaagccatcctcccacctcagcctcctgagtagctaggactgcaggcatgcaccaccacacccagctaacttttgtatttttttttctgtagagacaggctatattacccaggctggtctcaaactcctgggctcaagcaatccacccgcctttgcctcccaaagtgatgggattacaggagtgagccaccatgcctggccactagttcaccaattaaaatgttaatctcatccaaaaacacagtccaagttgacacataaaatgaaccatcacagatagtatctaccttattctttgcccaggctggaatgcagtggtgcaatctcggctcactgcaacctccgcctcctgggttctagcaattctcctgcctcagtctctcgagtaactgggactgcaggcacgtgccacygtgcccagctaatattttgtatttttagtagagacagggtttcaccatattagccgggatggtctcratctcctgacgtcgtgatctgcccgccttgggctcccaaagtgctgggattacaggcttaagtcactgcacccgacacagtatctgccttattctttatgtttgggcttatcatccttgcattccttagatgtgggtattcagtaaatgtgctttagaactctggtccctctgtttttgttttcttcttttattcctcagacctaacaccatctttcttctcttagtcccaatactgcatcaccaggcccagcctttttgaagtggtcattgagtttggaggacatgggctttccgcctagcctagccttctctcaaactacaaacctggaagtggtcatttacatatggagtagtctttcctgcttataacttgaaagaagaagaagaaacattattattcttgaggatcaaccgctccagcttacttaagaccaagtttgataacccagctagtttaggattgaacttgtgtgtggacatgagctatcatcttctagaattccttctttctgttaggattatgaaacattatgttactcagtgatagagataggcagccaaccacacgtgctagaaagtagtttagtagatcatgcggccaggtgtttgcttctacccatgctagaatcctcttcattgttccttttttcatatctctagaccagtagccttcaaaccattttgaaatacatcttacgccgtaacttactacaccgaagtgataacatacaaaatatattcacatatgtgcagggaaaactaaagtgtcaagttcctgcttttgtcatactgataagtatctgccatttctataactaaagagcacgtgttctcctagaatagaatatgtttatactgaaatgtaatgctgcttcaatgtaaaattgtaatgtaaaatgtaaaatttcaatgtaaaaacttactggatttttttgtgggatatactttttaaccttaatgcatgattcttataaactattttaaattaacrgtagaaaaagttaatttgttgtatatcaatctatatttcaaatgtagaactgcccattaacttatgggtgcctttttcgtttgtgtgggaggagtccttatgtatgacaagatccacaaaaacgttatcagttgacagcaaccagcagtctgtggaggaaacctggaacctctagttagagttcacatgaggcagctcatactacaggctccatgtccaggttgtcatgctagattgtggtttctttatgtcttcactttagtttggtagagctaaggaacagatggtctgtgtaacagcattaatcatggggcggaacacttgaggtcaggagttcaagaccagcctggccaatatggtgaaaccccgtctctactaaaaatacaaaaattagccgggtgtggtggcaggtgcctgtaatcccagctgcccgggaggctgaggcaggagaatctcttaaacccaggagatggaggttgcagtgagccgagatcacaccattgcactccagcctgggtgtcacagcgagactccatctcaaaaaaaaaaagaacattacatgggaattatatgtttcctcttttttttaatatcacgtttctgcgggttagaagcagcaaggctaaccttataacatatgtctagacagattgctttgaaacagtgttgtcctttctatgtcataggtccttattaataaaaaggaattccaggacaaaaaagtagccaatattttgtgtgttaatgtaggatatttagtttatgttaatagtttagtacttaagagagctctggagacagaccttatgtttggcaatggtttcttaactataacaccaaaagcacaagcaacaagagaaactaaagataaattggacttcattaaaattttaaatttttgtgcatcagagggatacttgagagtgaaaaggatgaaagtattctaatggatactagatattttggatactagaccctcatatctgatgaggtgtttctttttaggtaaggaactcctgcaactcagtaacaaaaaagactacccaaataaaaatacaggcaaagggcccaggctctgtggctcatgcctgtcatcccagcactttgggaagctgaggcaggcagaacgcttgagcgcaggagttcaagactagcctggacaacatggtgaaactctgtctctacaaaaaatacaaacattagctgggtgtggtggcatgcacctgtagtgttagctactcggtaggctgagaggtgggaggattgcttgagcctgtgaggtcgaggctgcagtgaaccatgatggtgccacagcactccagtctcggtgacagagtgagacgctgtctccacatatatacatatatgtatttgtgtgcgtgtgtgtgtgcgcgtgtgtgcgtgtatgtgtatgcatgagcaaaggacttgaatagccattcatccaaagcagatatacagatggctaagaagcacatggaaagatgctcaacatcctttgacactagggaaatgcaaattaaaaccgtgagatactcagttcacaaccactaagatggttataataaaaatggaaaataacaaattagccgggcatggtggtacacacctgtaatcccagctacttgggaggctgaggcaggagaatcacttgaacccgggaggcgaaggttgcagggagctgagattgcgccattgcactccagcctgggcgacaagagcaaaactccatctcaaaacaaaaatggaaaataacaaatgttggtgagggtatagagaaattggaaccctcatacattgctagtgggaatgtaaaatggtacagctgctgtgaaaaaatagtttagtggtgtctcagtaacttttttttttttttctggagacagagtttcactcttgttgcccaggctggagtgcagtggcgcgatctyggctcaccgcaacctctacctcctgggttcaagggattctcctgcttcagcctcccgagtagctgggattacaggcatgcgccaccacgcccagctaattttgtatttttactrgagacgcggggcttctscatgttggtcaggctggtctcgaattcccarcctcaggtgatctgcctgcctcagcctcccaaagtgctgggattacaggcgtgagcgactgagcctggctgtgtctcagtaatttaaacatagaattaccatatgaccttgaagttccctgccaaaagaataaaaaacaggtgttcaaacaaaaacttttagatgaatattcatagcaacattattcacaattcacagccaaaaggtgaggcaacccaaatgtccattaactgatgactggttaaacaaaatatggtatatttacgtgataaaatattagattcagccataaaaaggaatgaagtacaagctacatatgtgatacatgttacaatgtgaatgaatcgtgaaaacattacactaagtgaaagaagctggacaaaaagatgtacattgtgtgattccatttatacaaaatatctcaaacaggcagattcatagaaacagaaagtacatggtggttgccaggggccagagagagaggaaaatgggggatgactgcttaatggatataggatttccttttagggtgatgaaartgttctaagattagatagtggtgatggttgttgtacaacatcgtggatgtactaaataccgtggaattgtacattttaaaatggttagaatggtgaattttatgttaaggggattttgtcacatagaggaaaaaaaaaatacctgccaccaggtatttgcagatggcckgaagtatagagccagagctagatacacacatacacaccctaaacttgcagaggcttccattggcccaagataggaaaatttgagcaaaaagacagtaattacaaatggttgaaatccatcaaaagtgtttaaatccatgaatttaaaaagatctgttcttatgagttacagctgcataacaggccaccttgagcttggggtaaaataacagtatttattgccttactcagttctggaaaatttttgctcagagaccctcatgaagttgcagtcagatagttactaggtctacagtcatccccaagtcttctttactctcatgtgtggcagtaaatactggctgcagctgacacctcagcagggactgttggctggatcacccatctgtggcatctttaagtgtctggacttccatacactttggtggctgggttccaagggcaagtgtgacaagaggcagagctaggtagaagctgtatcctttttatgtcttagtctcaggagttacagagcatcactttcactgccttctattagtgaattagtaacaaaggcctgcccttgtttaagggaagtgtacataaaacttattattgttgggagaggggcacgtttctggaacagcatgtggtataggaagtattgttgcagtcaattttggatrttatcctcagccttctggacccaactgacatccctcccacatgcacatccctcccactcacaaccttctccaagactctccagagtctaatgccatcaaagcatcagcattaggaacaagatcttgtcatctgaatcagatcctactatggataagacatcttgaatgtggtccctagggtatagcttcttaaacactttttttggtgatctaaagccctgtaaactaaagagacaaattatctgctccccatacattcagcatatggtggtatgacagacacaggataatcactctagacactcctattcaaaaaggcagaaactaagaggcacacagcagtcaccattccataacaagtgtaaaattcagctggccctatgtttctaattccttgatgagagctcagtcctactgcttgggaatgattctcctcagctcttggttctaccctttgggctcctggttttacacttgaattattcttccgtttccagaatatgttgtctgttacagctgaattgtttcacagcctacttcctgtctgtagaagtttgtctagaagcttcttttcattttgtcctctttttcactttaaatataagccagcatgttttttattgacacaattctcaacaagtttgtgggtttcctgtgaatcttaatgggattttcttcattagatgcatgatacacatcttatcaagataagcccttctccattttgggcttcctgtgaggctgctgtaggtaacacctttaatgttctgagtaaccttattgattcaatagaatctgggaaacacatccttatgattcttagagggccttttcctcaaggtaaaaagactctctgaggggcacctccttagatctttttgagatctcaaagtatcttttggtcacacactagatttgatctttggcttgaagcccttctctatttgagaatctatttgaaaacaataagcagttttatttttgaacccaccaaatcctgactcttttatatttcctttaaattttgcttgaaagcaaaacaggtttttgttttgttttttaatgcttatctctgtccttatcatactcagctaaaagaaaccagttagcgcttgtgatgaacactatacttggaactcttttgtttttttttttttaagacagagtctggctctgtcacccaggctggcgcaatctcagctcactgcaagctctgcctcccgggttcatgctgcctcagcctcccgagtagctgggactacaggcgcacactgccacgcccggctaattttctgtatttttagtagagacggggtttcaccatgttcagcaggatggtctcaatctcctgaccttgtgatccgcccgcttcggcctcccaaagtgctgggattacaggcgtaagccatcgcgcctggcctacttggaactctttagccaagtacgtcagttcattaggtgtagctatagctatacttaattttctattttccatgtctgtcattacagatgacagttttgataaacttctgtcactacataacaagaatatcttttcctccaggttccaaaatttttttttttttttgcttttctttaagccctcaccaacaggctctggaaggccattaggcttctgctcacagtctcttcaaggttcttcagcttctgccgcccccaacaccagtcccaaagtcatgacctcgtgtttatgttttgttgcagtagcacccctcttctaggtataaacatatgtttggttatctgtagctgtgtaacagaccaccctaaacttagtggtattaaatagcagtgtaattataattattatattaacaataayaaacgtattaatatataaattatgtaaataaaaattactcagtgctttgagaggccaaggtaggaggattgcttgaggccatgagttcaaaactagcttgggtaacatagcagacctggctctataaaaaacaagaacaaaaatattagctgggtatggtgggcatgtgcctgtagtcccagctactcagggggctgaggctggaggatcacttgagcccaggagttagaggttacagtgagctatgatcataccactgcattccacaaccttggcaacagagcaagactcagtctcttaaaaaaaaaattatttatatgcttgaaacactytatttctgtattttcacccctcagattgtcaatgatgaaaaaaaaatgatacaatacagtgtgttggagaaaatgtgggaaaacatactttcatattactagagggcagtttggctaatttggcagtattaatcaacgtggcaaattttacttttaagaatagacccaaaattgtgtatacagtgttactcaggtagcattatttattttaacaaaaatttagaaaaaacctcagtgtccctcaataggggctggttaacaattaaacattaagtaacaatggaataccaaatcatgaaatcccttgggaagcttttcacgtactgatatacagtgatttaaaatatatatccttgaactttaatagagaattgcgtgtatattatggtatcatttgtgtaaaggtggggaaagtcaggagaatatgcacatttgaataaatatacataaaatgtctctggataaataagaaactgacagtgtcagttgcctatggcaagcatggggtggctggggaaagaagtatgaggaagattttactctatgcatatttaaacttytaaaattattatttaaaacctcagattttaaatttatttagtattaggagcttttaacttatagtcaaaacacattctgtcaaagggaggatggagagtcaagataaaagaaaatagaaggtagataaagaaacatttaaaaatactgatgctgggcgtggttgttcatgcctgtaattccaacactttgggaggccgtggcaggagaataggttgagaccaggagttcgagaccagcctggtcaacatagcaagacctggtctctacaaacaacaaaaaaaattatttaaagaaaaactgatgtgactttgggtagtctgaaactctagtattaaatttgtccctgatttcctggagtcagttatccattgtgcttgctgcttgatactccagttagctaattatccactgttgacagtgccttaactttttacctgaatacctatttatacctagacagataaaaaatgcaaccttaaatataatacaacttcagtggcctcttaatattttctccctaagtcacaaaaatggaattgttgacatataaaaatagatgcatttctgtttacaatttcatactactttacagaatagaaggaaaacacccttttctattaaaaatggttcaaaaatgttgggaaatctacagggtaggtaataattgaaatactgggttttttttgtttgtttggtattttttgtttttgttttgttttttttttttaaggggagtggaggagacagggtctcattctattgcccaggctggagtggagtgacacagtcttggctcattgcaacctccacctccggggctcaagtgattctcatgcctcagcctcccaagtatctgggactataggcacatgccaccaaacctggctaatttttgtatttgtagtagagatggagttttgccatgttgccaaggctggttctgacgtcctgggctcaagcaatccccgcctgcgccgctcaccctcgccagcctcccaaagtgctgggattacaggcatgagccaccatgtcaataattgaaatactttttaataccagttgtatctgctttacatattttaaaacatctgatttgtttttttgtttttcaaaatgtatgactgcattagttagctgtttacctctaggctttggccagtagagtgtaaattataactagagtaatttcatgtgtcctatgatcatgtgatagattttcctaaaactatagatacttttaaaaggaagtttgtgttattctgatattcgttaaatacaatttcattaaagaacctagaaaaagcatttttcctcttgttgcagtttgatttttcctagtattttttaaaaagatacttttatggatttgataagtgtaaattttcaaattaataggtatgaatggtttaaagtttatgaaaaccttccccaatagtatttagatgcttgttcatttgcttaatttaggrgatccacawattattaagaaatatttaggtgtattttactcttattaaaaccaatcacaagccatatagccctgatcatttgtttttatgtaaggatagactagttatatggggacaggtgtacttgaacatttacaacattaattaaaatgtttttcttaaaatggttggcttttagactaacaatatgctaagataaaccaaaaatcagcttttaaatgaatgcctctaggagttgaccagctgcatagttagcttagagatgagaaacctggttttctggatcagttagctgaggttagatctgtcccttgagtgtgtatcctgtaacgccatgtttttagctagactttgtgggtgatttttcagatgtctaaactaagcttttaaagtaaaaatagatttttttttttgccaattaagaaaacatayagcaaataccaattgtattcaagaaataattaacrtacttaagacttatttaaaggtgctaattgatcatagtctgataatttttttttaatattaaaagtaattttatgtgagccttggggtgtaagaagcatcactgcttttaggaatctataaatatggttcatgataaattgacttctgaaaaaaagtaattttttgtttaatgaagacatttttaataaaagtattatttctgtattaccaaccctaaaagcttaccagtttcctttaactgtattggttgtgatgtgttttccttctttagagttgtctctgtgggaagtttgtcctccgtccattgcgaccatgccgcagatactctacttcaggcagctctgggtatgtattatgtctccctataaccaggcttttcacygtgtgctgcttagggagtgtgtgttttccttgaatatgggaatagctgtctaaacctttttttaaaaaggggtacatacaccgaagctttgctgtaacattattggggtaccttctggagcattgtttgtaggtaaaaatttgttaataatgcaccttttggctctttggtaattggatggcatccgaggcatagccctccttgtatgtgcaatcttccattctatggcaaatagatttatatccagaactcagcatgttgtaacttaaataagtgttaaatttatttggcattttattagcttttcatattgtgacttaagcaagtgttaaatttatttggcattttattatctatttttttttcttttttttaaagacagagtctcgctctgttgcccaggctggagtgcagtggctggatcttggctcactgcaacctccacctcccaggttcaagcgatttttctgcctcagcctcccctgtagctgggactacaggtgcatgtcaccatgcccaactaatttttgtatttttagtagagacggggtttcaccatgttggccaggctggttttgaactcctgacctcaggtgatccatccgcctcggcctctcgaagtgctggcattacaggtgtgagccaccatggctggctggtattttattatcttttgtaaagagtttattgtgtttaggccgggcgtggtggctcacgcttgtaatccgagcactttgggaggccgaggagggcagatcacctgaggtcaggagtttgagaccagcctggccaacttggtgaaaccccgtctctactaaaaataaaaaaattagccgggcgtagtggcgcatgcctgtaatcccagctactcgggaggctgaggcaggagaatcacttgaacccgggaggtggaggttgcagtgagccaagatcgtgccatcgcactccagcctgagggacaagagcaagactttgtctcaagaaaaaataaaaaaaagagtttattgtgtttatagaaatgtttgattgaggaagaggagccttgaaagtgatagttcttgtttgggttcagagagaatctcatgattgtgaacatgttgagttaaagggtagatttctagatattgtatttaaaaaaaattttttgttattcatacttttatttatttatttatttattttttgagacaaggtcttgttctgttgctccaggctggagtgcaatggcatgatcatggctcacagcagccttcatctcccagtcttaagcattcctcctacctcggcctcttgagtagctggggcacgtgctactacacctggctaattttttttggcagggtgtggtgggtagagatggggccttactgtggtgcctagggtggttttgaactcctgggctcaagcaacccttccacctaggcctcctaaaatgaataaatactatttttggtggcaacatgttataaacaaatcaggaaaaggtgatgtgcagayatggtggtaaacttggctgctatgatctgaattagtggtagataagtagaggctagaggtcttcgagatggttacattggtataggaaaataggtgtaggagagccaagaaatataaatgtatttcctgtttctttcacttaggttgactactggcaaaattgctggagctggccttttgtttgttggtggaggtattggtggcactatcctatatgccaaatgggattcccatttccgggaaagtgtagagaaaaccataccttactcagacaaactcttcgagatggttcttggtcctgcagcttataatgttccattgccaaagaaatcggtaagagttttaaacaatatttcagtttatccaatgaaatactttaaaagcaagttgttttcatgttgaaaatacagttgtcttttggtattcttgaaggagaggttcaggacctcctgtggatacaaaaatcccatggatgctcaagtctcagatataaaatgttacagtgtttgcatataacctatgtataccctcccatatactttaaatcatctctagattagatgtaatatctaatacattgtaaatgctgtctaaattttcattatactgtgttatttagggaatgatgacaagaaagaaaagtctgtccatgtttagtacagatgcagtttgtttttgtttgtttttgtttttgtttttgttttgagacagagtttcacccttgttaaccaggctggagtatagtggtatgatctcgcctcaccgcaacctccgcctccgggttcaagcgattctcctgcctcagcctcccgagtagctgggattacaggcaactgccaccatgcccggctaattgtttgtatttttagtagagatggggttcaccatgttggccagactggtctcaaactcctgacctcaggtgatctgcccgcctcagcctcccaaagtgttgggattacaggcatgagccaccatgcctggcctcaggtgcaattttttaaaaaatatactttttcaatctgtggttggttgaatctatggatgtagaacctacagatatggagagccagttgtgttttgtatgtatgcagtgcaacttgccagatgtatgtatgttagttttctttttttttttccaagacggagtcttgctctgttgcccaggctggagcacagtgatgtgatctcggctcactgcaacttccgcctcctgggttcaagcgattctcctgcctcagccttccaagtagctgggattataggcgggcgccaccacacccggctaattttttgtatttttagtagggacggggttttaccatgttgtccaggctggtcttgaactcctgacctgtggtccgcctgcctcggccccccaaagtgctgggattacaggtgtgagataccatgcctggccagtttttttttttcttttttttttttttttgagatggagtcttgctgtgtcacgcaggctggagtgcagtggcctgatctcagctcactgcaagttccgcctcccgggttcacgccattctcctgcctcagcctcctgagtagctgggcctacaggcgctcaccaccacgcctggctaattttttgtattttttttagtagagacggggtttcactgtgttagccaggatgatctcgatctcctgacctcgtgatccacctgcctctgcctcccaaagtgctgggattacaggcttgagccaccgctcctggccgccagtttcctttaaattgaactaatagtagctggtacagatggataattattcttttggagtcccataagtgctctcagtacatatcacatagaaaataactgtgctgcacacaagggtaaatggaggagatacttgggtagaggtaaccatggtttccctatggactgagggggacatctatatattatcccatactgttgcagctatcaagctcttacttagaacactataaaaacaagtgcagaatggtcatgacataaaaccacgtattatggttagtaatggttccttttagaccataacacaaagtcacagaattttcatctagatgctgattagttgacaggatatcttgtactattcctgtaactttgtgtgtattcctttttttctcaccagccttaaaatttttttcttttttttttcttttgagacagagtctcgttctgtcgcccaggctggactgcagtggcgcgatctcggatcactgcaacttctgcctcctgggttctggcaattctgcttcagcctcccaagtagctgggactacaggcgtgcaccaccatgcctagctaatttttgcattttttagtagagatggggtttcaccatgttggccaggctggtcttaaactcctgacctcaggtgatccgcccacctcagcctcccaaagtgctgggattacaggcgtgagccactgcgcccagcctaaaaaaatttttaaactctaatcttaaatgtytcttcattcacacacagcttcttgtaaaaaaaaaaaaagtctgtaaaagagcatggatttttggctctttggtattgggcatttctttacgctaggaggctggacatagctgatcagtttattcttagaaactgggtggacttactgtccagtatctaacatgatctagagacccatcctatagcaaaagttaacgtttggaaaaataaatgtcatccaacttcctccctgtaacccaccccaaccatactttttcacaatgtttttgactagtcttctacatcatttattcttccctatggactttamaatgtccatattggctgagggagataattttgcagcttcataagtcaaggagcagaaccctgtggatttattctaaaatcttgaatctattttaagctgcatgacccaggaaaaaatagctggaagctgttctaggagcatggagtaaggttgaaaaattcagagmagtgttcttttctcagttgatgtgacttcagatttcattctttgtagatgaatcctttatctctccaaatagccttggcctctcctcactccactttagctaccttggagaacatttctasttaataactcagcatgtttgtactaaaccacctccacacttacactgctccttatttgcttttttgkattaaagatagtaccaagttgtcaggtgtagctaggccagaattcgtagattcttcacaggttgctcatattttgttagctatcctatcttgtttaatcttcttgcattaccactatccgtacccctattctgacctttatcacttcatatccaaattgtctcctgaactaggcctgttgctctccatgcgcacacagtctttcccatcttcctcccagtctctacccacctagatctctcctcctawcagaatctgggtcatccttatattaataccagagaatcttctaaaagaagtgctatgatattttcatgataacacctattaatrtacttccagatattttgtattgtttaaaagatggaagaccacaggatgtaaaaactagagaaatctttcttaccttctgaataagtatgaagccaggagtgcttaaatgtcagcctaggaactggccattgggctcctttatttctgtagtttgtggtctttgctagcttttaagttgacattcaatacccttggcaatctggcacttgtttacctttgcagccttatctctgggtcctgcacataagcccttagctgtacaccagttgcccttcattacaaatatgtctttgctttccatttattcatttattcaaccaatgttaatcaaatgattattatgctgcaggcactgttccaagggccatgcttaaagatagaactcatctaagatcccttccatttgtacagctttttttcaggatggtctcctacccagaatgacttcctttccttcgcttattaatgttctcttcargggctgcatccttcactgtacagatctaagttaattttctcacctctgaattacaatagcagttagtgtttctattttttttttttttttaccatttactcaagcactctctactgttaaacatcstgtcaacttgttgctgtgcattttatttcatagtaacctttttagtggcaacatgatttgttataacattgtctctatatttactgtccatgcataaaatctttttgatggacatggaataacacctgcctaaatggttacaactgttacattcctggatagaacttcatatcataaaaatgtcatttctctcaaatatatatgtatgtcattaaagatagtaccaagatagtaccaaatatatattaagatagtaccaaattacattaagatagtaccaaatatatatgacatacatatatatatatttgagagaaatgtatatgtatatattagagagaaatgatgtttttatgrtgtgtctatatacacaaatctagtaagaatttgaatgaatttttctagatggtgaggaaccagataatacagttttaacatttatatggaggaattaatgatgtacaagactactcaagaacattttgaaaaagggatgaggaggggtgcttttctagatagacttttttatactgctactttaataaaataaggttgggacacaggaaaagaaattagaggaataaaacaactgaatttggaaatagatcacacacaaactttaattatgagaatgtgaatcactagaaccttaagtgaaagtgatctgttaacatctgttaaaaatatacaacccctttgacccaacaattcctcttctgaaaactatcccatagatattacactacggtgcttttcatttaaatggacagggatggatgttcattgctttgtttgtagcagcaaagcaaaacaaaacaggaaacaatttgaatgactatagaggagaagttgaccaaattatgggaaatcgttatatgaggatattatgcaactaaacagaatttcttgacctgaaagagaatgtccatgatatagtgttaaataaaaaaaagagcaagttacaaggtaatttgtataatataaccctattttggtttgtttaaggaagtgaaacattgtttatgtgtatatacgagagcttttgctcaggagtagaaggatagattccaggctattagcagtggctacccaagagagtggaaagggaaaggagcagtgaagaggcaagttaaagccactgatatatcttggcattattttgcttgttacagtaaacagtcttcatcattcaaaaataatattttaatgaaaatggaaataattctggtttctggtagtgactaagttcagaaccaccctgttgtgtttaagtagtcatgttagggatatctgagtcctactgccaagttagggcaaaaagtggaataacataagtggaaataaaaataaaagtaattttctctggcacatatctggcagccctcttaaatgaatagtgtcttaaacttagagcaggcaataattgggaaagrggaaggcaagccttgcttacaaattgatcatatatcttactgtgcaattgcatgaatcctggagatcaaagaaacaaaattcatttgtattttcactcagagcctttaataatcatttgcttctaactgaatgtatacagaagacatcatagtttgatttagaaaggaaatgataatagtcttcttaatactgtgtaagtacaagcaatggtgtttaatgagaagatcatatgtcatggactttattggtcaccctaatagaaacctttgttactattaaaatatgggctggtcatttggaatgaaatttttgaactgcacttttctagtaatggtggtttctctcaactatgtttaataaaatacatatgttacaaagtgttgataactttatgttaaaagcctgaaagacttggcatttgaaatactgcaaatcactgtacctttttaaaaaacagtagtatatctgaaatgttaaatgttttttatttccaagattcagtcgggtccactaaaaatctctagtgtatcagaagtaatgaaagaatctaaacagyctgcctcacaactccaaaaacaaaagggagatactccagcttcagcaacaggtacttatattttgaaccatctttttaaaattataggtaaatctcttcaccaattctttttttttttttgagatggagtttcgctcttgttgcctaggctggagtgcagtggcacaatctcggctcaccgcagcctccacctcccaggttcaagcgattctcctgcctcagactcctgagtagctgggattacaggcatgtgccagcacgcccagctaattttctatttttagtagaggcggagtttctccatgttggtcaggctggtctcaaactcccgctctcaggtgatctgcccgcctcggcctcccaaagtgctgggattacaggcgtgagccaccatgcccggcctcttcaccaattctttatcctctcttctttcttagtgatgaaagtgtcttgctctagtccctgcagatattttttgacttcagaaactaccagtcaccccaccctaatttacagcacttgcctgttgaactctaacctgttcagtatacatttgaacttcttatgtttctcctttgttgtgtctgtccttgattaaatcacctgactttctttaattcagcagaaatttactgtcttttctgtgctagacattcttgtaagtactggggaaacagccatgaacaaaaacagttaaaaaattttttcagctaatatttcttgattgggtgmggagaggraataaacaagtaaaacgtataggatgtcagacattgtgggagggaatactgcagttttaaatggaatgtgtaaggaataccttacctggaaggggttatctgagcaaagattagaaagagataasggggrtaagtcatgtaaaagggtggtggggaaaagcatcccaggcagcaggattagctggtgtagaggcttgatmtattcaaacaaagggcaaatgaggctagagtgaattgagtaaggggagaacaggagcaaatgaggtcagagagggagcaaaaagtttattgtggcagtccttggaagccattgtaagaattttattttaggccaggtgcatgggctcatgcctgtaatcccgcactttgggaaaccaaggcgggaggatcacctaagcccaggagtttgaaagtagcctgggcaacttagcaagatcctgtttctataaaaaattaaaaattagctggggatggcggtgcatgcctgcagtcccagcactcgggagggaggaccacttgagcccaggaggttgaggctgcagtgagctatgattgcacccctacactccagcctgggtgacagggcaagactctgtctcaaacaaaaaaaaacattgtttcatatgctgggtgggatgggaagagaatgctgagccaggggattgataattgactgttactttaaaaccaaggccgggcacagtggctcacacctgtaatcccagcactttgggaggccgaggagggaggatcacttgagcctagcagtttgagaccagcctgggcaagagaggggagaccctgtctctacaaaaaaatgtaaaaatcagccagatgtggtggtatacacgtatagtcccagctatgtgccagaggctgaggtgggagtattgcttgttcctgggaggtcgaggttgcagtgagccatgatagtgccactattctccagcctgggcaacagagtgagaccttgtctcaaaaaaaaaaaaaaaaaaatactacacacacaaaaaattgattgagtgattgatagagatgggatcttgctgtgttggccaggttggtcttggcctcccaaagtgtgcaaaaaaaaaatatatatatatatatgtattttaactcagttctgttcttgatcactgtgacctttcatctttttgtttaaaactgttatctttttcctgctcacacgtcttctaccactcttcaaagcaattaaaaaatattctttgtttagttgctttcttttgtctgtcttcatcattaacaggctttttcctttgttactctttttcaatgtgtaaatgtccccttcttgtgtgttaatattattattataagccttgcctggaataatgatggttaaaatgcaggtggatgcagacaagacttctttcttttgttcgttcccaaccattgtccattttgtgtgagtttatgtatgcagtggacagtgcccctgtttgtgtgttattcaaacatgtggcagtacaaatatttgtgtctctaaggagtcagatgtgaagtgggtggtgatggtggtagtaaatttctgtgtgtttctctgttaacccaggaaagtataaataccatgagtaacatatatttatagcacctacagaagcggctcaaattatttctgcagcaggtgataccctgtcggtcccagcccctgcagttcagcctgaggaatctttaaaaactgatcaccctgaaattggtgaaggaaaacccacacctgcactttcaggtaatttaattatttctatttgttcttttatacatgatayactcatcagaactatttaatgcctaggcaacacgtagacactaagtatacatttacactaggtttaggtcttcagagtttcttargaaatttttaaaatttaaatgtccgaatgtatctttttaaacaagaagattaaagcctgattcctatttcttcattttggaatcattaagagtaatgatatggttttagaattcttaacacaaaaatgcccygcattgatataactggccagtacaaacgatgctttttttatatccctgttagctattaaaattctrtgctgaaatttgatttcctcttatttacttttgctgcaagaagaagcatcctcatcttctataagggagcgaccacctgaagaagttgcagctcgccttgcacaacaggaaaaacaagaacaagttaaaattgagtgtatgtaaaccagacagcttcttaaggattttgggtcatctcccagttgctctcttcttaaactatcagcacaagtttgtcatctatcacctagttgtggtttcttttgttgctgcggttgttttttagtggcattgctttattcatcaccttcatttcatctaaacttcttttacctaagtgacaaaggctattcttagtgtatagttggtgaaaactccaaataatactaaagattatgttagcgctaaagattctttatactctgggaaacagaaattgattatttatgttttagcagcttgcctaaaagtcctttatttatttttttgagataggctcttttctgtcacccagactggagtgcggtggcactgtcatggctcactgcagcctcaacctcccaggccaaagccatcctcccacctcagcctcctctgtagctgggactacaggcgtgtaccaccatacccagctaattttttaaaaattttttatagacacaggcatctcactatgttgcctagactggtctcgtactcctgggctcaagtgatcctcccaccttgaactcccaaagtgctgggattacaggcctgagcccttgtacccagccctaagagtcttttattaataattgttaatttatacttgtaaataattgtttattaataattgtaaatttatttgttggagtcagaatggcttacactgccttatcatctagcctctggactctctagtagtgcttttatctgacactggtggggcatggaatgttmtacacatcgctggtttccagctaacaagcatattcctttttaagtttcagttttatggtttttttgtttgtttgtttttaagagatgggctcttactgtgttggtcagggtagtgttggactcttggcctcaagaaatcctcccaccttggcctcccaaagtgctgggattacaggcatgagctaccacacctggccaagttttttttatcattattattatttttgctgtcctcggtaggtcaggattcttaaattttttgatggtttaaaaaagataatagatatttatcaatttatttttctgtcttaaagcacatgtaacataattttttgtactgtgctataatatgttgatgtctctggaggtcrtgggatgtagctttttgctggacagagagttcagtactcatggcagctgtttatagttttttgatctccttgtcatttgttttgctcctgtttcccttgtaatgtgctggttctgccctaccctgaggaaccaagtttcttagaatagcataggtgtcattctgtgcctatggcattagttttcctacttggatttggattttcgtttttgattttttgtattcttctgattgtgttacaaatatttgtgaatatttaataaatgacttctaactaagtgaaatatttcatttttcctacttcttttttcttttagtcctgttttttcttcacttttcacttttctctctttatcacttgggcaccttgaaattaagttataaacgtaagatggagatgtctgctgttccagctgttcttttccttgcctggttcctctcatctttcattttgggcaaagtgaaaattttcagaattttatctgtcacctcttaattccccctcaaacttgactttaaaaatatacacatatgcatttgcatgtgaaatatttatcaaggatcaaaggacagtgactaaacctctgaagagggctggaagcagcaggtgcctcccagcagcccactttctgtggcctccataaagtggttcacaactgcctgtacttgatgtccactgttcactcacgcatgtcatgggatccaaataccacggtttctctcccttgcccctttctcttgttgtatcccctgctctcrtttcacttctatcacttctgtcaatttctttttattttctccttattagttttcctcttatctttcttgcagaggtaccatttgtagttcctcagattccatttgttcattgctagtttatgcttcttttcctcaaaatcatctttttttctcgcttgtcaaatacattttttattttttgtcatgtgatatcatttatttaattaatttgttttgagacagagtctcactctgtcacctaggctggagtgcagtggtgcaatatcggctcactacaacctccaactcccaggttcaagcgattttcctgcctcagcctcctgagtagctgggactataggcacccaccaccatgtctggataatttttgtatttttagtagagacggggtttcacaatgttggccagcctggtctcgaactcctgacctcaggtgatacacctgcctcggcctcccaaagtgctgggattacaggcgtgagccactgcgccggcccatttattattaaattagtattcttactagcygcctttcttcaaatgaccatttatttttgcattttagtaaattatctaaaattgtcatttgctttactttttggtattcccgaaacagcatatagaaatgtgatcttaatagatggaagcctcttgaacattggtgtctgctatttcttgagtccttttrtggaagaacactgtccatttcaagttgcctttgggttttgttttgtattttttgacctgttttcttatttgtctttttctttctcttgtctgttttcttgtatcttgtcaacataagtgttttgctatgagtattccttcttgccaaggggatgaaatgggcacctctttttccctgttacgattgttgtttaaaatgaagaaagctgatggatttgttgagtttatagccacaatatgtaaaaggggctatagtgtcctaaaccttgtttctcccatttgaaatacattacccttctttaaataattttgaaaaaaaaaaacactttttattttgaaaaagtttagatatacagaaaagaaaaagtaggctgggcacggtggctcacgcctgtaatcccagcactttgagaggctgaggtggatggatcacgaggtcaggagatcgagaccatcctggctaacacggtgaaaccctgtctgctaaaaatacaaaatattagctgagcgtggtggcaggcacctgtagtcccagctactcaggaggctgaggcaggagaatcgcctgaacccaggaggcggaggttgcagtgaactgagacggtgccactgcactctagcctgggcgatagagtgggactccgtctccaaaaaaaaacaaaaaacaaaaaacaaaaaaccgggcacggtggctcacgcctgtaatcccggcactttgggagtccagggtgggcggatcatggggtcagtagatggagactatcctggctaacatggtgaaaccccgtctctactaagaaatacaaaaaaattagctgggcgtggtggtatgcacctgtagtcccagctactcgggaggctgaggtaggagaatggcgtgaacccgggaggcggagcttgcagtgagccgagatcgcgccactgcactccagcctgggcgacagagcgagactctgtctcaaaaaaaaaaaaaaaaagaagtgtaataaagcttcatagatttatcatccagactaaattatcagtattttaccatgttttcttttttttttttgagagagtctcgctctgtcgcccaggctagagtgcagtggcgtgatctcggctcactgcaagctccacctcccaggttcaagcgattctcctgcctcagcctcccaggtagctggaactacaggcacccgccaccatgcctggctaatttttgtatttttagtagagacggggtttcaccacattggtcaggttggtctcaaactcctgaccttgtgatacgcccgcctcggcctcccaaagtgctgggattacaggcatgagccactgcgcccggcctttaccatacttttaagtgaaactttgattccctaaatttgagtctcatgtattttgttcctttttaaattttttgggaaatgcaatggaagactagataggagaacagcaaaagtttaaagtcatttatgggggtaggatttgttttttaactgttcttttttttttttaagctctagccaagagcttagaagatgctctgaggcaaactgcaagtgtcactctgcaggctattgcagctcagaatgctgcggtccaggctgtcaatgcacactccaacatattgaaagccgccatggacaattctgaggtgagcccaatgaatgattagaagtgttctggctgtcatgacttggaggacaaaaagaaaaatcgagggtggagagaagtgtaatatttaacagactgctttcttccgtatgatatcggctttctctcactaggggaagatagtctggaataattaatctttttttgttattgttttgagacggagtcttgctctgtcgcccgggctggagtccagtggtgcgatctcggctcattgcaacctccacctcccaggttcaagcgattctcctgcctcagcctcccgagtagctgggattacaggctcccgccaccatacccggctaatttttgtacttttagtagagacagggtttgccattttggccaggctggactggaactcttgacctcaagtgatttgcctgcctcggcctcccaaaatgttgggattacaggcgtgagccactgtgcttggccttagagtaattatgtttaaaaaacaaactgaaaaaagcctttaagttttttagaatgaattttatacattgtgctttactatatcttacaacaccgatgcagcgcaagaattagttcagatttgctttcatattttaatagcacttaaatatttttgttgtttgctttaaaattgctatttccataggtaaactttttaagatacttctcaaacttcacatgcagttttaagaaataatacagagagctctcatgttccctgaaacacctgctattttaaatgtttatgattatttaatttatgcgaaacacttcaaagaatgaagtaataacattgatttttcaaaatttaatactgggacttaatacattattttataattacattaagttattcagtatgtataaatgtatctctattccaagtcatttaaggagtaaattaaagtaaaatgcataaattattaatcttaaggatcaggatcatacatggtcagtaaagttactttgccwtcataattgtagttttaaaaaaaattttacacacactttacattgtttcagtcgtatgtacttatattacaaaagagtttaattagacctctgatgttagtagcaagaaactacaacctttgaaattttaaggaaaattccattttattcaaagtccaagaaaaatacttaaatatcagagttcagtcagcaaagtggaaaccacccaggaaatttaatttgctggttaccgatatgggaaggctagaagttgcrtgatgtaagggtgttgggttcaaacccaagtagaccagtatccctcagaaggacacggawtggaagctttaaatgccatgttactacttgggtataagggtacacaaggtggtatttcatcttcctaacgcacataatgtgtagcacatggtgattagacagtgtaaaatctattgcagtcaagattttacaatctaatggtagcagttaacagatgagagtattagctaatgtacaaaataattggaaaaatgtatgaacacattttggaatgttaagaatgaattccagcttttgttttttctagtacaagaagctacaggtgcacatgtaatttcyaatatatactgaataactttcacaaagcagtgtttgtgaagagttggatttggtaatactaggatttagtttggttgtaggggaatctgtgtctgttacagggtaggttttccttggacttctgtaagcaggagtaccttcaacaagggtgataaattttggcccccagatatgtcattgacatttacatgctttgtaattctatttgggtcagttcatgtggcccaactcagcatccattcctttttttttttttttttttttttgagacrgagtcttgctctgtcaccaggctgtagtgcagtggcgtgatctctgctcactgcaacctctgcctcccaggttcaagcaattctcctgccttagcctctcaagtagctgaaattacaggtgcccaccaccacacctggctaatttttgtatttttcgtacagagagggtttcactatgttggccaggctggtctcgaactcatgacctcaagtgatctacctgcctccacctcccaaaagtgctgggattataggcgtaagccaccatgcctggccccaaatcagtatacattcttgatgtattttattttcaagatgactaaagcggtccaggcgtggtggctcatacctgtaatcccagcactgtgggaggctgaggctggtggatcatttgaggtcaggagttcgagaccagcctgaccaacatggagaaaccccgtttctactaaaaatataaaattagctgggcatggtggcccatgcctgtaatcccagctactcgggagactgacgcaggagaatcgcttgaacctgggaggtggaggttgtggtgagccaagatcgagccattgcactccagcctgggcaacaagaatgaaactccatctcaaaaaaaaaaaaaaaaaaaaaatgactaaagtgggaattcactgaaacatcaactttatttttcgcatcataagatatactttgcaaaattttacatagaacattctttttttttggagatggagtcttgctttgttgcccaggctggagtgcaatagcgtgatctcggctcactgcaacctctgcttcccaggttccagcgattctcctacctcagcctccagagtagctgggattacaggcgcccatcaccacacccatcttagtagagacagggtttcaccatattggccatgctggtcttgaactcctgacctcaggtgatctgctcacctcagcctccaaaattgctgggattacagttgtgagccactgcacctggctacatagaacatttaaaaagcgatacatgaagacaaatatttcttctaaatgtatggactcttatcctggagttgagtctgtagatagaattcaggggctcattgaacttgaaggagggaaacatctttattttccctagcctcaaattgaaatttaaaaccattttcttcaactatgaatactggcaacaaaccacagtaatgttagcagtactgtgaccatgtcaccaatagaaagcacagatgttttcagatcacattatagtacttgcagatctcttgaatattatctgtgctcatcactacttctaaatagggtgtttattagttctaccactagatcttgtttattatttcacataattttttgtttttgagacagggtcttgctctgtcacccaggctggagagcagtggtgtgattacagctcactgtggcctcatcccaggctcaaatgatcctcccacatcagcccctcaagtagctgggaccacaggcatgagccactacgcctggctattttttttatttcgttgaaatggggtctcactatgttgttcaggctggtctcaaacaactgggcttaagcgatcctgctacagtgctgggattacaggcatgagccactgcaccctgtctaggccctgagtgttctgggtaccttgcaccccctcatagtgtgggactcttgctgcacttagtggtattagagtgttagagggttttcttcctaatattatatatcccctaaatatgagccagctctgctcaaaaaagtggcaatgagttccatagctggagaaaaacatgttggatctgcctaagattttcaaggaaaacttttttttgagaagtagtctttctctgtcgccaggctggagtgcagtggcgcaattttggctcactgcaacctccgcctcctgtattcaagcaattctcctgcttcagcctcccgagtagctgggattacaggcacccgccaccacgcccagctaatttttgtatttttagtagagacggggtttcaccatgttagccaggatggtcttgatctcttgacctcgtgatccgctggtctcagcctcccgaagtgctgggattataggcgtgagccactgcgcccggccaaaacttttttttttttaatacacatttcacataccgtaagagtcacctcaagggaggtttttgacaatagttgacttatatgtaacaaattaagaagaataattccttagagtaacatttaggaggaataaggaccctacaaatatgtaaacctcctatttatccttaaactctgattttggtttgtacatccttttgagaatcttaaaaaaaaaaaaaaaacaactctccttagaaaatgcttatatggctgggcagtggctcatgcctgtaatcccagcactttgaggggccgatgtgggcagatcataagccttaaattaagaacataagccttaaattaagagttcttactctggagaaacattgcatataaatttttacctttgaatttaatgtcacatgtttctgtgttcaatcttgttggcctatcatatgacaataatagcagttatttattatataattaaaattttttgtttagattgcaggcgagaagaaatctgctcagtggcgcacagtggagggtgcattgaaggaacgcagaaaggcagtagatgaagctgccgatgyccttctcaaagccaagtaattactcatggactttaacaagtaattagggcctcctggtggctttctttgggccrggttttctttgtattgtctgtatagaataaagaggaggtagagaaacccttctctcacttttccacctgtgcttgttctgaattggcattaggaatttgtacaggccgggcacggtggctcacacctgtaatcccagcactttgggaggccgaggcggacagatcacgaggtcaagagatcgagaccatcctggccaacatggtgaaaccccgtctctattaaaaatgcaaaaaaattagctgggcgtggtggcgggcgcctgtagtcccagctactcgagaggctgaggcaggagaatcacctcaacccaggaggcggaggttgcagtgagccgagatgatgccattgcactccagcctgggcgacagagtgagacgctgtctcaaaaaaaaaaaaaaaaaaaggaatttgtacaaaggtgtaaaaagagagamggaataaaatataattagtccaggctgagtacagtggctcacgcctgtaatcccagtactttgggaggcctaggaggcagatcacttgagaccaagagtttgagccatcctggccaacatggtgagaccctgtctctactaaaaatgaaaatgttagccaggcgtggtggcatgcgcctgtagtcccagcgactcgggaggctgaggtaggagaatcacttgaaccccggaggtggaggttgcagtgaactgagattgtgccactgcactccagcctgagcctgggcgacagagcgagactccatctcaaaatgtatatatataaaattaggccagaataaatttggcagaaacttatataaaggatttttttttttttttttttaattcatggtcttgctctgttgcccatgccgtagtgcaggggcatgatcagggctcactatagcctcaacctcccgggctcaagccatcctcctgcctcagccccctgagtagctgggactggcatgagccaccacactcagacatataaaggatcttacataaaagtcagtttcgctttggattattgcttagatgatgtatctctacagatgtactgagattctgctgtagttttaagattttactgggacagtttgggcagtttatcagaatgtagaaagtatgtcacaatctgtctgccttaaccaaaatagtgggtatgtaataggtatgccacgttgaccttgattcctggaagttggctaaaactaggattgagcaagcatgcccagatataagatcaacctctgttgatggaaacctacatttgactaaagatcctcatcagcagtatggaatagttatttgtcactcaaaattttgctgtcttttttaagaaaatatttattattagtagagaaggaagtcttctgataaaactagcatatcttttaggagatttaaggcattatgctcatatcactttgagttctgtgttttatggtgggtagaccacagtctgacggacttatgaaacattctgaatcgtgagggctccctgagacccagttaagtattcgcccagtgaggtttttggccttctcctgtgcctttgcctgccttagctctctctcattggttggtgagtcaagttgatccttgcaagagctgctgtttattgtgtgctcatgattcagccaggcactaagtacttctcatgaattacttctgttccttacacgaaagcatgtaggaaatgagaggctgatatgggagctgaatctggggctgtcttactctgaggtctgggtcactccatataccatgctacctctctggttcactctagtaaatctagcttctaaccaaggtgttttcagttgttgatgagaaaagcctctctgtgtattgactccagaaaagcattgatgctcgtccaaaggtagtgagttagctcagttgattgttcacagtcagttacggatcgaacagtctcgttctagtctttcctcccttactattgcacttgactagtctttaaaaaaaagaaaaaaaaaagcaattacatttctttcattgacttttcttttagtttttttaataaaatagaggcatggtttccctatgttgtccaggctggtcttgaactcctgggctcaagtgatcctcctgccttggcctccaaagtgctgggattacaggtatcagccactgctcccagcctgtttcatagacttttaacaattatatactgtgctgacatcaaaactttttaatacagttgacaagaagttatattaaatctttgttttgttggtttccagagaagagttagagaagatgaaaagtgtgattgaaaatgcaaagaaaaaagaggttgctggggccaagcctcatataactgctgcagagggtaaacttcacaacatgatagttgatctggataatgtggtcaaaaaggtatgtttcctaagtcttatagtattttatattttaaaatataatctcttaaaggattttaaggatttaggaaaacagcaaattcctaccatctccccgtcttttctcctgcaaagtgtattcgttgttactgttttaaaaaatttgccttggctgggtgtggtggttcacacctgtaatcccagcactttggcaggccgaggtgggcagataacttgagcccaggagtttgagaccagcctgggcaacatggtgaaactctgtttctacaaaaaatacaaaaataagtggatgtggtggtgtgcgcctgtagtcctagctactcaggagactgaggtgagaggatgacttgggcctgggaggttgaggctgcagtgagctgagatggtgccactgcactctatcctgggtgacagagtgagaccctgtcaaaaaaaaaaaaattttttttttttgccttggacaccaaccaagtggattgttccatattgttgatactttctataatagataacatttttggttatgattattgtcacttatgaaaatgtccattttgtagcagatcttctgcctgcacttatatgatatgtatggagggagggggcatagtaagatgggaaagggcctgtccatggtatttgaataggaattagaaggaaacaaataaggcttatattctatttctgagcttcagatttccttacacatttccaacaaaatgtaaacaaatgaaggaatactacttctgtttcttggaatgtttatggtaytttttgttcaatttaatcacataccctgtgtwtttgctcaggtccaagcagctcagtctgaggctaaggttgtrtctcagtatcatgagctggtggtccaagctcgggatgactttaaacgagagctggacagtattactccagaagtccttcctggrtggaaaggaatgagtgagtacaactgaagtaatgttttttttttatgttttaaccactratcaatgaatctaaacttgcttcatctccattgtagtccacatccctctggcatgcatgcatatctctttttgttacagcgttttattttaaccacagtcattacagatgacacagctgcaacactactcttgtagttttagctgtggtgaacatgagttccagctagtgtttaattccataatccgtgattggttctgttctgatatttgctactcaaaaaaaaaaagtttggaatttgagtgaacaaaagtgacattataaccttgacgctactgaaatattattgtatatgtataagtattaaaaaaccttattactttaaaagtatttgtagtgaattatttaaagcacactttatgtctgctctgtgacaaaacaacactttgttgagaatttacctagggaccctgcattgagaaaggaaccagctttctggctatccacttcctcaagctgaaactacagagaactttgatgctgaagtcgttacatggtgtagctatagtcacatttccctgaagttctgtgagagtactaagaatcacagagatcacctgtctcagcaaaattaaaataccgtttatttttatttttattttttttgtcgttgcccaggctggagtgtagtcctccacctcccgggttgaagcgatcctcctgcctcagcttcccaaatagctgggattacaagcatgcgacaccacaccaggctaattttttgtacctttttttttttttytcttttttttttttttgagacaaagttttactcttgttgcccaggccggagtgcaatggcgcgatcttggctcactgcaacctccgcctcccacgttcaagcaattctcctgcctcagcctactgagtagctgggattacaggtgtgagccactgcgcccaaccaatttttttgtacttttagtagagacagggtttcgccattttggccaggctggttttgaactcctgacctcaagtgattcgcccaccttggcctcccaaaatgctgggattacaggtgtgagccaccacacctggctcaaaacactgtttaaatgctagcatttgttagaaagcagacttctcatgttgtaggcctctctgggctgaaggtgtcagggttgcatcacagaaccacagctggtctaaggaatgaaggtaataaataccagtgcagggatttataatcattctgcatgatggccacccagggagactgaatgtcaagaagtggagttaaggctgtcaaaagataactcagacattgagctctttgaatgcagttgactcaggaggcagatatcagttagattgttgtcaaataaaaaagtgacagtatgatttatgagagagaataatgtggagaaatacaaagttcagtctgggaccagtgacttttgtttagacactggatagctaccatcgagcaaagaaggcattgtggacaatttatccttgagaaggataaacttgagccacgttggcactgcttccctcatcagaatttctcaaggggttgtctgtgcctcattgaggttacaattgaaacagatgtgagcacctgagagactttccctgattatattcctccacaaaccactgtaccatattaccttattttatcttcttgaaattcttattcattggcttgtttgttgtctctttgcattagatatatgtaagctccttggcataaatttgacattggtaggtagtagggggtctccagtggctcaaataaaatgaaattaggttgacagggcaggacaaattttatttgtggagagttagatacgagcatcaaccctaagaatttgcattctgtctttggtcttcccagtagactaaatcctactaatttttccaagccagctctcaggtttttaacttttgctttttttctgcttttgaaagtgcctatcgcaaaamtttttttttttttttttttttgagatggagtcttgctgtgtcacccaggctggagtgcagtggtgcaatcttggctcactgcaacctccgcctcatgggttcaagcgattctcctgccacagcctcccgagtagctgggactacaggcgtgtgccaccacacccagctaatttttttgtatttttagtagagactgggtttcaccatgttggtcaggctggtctcaaactcctgacctcaaattatccatctacctcggcctcccaaagtgctgggattacaggcgtgagacaccacgcccggctgcctatcgtaaaacatgaaaatgttaaacagtggttctcaactgagggcattttgtccctcacatgacatttggcaacaccgggagacatttttgtttgccgcaactgtagggagctactggcatgtagtgggtggaggccagacgtgctgctaaacatcatgcagtacacagaatagcccccttacagcagagaactgtccggaccagaaggccagtagcaccaaggttgagaagcctgtgctaaagaaagggccatgtataaaatgaaggtcccttgtgaagcaatctatattgtttcttttttgagtgacctccatttaaatctttattaatttataaaatagagtatatattcacaatagaaaatttgaaaggtacaaatggcatttgaagtttccctctcacagttttcctcctcagggacaaccggtattactgatttcttatgtatttctagagatagtaattattccatgattaccctagccctccgtggatgtcctcacctctgaaatcagaacgcactaagacctaaaccaaatttgttagtactggtttgtgttatgaggcattttgctcttattgtcattatttctttattatactttaagttctgggattgctcttattatttccctaaacgacaaatgtcctgatgatgttcactacatccagtactctttctgtgttatctgtagctgagcaagtttccaaacgcaataatagctagtggtattgagcattattttgtaccgggcactgagttctaagtgcttcacatatattaacttatttgaaattcataacagccttacaaggcaaatttggttattatcccaattacatagatgaaaaaagtgagacagaaaagtaatttgtgcaaggttggggtaagagccaggatttcattctcccccactagcactattctctgcctaaatgatttgtatcagcagcacgggactcccttttggccttttgagaagaggaatgatataaccataataaggaggaaattttatttttatgagattgacggtgtaggagggagtgatgtttagtcagttgatgttcagagccccttggatgaaaaatacctgtctttggacttgttgaatgcaaaggttattaagaaggtcaggactggccaggtgcagtggcttatgcctataatcctagcactttgggaggctgaggtgggtggattgcctgaggttaggcgttcaagaccggcctggccgatatggtgaaaccccatctctactaaaaatacaaaaatcagtcgagcatggtggcatgcgcctgtggtcctagctactcgggaggctgaggcaagagaatcacttgaacccgggcagtggaggttacagtgagccgagatcgtgctgctacactccagcctgggcaacgggagactccgtctcaaaaaaaaaaaggacgttcataccaggatgttcagcagctcatcctgagaggcagtagctgcgactggctgcattccccttctcctgtcacgtgttcacactgggtacttgtgatacttgtgattgtggtgggggacatcattcaaactatacagaatgccattttttccctttactctcaaatcaggccattgtagttctttaatttgcacaggttaaatgaaaatttagtttgaattcattgttttaaaaatttcaaagaagaactgaatgtattaagtatctgaaatgttaagagaggcctggtactgtgaacagagagtcaaaactgtgatttagtaaaatactgtatgaactaatgaaaatgcgagggataaaagaaaattatagtttctatgaaatgcttaagttgaggctgggcatggtggctcacgcctgtaatcccagcactttgggaggccgaggcaggcagatcatttgaggtcaggagtttgagaccagcctggccaatatagtgaaaccccgtctactaaaaatataaaaattagccaggcgtggtgggaggcgcatgtagtcccagctacttgggaggctgaggcaggagaatcccttgagcccaagaggcagaggttgcagtgagctgagattgcgccactgcactccagcctgggcgacagagcgagactctgtctcaaaaaaaaaaaaaagaaatgtttaggttgctgggtgcagtggctcatgcctgtaatcccagcactttgggaggctgaggaaggcagatcgcttgagcccgggagtttgagaccagcctgggcaacatggcaaaaccccttctctacaaaaaagtacaaaaattagccgggtatggtggcatacacctctagtccaagttacttgggaggctgaggtgggaggattgcttgagcccagcaggtggaggttgcggtgacctgagattgtaccactgcactccaggctaggcaacagaggaaggctctgtctcaaaacaaaaaaacaaaaaatttaagttgattactgtgaaacagagataagtcctttgaaaccaaaaccacaattaatatcaatgattcttttattttctaaaatgttatttaccttgatttgtcttgttttacagtttaaattttagaaaatagccgtatcatttcattttccagtattaaaatagcttttcctggtactagtctccgattccttcttgtttccttttagatatttctgtttaatgatcaataactaaagtatgtgcattcttttttttcaaactgttctattttttcctttgtaggtgtttcagacttaggtgagtgttatgtatatttcatgtttaaagtcttttgttttgggtattaagagactaaagtctttttgttgtrcctatgattcttacacaaagccatctaaatagatataaagtagaattatgtcacatgataaatctgaattggatatttttggcatccgaatgctctcaggaatgaaaatgtttcatcaagtgattggaatcctatagatgtgaaktgtgtgtgtgtgtgtgtgtgtgtgtgtgtgtgtgtaatatggattgtaactgattactttggagaatttcaaacattaaaaagtaagaagaaaactaaagaacttccaggacccatcactcagttttgtagccatcagcacatgaccagttttgtctcatctattcccactcctcctcagcttatatagaaagcagactcaaatatcacattctttcacttgtaaatactttcagtatgtttcaaaaacatcaccatactattatcacacctaaaacttagtaacaattccctagtcaccaaatgtccattcagtgttaaaatatcccctattatttcatagaatgagtttttacagtttttatttgaatcgataacccatagacgttccacatgttgagtttagtcaataaatctcttgcccctttttgttttttgcttttcaatgtatttattaagaaattgagtcattagtcatatagaatttcctacattccatattttgctgttggagccataattcttcacttcatcttagccaaaagactaagaagtgatggagtcataattcttttttttttgagacaaggtcttgctctgtcaccaggctggagtgcagtggcacaatttcagttcactgcaatcttcgcctcctgggttcaggcaattctcgtgcctcagcctcctgagtagctgggattacaggcatgtgcccccatgcctggctaatttttgtatttttagtagagtcagggtttcaccatgatggccaaactagtctcaaactcctggcctaaagtgatccacccgtctcggcctcttaaagtgctgggattattggcatcagctactgtgtctggccggtggagccataattctctcttttttttttttttttttgagatggagtcttgctctgttgcccaggctggaatacagtggcgcaatttcggctcactgcaacctctgtctcctgggttcaagtaattctcctacctcagcctcccgagtagctgggattacaggtgtccaccatcatgcccagctaatttttgcatttttagtagagacggagtttcaccaggttggccaagctggtctcgaactcctgacctcaggtgatctgcctgccttggcctcccaaagtgctgggattacaggtgtgagccactgtgcctggctggagccataattcttaatctgtgtatgtgttgctacatttttggattgagattttaaaaaaaaacaaacattggtttaagcctagatgagaatctttgggtgtattttaaaaagctttgcagtgattctgatggacagctctggttgctgtgttgggatttaatctagatcatatgtgtttaagaaaagtaaaaaaacttattaaggaaaagtctgagagaatttgaatttgatttttagttttagcagaaaagaatcttcaattggatgcctgttataactaatcagagttatgcctgaaagaaaatatagaagtgattgtatatataagttttgtctttaaaggcaaagttacagtaaatgagaaagtccatttataattagttcagattaaaagagggttcctggaaaacaactgattatctgaaggcctacctgaattttgccaggggttgaaaataccttattggacactagccaatttctgattgaactggggaatctaaatctcttttcatgttagctaagttttactttcgtttactgctcttaaattataatcagttgatgcagattaccttgtaatgaggtataatttcagtgacatcattaatattttaacatgctcttttgcttagctgacaagctctctactgatgatctgaactccctcattgctcatgcacatcgtcgtattgatcagctgaacagagagctggcagaacagaaggccaccgaaaagcagcacatcacgttagccttgragaaacaaaagctggaagaaaagcgggcatttgactctgcagtagcaaaagcattagaacatcacagaagtgaaatacaggctgaacaggacagaaaggtaagagaaatgagaattgttgcctaacatttaaagtgactctaacttgattgtttacttgtagaaataatactggctcagcygggtgcagtggttcatgcctgtaatcrcggcactttgggaggccraggtgggtggatcccttgtggtcaggagttcgagaccagcctggccaatatggcgaaacccccgtctcttctaaaaatacaaaaattagctgggtgtggtggctcgcacctgtaatcccagctactcggaaggctgaggcaggagaaccacttgaaccagggaggcagaggttgcagtgagctaagatcgtgccactgcattccagcttgggcgatggagcaagactgtctcaaaaaaaaaaaaaaaatactgacagtcattggctttaggatattgaatataagtcatgccagctgacctttagaatggagcttaggtcctcattcccctcatcagaacttctaggaaaggagtgatcgagcagagttcctttatgttgagcagatgcagaagtgtaagaaaggaataagctactggtatccaggattatctagctcatctttccagtggagctgagcctctgtcccttaaagcagtgctgaacgaatctttgttggagtctgagtatatttttctctgctattgttgttaagtggttggtggttaaaaaacaggtgaaatagcttctttagccctctgtctgggcacaccatttattaaataggtgtccacaggctgatttgggaacctaactactcatcccacctttgtgtcttcttagcagtactactggccactccttccttcttgaaactatttcttccctaggctccctgacaccatactcttctggcctttctcytaccttgctggccactccttaacctccttttctgctcagcctctcaaatggtggcatacctggcattagttctgaaacgttttctccatctgaactgtctctaagtgttcttgttgagtcccgtgacttggaagtttaaataccatctatacctgataaatgtctatctccagctctgacctctgccttggcttcaggttcctatccagcagcctacctggtatctccagcttgattttcagtagtcatttcatgcttatcatgctccaaacagatttatttattctctccaacctgtcttccagcccctcaacttgtttctctctaaataaactgagttgaacaatctgctcagctattccagcccaaatcatgctttgttgttcctccatcaactcatattcasttgccccacagatcctaccagttttgcatccaacataaatcccaaatctgtccactccattactaccaccttagcccaagctgtcatcttaacagcttccactattttttctttttctttctttyttttttttttttgagacagagtctgtctttgtggcccagggtagagtgcagtagtgcaatcttggctcattgcaacctctgcctcccaggttcaagtgattcttgtgcctctcagcctcctgagtagctagacttacaggtgcatgccaccacatgtggctaatttttgtatttttagtagagacggggttttgccatgttggccaggctggtctcgaactcctgacctcaagtgatccacctgccttggcctcccacggcgccagaattacaggcatgaggtaccatgcccggccttccccaaggaatttaaacaccaaagtgctgggattacaggtgtgagccaccatgcccagccaatttgccctttcttcatacccttctttctgtgtctatttacgcaggcaaataaaacatagtcgaatcagacactacactgctggaaatcctccatggactacccatttcatttaatataattccaaaytcttaaccagtacccaaaaggcttcttgatcactgcatgccatgagccatttcrctgctccaggcaccctggtattttttgtctgtaccttgactatatcttttgtcttgggacctttatgttttctctgcctagtacattgttctatcctctctgtttaaaccttgagctctaagcttaagttttaagcctagatgtcactttgttagcaagactgagatttcctatcccttcagtccaaagtagagtctctgtattactttctgttatgttgccctgtttattttaaatgtaaggtgggggaaaaggaggttgaaggggtgttgatgcttcacaacaggtccttgcctgctcagtcatatgtagaaatatgtatcacaatctcagatgtcttttttgtttactgtctgctgcctccattgagatatacactgtgagrgcaagaagttcgtctgccctaagcaccattggatccgtacagatagtaggcactgcctggcacacagggctagtagcacttcataaatacttatgcactgactgaatggattcattgatttattatattgtttctgagaaaaaataagttctggatttcaggtaatcagtgttaagtaatttgtaaagtgacctatggctatttgttaggcaaggtatattttttggttttttttggcccatgttgaatttaaattcatttaaaaataagcagttttctttgtttagaagtctatgtcaagtctatgtcaataactaccagatacttactaattttctttwcttttttctttttgagatggagtcttgctctgtcgcccaggctggagtgcagcagcgcaatcttggctcacggcaagctctgcctcctcggttcacgccattctcctgcctcagcctcccgagtagctgggactacaggcacccgccaccacacccggctaattttttttttgtatttttagtagagatggggtttcaccattttagtcaggatagtctcaatctcctgacctcatgagccacctgcctcagcctcccaaagtgctgggattacaggygtgagccaccacgcccggccaactaattttcttaatgattcttcaaagtaggcattattactcacaaatgagaaagtggagatttgagaagataaatcatttccccaaggtcacacagatggttgtagtaaagctacgcttgattccaagtatatagttactttttttcatatcctggatttagttatttctcagaggagcatgtgattcaggaaatggcagtgttttatatgagaggcagcctggtgatgtggaaaaaccacaagtttgggggtgagagagacctttgtttgaaatctggtttttgccacagctgtgtgatcttgtttgaatcaccttccagggtttagttttccgtttcacatgagaagtagaagtgtacacatgcctggcacattagaggcgttcaggatatggaagctgctgttgtcatggttgatagtggtctttctgttttcctaaaagtatatgtggagaattgaaaactaataactactatgtttggtttcacagatagaagaagtcagagatgccatggaaaatgaaatgagaacccagcttcgccgacaggcagctgcccacactgatcacttgcgagatgtccttagggtacaagaacaggaattgaagtctgaatttgagcaggtgaggacctggactcccttcagccacacccctcttcctgacaggattaagagactctcctttccttttaatgtactctgaggatgtcgaagatttggaaatctccttgtatgtctacaaaactgcttctttttacataatggtgtacctgtgtgttcatgatcagatgtgtttttaaaatatatattctagtcatttggaatcttcagagctttaaggagagttggtaaaggggatttcaggaatgcagacagtaatatttgacatgtgtatcttcctcctatagatggcatggtactgcttagatttttataactgaggtaatttcccagagaagttttgaaatcccagtaaattatcaggatgcctgtaatcatagtttctattcaagaaatcatttacagtaatattaacttgttactttgtcttgcaagaagatattgaggttttctaagtaaaatcttccagagaatcgcgatgtatgtcagtatgaaaaggtattttaaattctatttggatatttttctgagaaaaattaatgtataagctcttaaatacaagatattagaatataatttaatctaattattatgtttaggtttgcagtacagataatttactttctaaagctgacaatttgtggctgagcacagtggctaacacctataatcccagcaatttgggaggctgaggcgggtggatcgcttgaggacaagagttcaagaccagcctgcccaacatggcgaaaccctgtctctattaaaaatacaaaaattacctgggcatggtggtgcatgcatgtaatcccagccactccggaggctgaggcatgagaatcgtttgaatctgggaggtggaggttgcagtgagctgaggttgtgccactgcactccagcctggatgacagagcaagattctgtctcaaaaataaaatacagttggcagtttgtttctgactttaacagccttctctcttctcttggtatgcctcctctaatattaggttccatcagtaaacctgtaaagaattatatacatcggccgggcacggtggctcacgcctgtaatcccagcactttgggaggccgaggtgggcggatcacgaggttaagagatcgagaccatcctggccaacatggtgaaacccatctctactaaaaatacaataattggcatggtgatgcatgcctgtaatcccagctacttgggaggctgaggcaggagaatcacttgaatctgggaggcggaggttgcagtgagccaagattgtgccactgcactccaacctggcaataaagcaagattccatctcaaaaaaaaaaaaaatatattatatacatcaaatatgagtcaggacatttttgaaactttacacaaaatgtaggaatttcgtgacaactctaaggccctctttgcttcagcaagtagttgctggaagattacacagttacatgacatgcattgagtatcacttttttctggaactatttctgttttatttcagaacctgtctgagaaactctctgaacaagaattacaatttcgtcgtctcagtcaagagcaagttgacaactttactctggatataaatactgcctatgccagactcagaggaatcgaacaggctgttcagagtaagcataagctatgtttatcttacagataattttcctcagcataatttatcaaaataattttayagggaaaatggggtacatgtactgacatcaggacataaaaatactaatcactctacttaattgcagtttttgccattaaaagtaatggcaaaatctatataactagaaatttataccttgtatgacaaacacaaaatcaccatttacaaggctatttacccagtatcctttggctatgtcgcatgtgcctgggtggtaagggctaggggtcagtgtggtcccatgcttgccttccacagacttggtgggttatctggaggtggtgatttgccgagtccaactaccaaatggacagtatttatgctgaggcctccatgtgccacattgaaagagaaatgtcatgacaatgagggtattaataaaatgggtttttttaggatgttatggaatctttttttgtcacataacaataaaaataaattcaatactcatggaatttcaagatccagtagtctgttaagttcgtttgaagtctcccatttctttttttttttttttttttttgagacagagtcttgctctgtcgcccagggtagagtgcagtggtgtgatatcgactcactgcagcctccgcctcctgggttcaagcgattctcctgcctcagactcctgagtagctgggaatacaggtgcgtgccaccacgcctggctaggttttgtatttttagtagacacagggtttcaccatgttggccaggctagtcctgaactcctgaccacaagtgatccaccccacctcggcctcccaaattgctgggattacaggcatgagccattgtgcctggccctgaagtctcccatttctttgcagaaaatttctcatggccttagcgttaagtcttagcctaatttaaataatatgtttctttctcaactagtaaaggtaaaaatatgtggattagatatcatgcagatgtgaatgacttctgactttactgcctgatatgaagaggccagctaggaaaatacaccagaaataagtggtgggggtggggttgtaagaaagtctctctggcctcatcttgcacatgtgtagatgtagcttgttgaatgtgcatcagttctgtggatgtatgttgtcagatggagagaaaaatgtttggctttgcctttttttctttgtaggccatgcagttgctgaagaggaagccagaaaagcccaccaactctggctttcagtggaggcattaaagtacagcatgaagacctcatctgcagaaacacctactatcccgctgggtagtgcrgttgaggccatcaaagccaactgttctgataatgaattcacccaagctttaaccgcagctatccctccagagtccctgacccgtggggtgtacagtgaagagacccttagagcccgtttctatgctgttcaaaaactggcccgaagggtagcaatgattgatgaaaccakaaatagcttgtaccagtacttcctctcctacctacagtccctgctcctattcccacctcagcaactgaagccgcccccagagctctgccctgaggatataaacacatttaaattactgtcatatgcttcctattgcattgagcatggtgatctggagctagcagcaaagtttgtcaatcagctgaagggggaatccagacgagtggcacaggactggctgaaggaagcccgaatgaccctagaaacgaaacagatagtggaaatcctgacagcatatgccagcgccgtaggaataggaaccactcaggtgcagccagagtgaggtttaggaagattttcataaagtcatatttcatgtcaaaggaaatcagcagtgatagatgaagggttcgcagcgagagtcccggacttgtctagaaatgagcaggtttacaagtactgttctaaatgttaacacctgttgcatttatattctttccwtttgctatcatgtcagtgaacgccaggagtgctttctttgcaacttgtgtaacattttctgttttttcaggttttactgatgaggcttgtgaggccaatcaaaataatgtttgtgatctctactactgttgattttgccctcggagcaaactgaataaagcaacaagatgaaaactgagtatcttatcccttttcaaaaagtacagttctggccaggtgcrgtagctcacgcctgtaatcccagcactttgggaggctgaggcgggtggatcacctgaggttgggagttcgagaccagcctgaccaacatggagaaacccatctctactaaaaatacaaaattaagctgggcgtggtggcgaatgcctgtaatcccagctactcgggaggctgaggcaggagaatcgcttgaacctgggaggtggaggttgcagtgagtcaggatcgcaccatcgcactccagcctgggcaacaagagcaaaactccgtctcaaaaaaaaaaaattctagtttgttgtatgtacagaaaatatccttgagaaacaacagcagcagaagtaggaacttctagctcacagtttccaggctgtgaattgcgtcaccagaagtccacagcctgctttttgcctttgaaggttttggtgaattgattcctgctgctcagactcaaaagagtaatatacaagccaaagtgccacatgtatttataattggggatatatcgttctagtgacttgttaaaatgttggtctctacccacaagttaattcagcagccctctatgggtcacagctgacagttctaaaacactggtaatggagcttagttctttctagtacctgggctgtgaatcccttcaaagtggggggatggggagcctggaatcttaatgaagagattaaatagttttgttgtgtatttgatgtagattgctataaaacccagagaactttctcagttcatctttctaaagattagtacaactgtcatattgcataagcactaacaaattcttttactccatgaagaccaccatctctacataaaaatgtcaactttcttcaaaattacaactgtttgttggggattgtgtgttcacaaagaaattgaggaggcacttttatctgggcaacacatctggaatcacaaaaggggcagcttctgcatctgtaggtgtatggcactggccttgtcctttgattttgggatatattggtccacctttggcttgtgttaatgttgtcaatagtccttatattccctcctaagtggatttacttaattcaacaaaatatatttagtttctgattggaacacatgctttgtgttccttcctgagattaatgcccgtcatctcaaaggcagaggcactctgtgcacctacctagaggatactaagtttttattaggagataataggactgttctaaattcagtcttcctttttcgaatggcacaaaattgcaaaatacattacttgtaaagctaaacttccctatttgtcatattagaaatgcttataatttccattctacttgtatatgtaaaatattataggttataagaaaatctaagtttctcttggagccctgaaataacttccttcagatgtgattatctgtctgaacttagaagcagcaatactgagtggtttatttattattattattcttttttgagacagagtctcgcactgtcgcctgggctggagtgcagtggcgcaatctctgcccactgcaacctctgcctcccaggttcaagccattctcctgcctcagcctcccgagtagctgggattacaggtgcccaccaccatgcccggctaatttttttgtatttttagtagagatggggtttcactgtgttggccaggctcgtctcgaactcccgactttgtgatctgcccaccccggcctcccaaagtgctgggattacaggtgtgagccaccgtgcccagtcaagtggtttattttaacctgtaaaacaaaataatgaagactacaagcttctgaatcttagtagttcctttaccagccaacacacccacccccttgattgcttattaggaacaaagatgataccgaaaaggggaccctgcttggccaggcctgtattttccttcctcgtgcttaaaaatcttcctgagatgtaactcagtaacatgtgcaaaaagcagcggagcctcttcttggattctcagtgctacttcaaggagatgatggagtcccaagggccagggttatccgggaggtggatatagccctgagccattagggcaggtaggcttctcttcaccctttcatttaaactgcaagtgaaaagtcacacgactgccatttccacagcaaaaatcataaaaagccaaatcatcacttctgtcttggtttcatcctcaatctgttttactctgaaattactttattgcctccctcctcactgatgtaggacagtgttcaacatcttaaaactcacacatcctgatttaacattttcatgtttaatatttcaaaataatgtaacaaactaaaacctaattttagactgtctttaaggcacaccaccttcatattcctttgtatttaaatcccctkttctcttaacaggttctggataaaagcagtctccaagtcccaaatgagtggtgccaccagttttaaaagtaacttgcttggctcagtgcagaacagatcatttgatttaacacagaagggaaataaaaaggcgtattaaatttcaggcagattcgcttcatcaggtccagtggtcactacacccctgttgtactataggtctatgcttccctggtttccttcccattgatgtatccagaggttggcagggagcttgaggaagcaaaggatgggggcagggaggagggtcacctgcccactgcaactcttacccatgtgaggagtaggtttcactagtctattattagttttgttgaaggacttctgcaggggttgtgaggcaagagcttgtgaaagggccattgttgtgggaacagacaccacgggtacttgtggcagaacttagattgtcctgggagtaaattctgtcatgacctttactcctcttggacactcttttcgagcatcttaaatcacagagctctgaaaaacatccttgggcttgatccccagcagtcctgaatcctgaaagtccacagctggacagtttttttggtttgtttttttttttttttttgagatgggttttcactgtgttgctcaggctggtcttgaactcaagcaatcctccagcctcagcctcccgaagtcctgggattacaggtgtgagccactgtgcctggcctggacagcattttttaataggctatttcctgggccaggatgaagacttgttcactgcctagattttgtgtaatctgattatcccatgtcctagcaaattgccttacagcacccaaatcaaatacacccatttttttggtaaaatgccactctaccattaatgttgaatctaaatggttstataaaacctgccttatacatccatgctcctagtgactcaatttcctagcgtatcttactttttgaccatgaccagcagtaaaaaatttacatcacgatttgctacacttaatgcatatatctatgcacagatctatactgcaatgcaaaaatgcaccatcacaaaactgtaggtgacgtgcttagatgttctaatgcatttcattaaaaaattgcaatcacccacaaaaactgatttcaaaccctgcagtttgaaagacaaatgctaccctgtcttagagaatatgggtacatagccagtgacagtacaatctgacatcttttcctctaagcctagtgcttggtatagtgtttatatagcagctaactggtttttttttttttttttttgctttgaggttgctgaaaggggagtctgctttactgtggttacgttaggacttctcgaagttctgtttcttaggcggtcatatgccctacttttagtagcaacatgactaaggtctcaaaatcaatgaatactttgcagagttggtggcattcattaagcatttactaagaagcacctacgtgccagatttgagtttgattctagacatgtagaatcttttgagtgccatccaacctcttgaatactttgatggctataaaacaaccctcaaatgttgaaccaaactagaagtctagtttctgacttctacacattggtaatgtaactctgtggcaacactgagcaagtttattccacatatagtaagactccccttccccttcccattccatgagtccttaatcccatttgctttttttttttcttggagacaagggtcactctgtcaaccaggctggaatgcagtggtgcagtcatggctactgcagcctcagcttcccaggctcaagcaatcccctccacctgtctccagagtagctgggattacaggcatgcaccactacgcccaactaattattaaaatcttttgtagggaggggggtctcactgttacccaggctggtctcaaactcctgggctcaggtaatccacattggcaccctaagtgctgggattacaggcatgagccactgcactcagccccatttgctcttccaaaattctggtttctccaagacagggtcttgctctgttgcccaggctggagtgcagtggtgcgatcacggctcactgcaacctccctctcctaggctcaaacaatcctcccatctcaccctcccaattagctgggacacagatacataccaccagtctggctttttatttttttgtagatccggtgtctcactatgttgcccaggctagtctcgaactcctggacctaagtgatcctcccacctctgcctcccaaagtgctgaggttacaggtgtgagtcaccacacccggccgaagagaacattttactcatagtagaggctaaagactatgataaaataagcatttacagagaatggagactcatcctgtgaggccttaatttttctctatgttcaaggcagttaattgctcagagtatgggtttggaggatctgtaccacaaacttaaaagtaccaagctaacaaatcactcattttgaaagtctactacaaattcataggccatctacccaaatggattttctcctatcaactctagctgcagagcaacatggtgattcagaataggtgcctggataggaagaggcataccgtgaatctaaggactgtattgaatagtaaggctaacaagagtcaggcatctgcaggtgctgatgaactagagacaggaagggaccgagttaacatttcaggtggccaaggctctccttggaagctgtaaaccaagactgaaggctaatttactctttctgtcctgcaaatctgctttgatatggagcaatacccatggatgcttaagtagctagctactatatcggctttttttttttttgtccctcaattaaatgccttaagacctgacattccaagagaaaacaaaaaccatactttggtttctaaggatgtatgactgggtcctggccttcagaggatggcagacagatgggaacacaagtataagtagactagagtatcccataattgtcaactctggcaaggtaaagatgaagctgcttatgtggacgactcgtggggtacctaagtaaatctgggagccaggtacgtgcaaagtggtcagtggtagaagccctcatgaaggcaggaatgctgcaaacctccacttactgccttccaggaccacttaagtcatagtggtaagagctgctagaagtagtcgttaccaacttgattaccagcaatacacaatgatgtcaagaagacattccacatccttctgtcatcactagctctcatttcaaccactaaaataggtaacagctatagacaaaaaaaaagggagacatgaaacattcatggctgttcaagttagaaaactatggcagcggctatattaacaaaaatacaaacgtgtacactaattacaacatttatctacagtcattttaccagttgtgcagcctaaactgccattatcttgtttagtcattcctaagatgcgttatttctgacatcgaaatatcctgaaattgggaaactattgacccaaccccaactgtgttagaactgcatgaacacctaagatgaaggaccagcatcacagcagcacatcaggccaacaaaggcagaagtccagcagcaggagagggcaatcgcacgaggacagcatcgtgagg

SEQ ID NO: 95625 - DNA, 92084 bp, Homo sapiens
  misc_feature (1)...(92084): n = A,T,C or G
tcccagctactcaggaggctgaggcagaagaattgcttgaacccaggaggtggaggttgcggtgagccgagatcgcgccattgcactgcagcctaaggcaacaagagcaaaactctgtctcaaacaaaacaaamcaaacaaacaaacaaaaaacagatgggggtcttgctacattgcccaagctggttttgaactcctgatgtcaagtggtcttcctactttggcctccaaaagtgttgggatcacattcatgagccacctggctcagctggattagacaatttttttttttttgagacagagtctcgctctttcgcccaggctggagtgcagtggcgcgatctctcctcactgcaagctctgcctcctgggttcacgccattctcctgcctcagcctcccaagtagctgggattacaggtgcccgccaccacgcctggctaattttttatattttcagtagagacggggtttcactgtgttagccaggatggtctcgatctcctgaccttgtgatccacctgcctcggcctcccaaagtgctgggattacaggcgtgagccaccgcgcccggcctagacaattttaaagaaactttctagacgcacaacagtttaattctgagtaatgacgaggtatgagtattaaatgtgttattagccgagttaaaaagtgtgttattagccaagttttaggttaaaaaaaaacacaaaatcctacttaccctgtttactgtggatgcaagtgcctgaagaacggctactttatccctaaaaataagaaccacaagttaatcctcatcagggctcttcatagccacaaaccgaacaagtgattctactctcagtgtactggccaataacatagtgcagatctcatctgaagctggttatgtcacaaggtcactagaataaattagaaattaagaaaactgctggttctttcccctagttggtacatgttcctctctttgcctgtcctctctggcctggtgcataatgccataacccagggctagtgatttccatcccgccctcataaaactatctggcctacttcctctacccactttcctgtggattcttactgcagctttcgggactactgttgcctttactatcctaattggtagctcttgattcagttataggagaataaaccacaggcttcactctggacctattgcatcaaagcctcccaagatccatggaggactgtcacacacactcttactgaattcccagataattctgatgcaacctcctggtttagaacctctcaaccatatataacgttatggtaagaattgcaggccagctgtccactgcacctctgagtagagacctttactgaactattagaaaaggcttcactggaataaatgacagacaagataatttgatctcaaatatatttgtgctcctatgttagatttaatgtgtttcctttccaaaagggaattataccaagagtatttttctaaataaagtttaacataacattcttaagactataagtcatctgagaaaaacaaaagtacaggaaattttatatttcatcaaaactaattccctgatgtacataatatccactaaattttctatccacgtttagaagtcacatttatgtaatttcagcaagtgtgataacgacacattctctcatctgtcagcattccttcagcagatcttttattgccctatttaagtcttatcaagttagcaaactttcctaacatattgaacaaatggcagtgaaaaaatgatgacattcagattactcactaattctctttctttaaagggttactttaaaaggtatcatacattatcttaaaaaaataaactagaacattacacgttaacctaaagtgtctggtgtcatcttgtgacccctctccacgatgaatttggtatttgtatttccagaacttttaaaggtattttcacacataaacatctccctaaaaaacgtatacacactgtcattctgcatgtgtctacataagtttggctgcactatccatgttattaaatatagagctaattaattcctttcaatgtaaaaagttattgtatgataaccttttaaaattatccattcacttttcaatgggcattcaggctgtttcaacctgttactattcccaagtaataaagaacagtcttgtccatgtatatatgcaaatgttcctccaaagtggctaaccagtaaggtacgcacatttccaattctgattctgccaaatttccctccaaagagctgttccaatttactgtcccataaacaaacgtatttcttcaaatcctctctctgccaatacggtaagttttaatttgcacttcttttatgatcccagttacctatgcattgacatcactgggctccctggcctccctaaaataatcacacagttcagattaataaagttcttaaaaaagtctttttaaatgaacccaagtcttttttttttttttgagatggagtcttgctctgtcgcccaggctggagtgcagtggcgcgacctcggctcactgcaagctccgtctcccgggttcacgccattctcctgcctcagcctcccgagtagctgggactacaggcgaccccccaccacatccggctaatttttttgtatttttagtagagacggggtttcaccgtgttagccaggatggtctcaatctcctgacctcatcatccgcccgcctcggcctcccaaagtgctgggattacaggcgtaagccaccgcgcctggcgaacccgagtctttaggtcacataattttaagacctagctttttgaggggccactaaatgcgttcaataggactacactgtaacaagcacttttgtgaagttttaattcctgcatattcaacaaatgttgaataaatgagatgaggcaatttgttcaaggatatatccagtgaataaaaaagctaaattttgctgtccacaccatttactttatttttacctcattagagataataaagacagtaactgtctgctcttgaatcatatgagagaacttccttgaaaaaaattattctaatgatgatgttcatgtataaccatgtattattaaccacgtaaatagtaacccacactaattcaaaatctctttcaattgttcttttaagtaaatctcattgctcattcactcactattctccacctttccattttttgtcctttaaactcctagcttctccccgctcagctactctcttcaagaatgctctcctattgctcttcctgtcactgtctccttacctaacccttatacttctctcatagtaagcactcaaccatttgctgaatgaacactgatagaatacttaccaagttttcttttttggaattactacttcttcaatccctaatgtaaaaaagaaaacatgaatcagtttcctagtactacaatggaatccaacgtgttgatataaaaatagaattcaatatattttaaaatatacctgttacatcagttccttcaacctttgagagggttgcactaccagaataaaatctgcaaaaaaacaaaagccttaaatctaatagtcattaatgaagtacccagctcacctccacctatgtgtactttgagcccaaattctccaattatcacggattaaactggataactcatgtcaatgaacgctgagaagacagtctgtacacatgttcaatatcattaaggaatggatacaagatatggacaagactgtcaaaacttttttttttttttttttagagacagggtcttgctccattgcctagcctttagtgaagtrgtgcaattatagctcactgaacccttgaactcctgggctcaagtgaccctcctgcttcagcctcctgagtaactaggactacaggcatatgccaccatgcccggctagacaaaagttttggaagcaagcaatctcattacataaatggcagagagggaggaaagtttttaatagcacttgaacaatctggtttgaaatgaagaactttcaacttcaggaacccaaaacactatgatgtttaaaagaacaattcagtgagctcttgcttctatacagatactgccctgatcagaaaggactacctcacttaaagcaattacaacatagggaagatgacccatggcttctcattccacttctttcaacaatcaagaatgtaccaaatacataaggcctgatttagacttggaattgctgatattttctattttcagaggttcaatatgaaatcctttttaaaccaaaatatagaatcattggcccatgactgagtttttaagtgttctgtttaagtgttctgatcacactaaaaacacagtcaacacaccacagataatgtgacggttagtattatcttgtgtttccccttactaaatggcatcagtaacattcagaaaattgtcaagatgtgattgcacagaaagatacttcctccagtagtatctggtttcaggtatcatttaaaacaagaatacccctctacgttaaggacatttcagaaagagatcaactctttcaagtttctgagatcaactctttcaagtcacactatttgtttctcatgaccttaaaacagagatcacagttattttgagaacggatgctgaggaagagattctgcttcaggcaaagaaaatgagtagaaaaatgctaacgatggctaccaggaaacggaggactggcattgaatggcagcacaaaggtttctgcagtatcagatggagtggtttctctttcttgaggggaactaagggagagtacatataaaaacatattgtaaattacatatcccacttatacctcacaaacttttcggatggttattaccaactctagtctgcagatgaggaaatctgtctattatcatccaattaagtgaatggcaaacactaaacctaaaattaggcttttagcaagttttcactacaaattactgcctctcatattcccacaatgccactgtttgtactgagtgaaaaaaaaattacacagataggtcatacatgttccaagctataactatcacagatcaaaagggcatagtcagatcttttagacttttctgcttttacgaaaacctgataacttctttagccaaagtccccacggtggcgaccagagactgccttttatttgggaagatcttgtacgttctcctcgctcctcctgattgggttaaaatgagtaatggcggataatttttaatttggggtagtgttgctaatagccacactcactggaacgcaagcttcatgagagcagggtcctagctttgcggatggtgttaactacagaatattgcaagcaaccaataagtatttctctaatgaataaatgcgttgcgaatcctatttcaaagggccacctccgcgtacctggtcttaagggcacgcgaccgttaagggcgcgcatgagcaaaccatttcatcgtgcctacttccacagccagctgggaaacataggactaaggtgactccgcggtcttcttcgcggataccctaagcgtctcttacctgcagctgcgtgcctgttcacacaaacccgcccgccgacccgtcagcggctggccaagcctgctgcggaggcccagccagcgaacagcagatacaacmrccatctttgatttctctgcagagcatgttgggaaagcgtgcctcgaccttcaggaaggtggggcgcagtgggcggggagcagggaacagctccgctattggctgaagcggaagaagacgaaagcaatcataaaatgggaggttgcaagctcatggtttgaaagacttcgtcacggaagctaraagctctatacacccgatttgcctcggaggaattttcctaaatgattattttgatgtcttatatatctttgattgttttcaaaacaaaagagcgagcagagagtcgtacaactatttgttccccccccatgtagaagtgatctcatccacgtaaatgtcgttcctgcgaccgcttccgcgcgcaagcgcacgttgaatcgcgtggtgactccgggcttgaggttgaattaagaatagtcaggtggtgagtggaacgtctcttggggtgtcggaattcaaaacggacctggaggatgttgatctccaagaacatgccctggcggcggctgcagggcatttccttcgggatgtattcggctgaagagctcaagtaaggagttggtygggtagcgtgcccagcctggatcttgaggtcggcgccctaaactacgattcccagaagcgcttttgcccagtctatcctcttgagtccaggcttgtctggcgcttgtcctgctgggagccgtagttctgggaacgttcctgggccggcgtgrmctgcctggataagaggccggtggtgctgggggaaagagtttgcgctgaggtaggggaatataagggtggggagggtcctggtctgcagcgttatcatctgccagtctcctcgttaactaacaagcatttgtggaattaaccatagtgtacctgacatggttaattaggcacgtagtaagtttcctcttgtttgtaaaatgattgtccttcaagtgtcagttcaggcgttaacttctctttgctaggaccctgctatattctcggtctggttgttaaatcaagggaactctctttagtcttcattttgatcaaggtagcatttgacattctccaatgcactctcttgaaactttcctttcttccagaaccttatttgtcttcaagttctcctatttttatgacaaatacttctacytccctctcttcctctatcgatctataacctcacaaacatttattgagcatccagttttttccaggcaccaagctaggcgttaatgacacattggtgagcaaggtctgtacctcattttactccttaaatgttgatgttcttcaagattctattctagtaatgttttcttcatggtaaatattgtccctagacaatctcaccactttcatgatttatagtctcaaatttaaatccccaacgcaaatttatttccctgattttcagacccatttgttcagctgtctgtacatctttaattgaatttcacacagagatcttaaatgcatatcaaaaactcaacatggcctaaatgcatatcagaaactcaacatggccgggcacggtggctcacgcctgtaatcccagcactttgggaggccgaggccggcggatcacgaggtcgggagatcgagaccatccctggccaacatggtgaaaccccgtctctactaaaaatacaaaaattagctgggcgtggtggcgggcacctgtagtcccagttactcgggaggctgaggcaggagaatcgcttgaacccaggaggcggaggttgcagtgagccgagattgtgccactgcactccagcctggcgacagagcaatactctgtctcaaaaaaaaaaaaaaaaactcaacacggcatccctcttcaaagggaggggttacttacccctccaaaatggtgtacgtagtgcaaaatagtcactagaaactggaaaattattctagatctctcctgacatataacttatttattgggctcttactttgtgtcacctacatgtctatttgttcttagtctcctttttctcccaattgctactgtgttgcctctggcccttatctcatatttaaattgtcttttccttccaccctccccttacacctctcaagtgcatgctccacactgctgtcaaaattattcttgcaaagtgcaaatgtagtcatgctactgtcacccttaaaaccctccaaatgttctccatttccctcagataaagtatattttcttagcatagcctgcaaagtctcccatgatcagaccaatgctgattttagctataacatcatcccttcttcagccctattaaaccacctgcatattccagaaaccgccatcatatttcaacatctgggcctttctttaagctattccctctgcatgcagtgtcctttcagccaaaaggaggtacttccctctgtcccctacccaacatacacacctgaaagctcagttcacctcccttgttttgtgaggtcattttgcacatgatacagttgtctgtcatggtgctttagtgactttttgtgcttatgtatatttgtcttcctccactatccttgagcttcttatatgtgtcactcttgtcttttatcctcaagtctgaataaatggatgaataaactcctgagccacagctctggtatcattggtaacagtgtgctagcccagaaattccaattatatcatcaccgccataagtggatacgatttcatccaaaagcagaagtgttttaagttgcctgaatttttaaaaagataattgtggagttttcaaacaagtttagagttgagacatttcaataatactgccaccttttattgtgccaggttctaatagcttcccatctcactcagagtaaaaaccaagtctttacaaatggcctggaggggtcatttcagtctcctgttacctctctgatctcacctctattctggctaccctgacctccttgctgcatccagagcaccacgggcacacatccacctcaggacctttgcactccctgcttcttcctcctgtaaaaccctctgcccaggtgactgtatggcctgctccctcaactccttcagcctttgcccaagttcctccttagtgggcttctaggaccacttgcctactctgctcttccctttccctgcattatttttcgtcatagccctttctgccgtctaacagactatacattttgtgtctgttcccgttcctccaatagaatgtaaggcctgtaagcatagcagttcttgtctgtttccttagcacttaacactgtctggcacacagtgagcactctgggtatttgttgagtgtatgaatagatggatagaggagctagctgctcagtgcttggcactttcagtccttaacgacacccattctcagttcttaacaacaccatttgtggtggcacctccagtaaaaaattcaggcycagagaacaaaatgtctctctaggaagtggcaaaggtcatcttcaaacctaagtctattgatctcaaactctactgactggtggaatccttgctagttgcccctactcttcatcccactcctgtaatggtgggagggactttctcctctacaaagagagaggaactttgtttgacactgtattttctgtatgttatcttctaatcatcccaatagagctgctgtgatgcccagacttcaggtgagaaaaaaattaggtagttatcaaaggatacagtcagcagagtgaaagggcaacccatggaatgggggaaaatatttgtaaattatatatctgatgagagattgatatctagaacataaaaagaactcctacaactcaacaacaacacaaaattcaattttaaaatggacaaaggacttaaatagacatttttccaaagaagacatacagatggccagtgagtatgtgaaaagatgttgaacatcaccaattttagggaaatgcaaataaaaagctcctcaaatccagtagggtgctactatcagaaaaacagaaagtagtaagtgttggcaagggtgtggagaaagtggaagctttttgtacaccattagtgtgaatgtaaaatggtgcaaccactatggaaaacagtagggtggattctcaaaaaactaaagacaaaattaccatgtgatccagcaattctacttctggatgtgtatccaaggaattgaaagtagggtctcaaagagatatttgtatacctatgttcatagcagcattattcacaatagtgaaaaagtggaaactacccaagtgtctatcaatggatgggttgatacataaaatgtggtatatacatgcaatgggatattgttcagccctaaaaaaggaaaaaagttcaacacatcctataacatggatgaaccttgagggcacggtgctaagtgaaataagccagtcacaaaaggacaagtacggtgtgattccacttaatataaggtacctagagtagtcagattaatcaaaacagaaagtaaaatgatggtagcagaggagatgaagaattactgtataatgggtacagggtttcaattttacaagatgaaaaagggttctgcagatggagagtggtgatggtagcacaatgcaaatgtacttaataccactgaactgtactaattgaaacagttatgatgaatttatatatattttattacagtttcaaaaattaagattaaagaacaaaaggtaagtaatttgttcaatgttacccagttcagggttgcaggtggactctagatttgtgggaagagaccacacgcacaacttttgagttagatcaagtttctcatgaaattagcttactggcagcaaggtgaccatatagacaagagccacagcagcagatctgcctccctgtcgccttggcccttagagtgacactggccatgcaacatagaatcttctagagctgagcagcttagttcctgatagactaacattgttttacactcagaacatgtcaccactcatgaaaacttgacactatttttgtgctttattaaagggagtgtttacatcattaggggactctcgtttcagccttcggatttcctctaggctgtcagattgggatggtttctttgtctttattttctaaatcagaaaggagaaaattgtaaaagcaaagttagcctactaaacatagttgtgtcctatgggagcacctttcaaaccaaacataaaatgtgatgaaaccttttttaaggtttgactaaatgtgtttaatgttgtcaanttnactatttctgcatacagggattgttgcatcacattcccttcattgaactgggtgggctttggagttaagtctattccatatcctgcctcccccacattctgtttgtatttgtgtcacctggattcaatcacctaacttccctgagccttggtttcgtcctctgaaaagtacatgtagtgatgagtatttcagaggattaagatcaggactaaataatgcggccaggcatggtggcttactcctgtaatcccagcactttgggaggctgaggcaggcggatctctagagctcaggagttcaagaccagcctgggtaacatggctaaatcctgtctctacaaaaaaatattaatcgaaaaattggttgggcatattgacacacatctgtggtcccagctactcgggaggctgaggtgggaggatcactggagcccaggagtttgaggctgcagtgagtcgaggttgcaccactacactctagcctgggcaacaggagtgagaccttgttaaaaaaaaaaaaaaaaagacagaataatgctgcctgtgaagcagtcagtgtatagtagatgcttaactcctttttatgaacagtttaccagtgtacttagtgcaagttttgttctaaatctgtttttaagaagttaccactcattcatttagcacatatgtattttatgacttattcatttagcacatatgtatttattaactattgggtaccaactctgcacttagtgttggggtacactagtgagaaagacagattgtgccctccagagctatcaagcaggcattaaataatcacttaactataggtttgtgctggaaaggaaacatcasagaggttggtaactttagctttcctcttggtcttttttatccccttaggaaattaagtgttaaatccattacgaaccctcgatacctggacagcctggggaacccatcggcaaacggcctgtacgatttagctttgggccctgcagattccaaagaggtgtgctccacctgcgtgcaggacttcagcaactgttctgggcacctgggccacattgagctcccactcacagtgtataaccctctcctcttcgatgtaagtgctgccttagttgtgtgggtctccgggctgctggtgggatttgtgagtgctscctctctcccacaagagtggtctaaggaggttaagccccaggcactccaatgaaagcattctgtagaatgagattttgaagttttgagccaaatacaataacttcaacttaccctgtggccctaaataaatgaatatcagtttgattccagttgaatagagccacagcctgattccgtttgcgtggagggtcggggagagttcagattcattccctacaccttttgttgcaggggctttgtgctcttcagaaatctcagtggcacctgcctggtaatagagagaacttcagtgttctcagggtctccctgagcccttcaggtgtctctataggcacttgtgtggtggcaggagaagcaaagccccagaaagcccaacagtgaggtcagaatgaagctcctgtttagagtcatgctggtacattttcagctttttatttcagctaacctcacctccaggatttttttttttaagctacacatatgttggtatacatggacatgatttttgtctgttaatcgtgttaaagagaagtgtcttttttttttttttttaagacagtgtctcattccgtctcccaggctggagtgcagtggcacgatcttggctcactgtaacctctgcctcctggattcaagtgattcttgtgcctcagcctcccctagtagctgggattacaggcacgcaccaccatgcccagctaatttttgtatttttacaaaaattacgggagacaggttcatcatgttggccaggctggtctcaaactcctggcctcaagtaactggcctcaagtgatctgcccaccttggcctcccaaaatgctgggattaygggcatgagccaccgcacctggctgagaagtctcttaattaaatcttggaataaaataaagatatttttctacctcaggttgtacgcccaaagtaaatttcaaatctaaatggattaaaataaaaccttaaaagaaaatagagggtaatatttatctggttcttaagataacaaaggcctttctaagcatgtaggctgaagtagagtttttaaaggaatagactgactacataaagaaacttgtgagtataccgaaaatcaccatggctactgtgtctctttctaatatcctgtttgtttttattccctctcttcagaagctgtacctgctgcttcggggctcytgtttaaactgccacatgctgacttgtccccgggccgtgattcacctcttactctgccagctgagggttctggaagtcggggccctacaagcagtctacgagcttgagagaattctgaacagggtaggtgggtagtggtggtcacagaaatcagaaaaggcaaagtggtgtggggaacaagagatgcttgtatgttgtcctagttaccatgccgatagtcatcagaacgttwgatctttatatcttataactggataccaatagctgagtgtgaaaacaggaagctataagaataataaaagaaatgttcatagaaacaatagtgaaataccatttaatccatttatgagcttttgctgattttctggaccaaggattcaatcaaggtttattcaatcaaaagacattgcttttgattgttacatctctttgatctgtcttaaagtagaacattgtaatgtagaaaattctttttcatgataccaacttttttggagactcaaagccagttgtcttataggatttcttacattttagattgtccgattatttcttgtaattagattcacattttggcaagaatacaacctacatgatacagggtactttgtattgcatcattttaggaggcatatgtcaggttgttcacctattggtaatgcttactttgtttacttcttgtatttggtttttttggtctttttttgtattaacacataatatttacacatattttatggggtacatagtgatggtgtgatacagacagtgtatagtgatcagatcaggataattagcatatcagttctctcaaacatttatcatttctttgtgttgcgaacatgcaatattctccttctagctgtttgaaactatattattgttagctatggtcatcctataatggtgtagaacactagaatttattcctcctgtctaattgtaattttatctcctttaacaaatctcttcctgttcccctcctttccctaccctactcagcctctagtattctctattctacttttacttctatgagatcaactttatttttggcttccacatatgagtaagaacttgcagtgtttaactttctsttcctggcttatttcacgtaatgtcctccagttccatctatgttgttgcaaatgacaggatttcatgctttattatggccaaatagtattccattatgtatatataccacatttgctttatccctttatctattgttggacatctaggttggttccatatcttggctattgtgaatagtgctgcaataaccatgggggtgcaggtatctctttgatataccaatttcttttcctttggataaatgcctaatagtgggatgctggatcatatggaagttgtatttgtagttatttgaggaaccttcatatgtttcccgtagtggctatactagtttacattcccaccaacagtgtataagagttcccttttctccacatcctcaccagcatttgctttttttttttttttttttttttttttttttgtcttttggggatagccatcctaatgggttgagatgaaaccttattgtggttttgatttgkgtttttgtgttttctcaatgactagtgatgttgaacattttttcatatatttgttggccatttgtatgtgttttgagaaatgtttgttcagatcatttgcccattttttaatcgaattgtttgggatttttgctgttgagatgtttgagttccttacatattctggatattaagcctctgtccctaagatgaatagtttgcaaatattttctcctattccgtaggttgtcttttcactctgttgactgactactttgttgtgcagaagcttagtttgatataatctcatttgtttattttggcttttgttgcctgtgctttgaggtctgattcataaaatatttttccagaccttatatttaggtcattgatcaattttgagttgacttttgtagaggggagcagtggagatctagtttcattcttctgcatatggatatctagttttcccagcatcatttattaaaggcactgtccttttccccagtgtatgttcttggcaccttttgcaaaaatcagttggctgtagatatgcagattaatttttgggttccctgttttcattggcctttgtttctgttttcatgccagtatcctactgttttggttactacagctttgtagtatattttgaattctggtagtgtgatgcctccagctttgttctttttactcaagattgctttggccattcagggtcttttatggttctatacaaatgttacaatttttttttttctgtttctgcaaagaatgtcattggtattttgatagggattgtactgaatctgtaaattgctttgggtagtgtagtaattttaacaatattaattattctgatctataagtatgggatgtttttccatttgtatcctctccagtttctttcgtcactgttttgcagttttccaagagtctttcacatccttggttaaatttattcctaggtatttttttggtagctattataaacgggattgccttcttgatttctttttcagctaattcattgtttgtgtataaaagtgctactgattttttttatcctgcaactttactgagtttgtttatgagttctaagaggtttttggtagagtctaggtttttctatatatgagattatgtcggctgggtgcagtggctcacacctgtaatcccagcactttgggaggccgaggcaggtggatcacaaggtcaggagatcgagaccatcctagctaacacgaagaaaccccatctctactaaaaatacaaaaaaattagctgggggtggtggcaggcgcctgtagtcccagctactccggaggctgaggcaggagaatggcgtgaacccaggaggcagagcttgcagtgagccaagatcgcgccactgcactccagcctgggtaacagagcaagactccatctcaaaaaaaaaaaaagaaaagaatatgtaatctgtaaacagggacatttttacatccttcttttcagtttggatgccttttctttctcttgcctaatttctctggctggttacttttggataaagtggggatgaccagatctctattgtaaagagatactttttcatagttaatatttacattagaatttctggtgctattaaaaataccttatttaaaatttcattttgtttgttgatatgtaaaaatgttattgattatttttgaagcaacgtggcaaaattgtctcatcaattctgacagtttatctgtagatatttttagattttcaatacaatcctatctgcaaatactggcctttttgttcctttccaagccttgtatgttttcttttgatggctaggatctacattactgtgttgaagtggtagtgggtatctttgtcttatttcttgtcacatagaaaagttgttcccctttcctcttctcctccctcttcttggatgcttcagtcccgaagacattaggtgggcagagcaagctgggattccccaaagagacatggcctagtatgtggtgtctgagccacagcagagtgagcaaagcttcgtgggaagggtgtccctgcacagggactcagccagagcagagtgagaggggatccctgcacatgtgggcagccctgtgcggaataccagagctcgaatagggtaaggaggatgttcatttggagataaaggcacagcttagagtgtgagagcccaaatcaggtgagagggtgcctgtgcagggtgaccyagcatgggatgtatgagcccaaatatgataaggaggggtccacaaggagggtgggctcatgtggagcttgagcccaatttgggtgagggctccacaccgaggaggggatgacagtggcagtggtgggagagtggttacatacggggagagagagagatgttgatgaataagtacttaattgatcgaatacatacttaaggataatgggggccaggttttaactatcagagaagagagttacaaatatatgaaagagagaagacagaattaatcctgtattgttaaaatggaattaaaagttcgggtgtaaagtgtgtgtacacatgtattttcccctggccctgtccctgaaagggctcagaggagtgatagcacctagcacccccttcttgttttctaaataccattctccactaaaaaagcttcttggagaaatagctgatctagagctgggacagagaaagtacaagaccagcctggaatgtcacatgccagaaaggaagtatgtgctcaaagaacgatkggacatgtccaaagggcacaaaagcctgtgtgaagggcccacwctggccaaatctaggacagtttgagcatcataataaatgatgatactaagtgattataacccattgaataaagtaggaatccatgaacctacttttatgttgatataaatgaaagaatgaattgagtgactgaaagtttaacaggctactaacgcactttcaaagtaccctccctcccatacacacacatagtcttttttaattacaaaggtcagagagagagaataactttaccatggaaaagacttcttgcctggcagtcacccctttattcaagtgatcaaagtgaagcatacctgatgggaccagttgaaagaacacaacatcgcttctggatattcctgccaaagatgtgttagccgaatctgatcatgaggaaacatcagacatgcccgcaatcgagggatattctataaaacttgcctttaatcttcaaaactgctaatgactaaagttaaagactaaggaactattctaaacaaaggagactaaaaagtgtaacagatggctctaaactggatacttttgctgtaaaggacattagtattattttgagacagagtctggccctgttatccaagttagagtacagtggcactatctcggctctctgcaacctctgcctccggggttcaagcgatctcccacctcagcctcacgagtagctggaactacaggcatgcaccaccacacccggctaatttttgtatttttttagtcaagatggggttttgctgttttggccgggctggccttgaactcctgacctcaagcgatccacctggctcagcctcccagagtgctgggattacaggcatgagccatcactcccagcctgtaaaggatattattaaaggagttggcaaaatttgaatgttgtttgaggattagaaggtaataatttatcagtgctaagttaccattttttgatgatcgtatcacggtcatatttgtgagtgtccrtgtttatagaaaatgttcaccaaagtatttggggttgttggtatatcagatcagcagtgtactgtcaaatggttcaagaaagatagatttctggaaatacttggaatttttctataaatttgagattgtttcaaaatataaataaattatacccttaaaatagggaaccctttcgacatttcactattaagtatggtgtttactgagcttttaatcggattaaggaagctcctttgtattcctattttgctgtggtggctaaatattacattttatcaaataccttttcaatatatactgaaattttcagataatttggctccttttaaaccagctaacatggtgaatgactccattcctttcctaatgttaaattaacctgggattcctgggataaacccaaattgtttatgatatattacctttttaatatgttgttggatttgatttcttaatattttacttgggatttttgcctctgtaatcatgagtgagattggtttacatttcctttctcctattgtctttttgggttttggtatctagattatgtcagcctcataaaataagtaacataattctttctttttttttgagagagagtctcactctgttgcccaagctggagtgcagcagcacaatcttggctcgctgcagcctccacctcccgggttcaagtgattctggtgcctcagcttcccaagtagctgggattataggcatatgctaccacgcccagctaatttttgtatttttagtagagacagggtttcaccatgttggccaggctggtcttgaaatcctggcctcaagtgatccacccaccttggcctcccaaagtgctgggattacaggcatgagccactgtgcccagccgagttagataattctctctttaaaacgccctggaggagattggagacatagtatgccagcagggcagtgtcacacatttctcttcagcaggtgtcctcacagggactagttgtctttggctccccacatgacagacgactgctcaaacgcaaaggaacgagatcacatcagcggctatgggagcccccctggcctagaggccccatctcccagaaaggaatcaatatcgtttctaacagttccatgggctgtgcttccagggaccgtaggatatgcccagctaggacccagggaagctcagagctgtagtctttccagtccagatgtagcctaaccaattggggtcatttttaccatcagtagtgttgcctaataacacaactgacatttccacttttatttatttatttttatttatttattttttgagacagagtcttgctctgttacccaggctggagtgcagtggcacagtcttggctcactgcaacctctgcctcccaggctaaagcgattctcctgcctcggcctccttgagtagctgggactacaggcaaacgccaccatgcccagctaattttttgtatttttagtagagatggggtgtcaccatgttggccaggctggtcttggactcctgacctcaggtgatctgcctgccttggcctcacaaagtgctgggattacaggtgtgagccaccgtgcccggcctatttctacttttattgcatttatgagggaacagagctaaaaagttaactcatggtcaaatttgtccgaaagacagattgagagagagaaagaaaggattttcttaaaccagcgctcacagtaagttacatgtttctaggaatttccccatttcatttaaagtttcagatttattggcataaaattattcatggtgcctactattataccttaaacttttttttgtaaaatatatacagaaatgcattaattatatgtacagtccaatacaaagtaactatcacccttacagtccagttcaatgtcagcatattgtttatgtccccaaaaaccctccctcctttccctgtccccttgtgtatttatttttgacagtttgtctgtcattgacctttaaaaattctttgttggggctggacacagtggataatgcctgtaatcctagcactttgggaggctgaggtgggaggattgcttgggcccaggagttaaagagcagcctgggcaacataacaagatgctatctctagttttctaataattataaaaataaatgtaaaaataaaaattatttatgggaataatttgagggctaggatgacgctgccttctccagagaagattctcattgcttctgctgtgtgcatggcactgatgccaacttgggactgtcattatccaggttcaacgcttaaagctccctggatggcctgagtgattgtacaagggctggtagttcctgagagtatagtcctttgtgttccggcttactatgtttatgtgttggggggtgaagaatgatggcttcctgttagatttctaaccttatactaaaaaagctttaggtttttaaatttgttctttttaaaggcaggatctcactgtgtggcttaggcaagcagtggagtagtgcagtggcaattcacaggtacgatcatagcgcactgcagcctcaaacacctgggctcaagcgagcccctgcctcagcatctggagtagctgggactacagaggcaccactgtgcccagcttaggttaagactttcatttctgtttcctacatcatttgagagtttgtgaataaaaagttcaaaattgctgcattggaaaatgcactcaaggccagggctcctggggagcatcataggcatattccctggggcacatgagtataccaagtgatgtcctgcttcagcatagcaccaaagccctgcatcagygcatgtggctgcatgctctttcatcttgctagattcctagttcccctttagtttgctctggttatttattcctcactgtcctgtcggctcttcagaacattaaggttttaaaaatattttaacctatcttggctctttgcagtcttaggtttggtctggggaatctagcccaccattattggacgtaggatgttctcatttgattttttttttttttttttttgagatggtgtctggctctgtacccaggctggagtgcagtggtgcaatcttggctcactgcaacattcccctcccagcgatctcctcacatcatcctaccaagtagctgggaccacaagtggatgccaccacacctggctaagtttttgtacttttggtagagacaggatttcaccatgttgctcaggctggtctcaaactcctgagctctagtgatccgcctgcctctgcctcccaaagtgctgggattacaggtgtgagccaccacgcctgaccttgtttgatttttttcaacagcgatgctgtctcactcttttgaaagtgcaacacagtagccatagtttctttttctcccttcaaatgaatcttttccacccttggagaggttggtcccagttgtgctgctcatcagaggtgtrcattactgtgataatggagttttcctctttgttttccagtttctggaagaaaatsccgatccctctgcctctgaaattcgggaggaattagaacaatacacaactgaaattgtgcagaacaacctcctggggtcccagggcgcacatgtgagttaacactgtctttctcccatgctgttttgggcatcattttatcactttccctctgtgttgtcctttgcatatacttctggcttcccaaagtagacctgagtttgmatctgagctctgtctcttgtgagacctgcaacctcacaaattacacaactgtccctgagtgtccactatctaatctctaatgcctgcctgcaggaccaatgagaggattatgtgacatatgatttcggtatagcatccagcaagcctcttcttaaaaaatggcagcaggtctttttttccttctccaacacttctctctaacccactgctaccttattctccccttcatatactgcctaagtattaatttgttcaacgaatgaatgaatgggtagataattcacctgtgatactagtcttggaatctgcttcacttcatgccttggtttcacaccagagatgctgatttaattggtctggggtagggtccaagtggagttacaaaagctcccagatgattcccatctgctgccaggtgcagagccactcatgtggctggactgtggatgtgycttccttagaaccctgaggtccttctgaggcaggccagctgcatccagagggcttccttttacaagtgaaagtaactagcrcttattgagtactggctgtatttcaagcccccactgcattcatgattctttgtcttagtaagagcttactgaggtggttactattcttattcccatattataattgagaaactgaaggcttaaagargtcactcagtaattgtcagagctcaagtgtattagggttctatggaagattttgtttaagaaagtggtggtgggggtgtttccgctggttaaaaataaaaggtgaaaaccataaagtaaatatattggattctcttcaaaatggcactccaaggttctctgactttttttaaaaaaacaggtaaagaacgtgtgtgagagcaagagcaagctcattgctctcttctggaaggcacatatgaatgctaagcgctgtccccactgcaagtaagtatcagggcccttgcgccaggtgagacgtctctgggcagtcactcattgctattattaaatatcttactgggttttttctctcttcaatcacaactgtcctcctgcacaggaccgggcgatccgttgtccgaaaggaacacaacagcaagttgactatcacrtttccagccatggtgcacaggacagctggccagaaggactctgagcccctgggtgagcaggctgggtctggagaggagctccatgtgaggccagcagatgtgtcctaaaccctgggaatacctggttctcctcaccacgtgtttctctgctgcatttgggaggggccagcagaggcacagtgtgcaggcctctcaggcctgaggggaccctggcragcgcccagctcaggcctctcacatgggagagctgatgggaggggctgttttatgaggcagtgccccacaggcgcctcttgccttaggtggtcgtttttctgaaaggtttttcaggaagaaattaagaaatttacctgacaaatattttgaaacattttactgtaaaacaagtgtggatctattttggaataaaatgtaggcgaataatttttaagaaaaactgcaagaattcagcaaaacatgagcgcctcctgcaggctactcctggctgtccacccagatccccccaggtagaattctttcctcagctctgccctacccaagctctgcttgggaaaaattttgagataacttaatactcccactttttaatttttatagtcataggcttatttaaaaatgttttttggtttttattctgaagtggtcagaagattaaatagagtattccaagagaagcactgagagcggtacctgctgtgtaatatgtgctatgtaaatgttaactgttcatttcttattatgtcatcagtgttccagggtagaaaatgcataacctggctgggcacggtagctcacacctgtaatcccagtactttgggaggctgaggcaggcagatcacttgaggtctggagttcaagaccggcctggccaacgtggtgaaaccccatctctgctaaaaacacaaaaattagccaggcgtggtggcgggcacctgtaatctcagctactcaggaggctagggcaggagaatcgcttgaacccaggagkcgcactctgcagtgagctgagatcgtgccaccgcactccagtctgggtgacagagcaagactccgtctcagaaaaagaaagaaaaagcacaacctgcaattgtcacttggctctgccactttttctgagtggcagatagaaggctgttttgaggcgtttccatttctaactctatataatggcattcctaaagcctcttgcctagaattgaggaagttacatgcatggcagtccatagcagatactgttactaaacctttcaccagggtttgagaatatgggataagcatggaaataagatcccctcctggagatgcatgatgtatgttttacattgaacactctggcatggcctggactaaatgaaaaacctgtttaatatttttttaaaatgttatagtttaggataatttttagacttaatagaagagtagtaaacatagtacagagaattccttaatactgtttacttcatttgccctactgtataacatagtagattaccatggtgcatttgtcaaaactgagtttaacattggtgcaacactattatctaaactacagactttttaaattttgctggttttccagtaatttcctttttatgctccaggatccaacccaggataccacactgcatttagaaagcctttttaattttgtttcatggttggtagttaacactgtaagagtggattttcctacacttaaccattaaattgccctcaaaacaattttcttgtattaccagttgggaattgcttctgtagcccttaggatgccttataaaatgttcatagattgagaacaaagatggtcagaattctttctagaagatagttttcgtggggcaaatgtccggcaggtaagtagcctttcaatgccttcaccaaacccattcttctaaagtcatctttcattgcagccacgcaaatatgatggtgcaaccaaaagtctgtgcattagaaacaagtagaccatagtcttctacagctccaggcttgggtattcagtatttagcacacatttatttgttgggtgctcagcattatgccaaggaccatgtttgtgatgagcacaatgccaggacacagaccagaccatgtggtctctgctctctgaaggggctgcaagtgacacagatcagtaaccctggggagcaggtgatgtggaggaaagtgagcagcctcagcgtgggtctgaccatgttcctggtatcagagggaatcaaaaagtgagggctaggctgggagtggtggctcacgcctgtaatccgagcacttcgggaggccgagtcaggcggatcatctgaagtcaggaggcaggcagatcatctgaggtcaggagttcaagaccagcctgaccaacatggtgaaaccctgtctctactaaaaaaaaaaaaaattagccgggtgtggtggcgcacgcctgtaatcccagctactcaggaggctgagacaggagaatcgcttgaacccaggaggcggaggttgcagtgagccgagattgtgccattgcactccagcctgggcaacaagagcgaaaccccatctcaaagaaaaaaaaaaagtgagggctgtgcctgagtagtccccatggactggtgatcccacaaggagcgctgtcagcttgtgaaatgccacacgtgctgctccagtgcgctccctgtgctccatgtgcccccctgagccccacaaggcacattaacatttaaaatgagaattcatatagccaagacacttccagccattgtgatcccaggttatttgacctctgaatccctttttcctatggcacctcttacagctgaaagaaagacacattcaagatgctctgaaatcccagctaggcagaaggcattgttgcaagctgcagaagttcttgttaggaggggatgcagcgcatgtgaggagatgggcttccacagctctcttctgactttaagatcctgtgattgaagaacagcctctgccttcacggtgactaaactgcagtgggggcattgctgggacaggagctgaggagattcgaccgatcttcttcagcatttccaacctatttagtagaagagaaagttcagacactcattttcagaaatgcccacaaaatgcaggttaatggggtctgttttctcccactgaacatatgtagctttctaatgctgtggttatccctgaaggtcaaggccattcttcattgcatacccatgcttccttcagttgcgttaactcattgaaatattctgcttttatcgacatcaaaactttaaacatgcagactccttgacttagcagttctgctttgatgactttatcctaaggaattagaatactcacagtgttgtttgaatagtgtataactggacatgggccgggcacggtggcttacacttgtaatcccagcgctttgggaggctgaggcgggcggattgcaagatcagtagatccagaccatcctggctaacacggtgaaaccccatctctactaaaaatacaaaaaattagctgggcgtggtggtggatgcctgtagtcccagctactcgggaggctgaggcaggagaatggcgtgaacccaagaggcagagcttgcagtgagcgaagatcgtgccactgcactccagcctggtcgacagagcaagtctctgtctcagaaaaaaagaaaatactggacatgacttaaatacctattaacagagactacttaaattatggtgcatttgttaattgttctccaagttagggatttctctaaaaacttatgatgacatatcctctgcagattttaaagaaactagctggagaattggaggtggaatgaagctagtttttaaaaatggaggaggctgaggtaggagaatcgcatgaacctgggaggcggaggttgcagtgagctgagatcgtgccgctgcactccagcctgggtgacgagcaagactccgtcttgaaaaaaaaaaaaaaaaaaaggaaaaggcaagagtggtgtttttaagtgtagactatcttaggctattttatatttgagccgtatactcttaacttagaatttgctgtgagctagacaccctgtcaagtgttaggaacacagacaaggcatagtgcctgtcctgatatgtgaataaaaaaggaacattgagtaatgcttagtttcagtggatgtatccagaaaagctttttggggtttttgttttgttttgttttgtgtttttttttttgagacagggtctcactttgtcatccaggctggagtgcagcgatacgatctcggcyccctacagcctctgcctctcaggttcaagcgattctcctgtctcagcctccctagtagctgggattacagtcatgtccagtattttctttttttctgagacggagtctcgctctgttgcccaggctggagtgcagtggcacaatctccgctcactgcaagctccgcctcctgggttcacgccattctcctgcctcagcctcccgagtaggtgggactacaggcgtccaccaccatgcccggctaatttttgtatttttcatagggacacggtttccctgtgttggccaggctggtctcaaactcctcaggtgatctgcctgccttggcctcccaaagtgcccagaaagttttgaacctgaaagacacactacttacttgtcttaggtaatcatcttaaatgcctggtccctacctcctgaatggcagtcccaagcctcgttttctcatgtaacctgggtattgctggtagatggcatcccagagtgatcttgcttagtgtgagaaaccaagcccaatctattcctcacacaccagtatgatatttgtaaaaagaagtcagtatatatttacctataaaaatacttatttatccataattcaacttatatgaacttttctggtaaaaaacaggtagataaagatatttattataatgttacttataatagcaaaatatggaaatcaatccagatgtccaattatgagaatatggttaagtgaattaggaatcatccttaatggaatatcacatagccatgaaaaatggtgatcaggcaaaagctacatagcaacatgcagacatgctgatgagatgatactaaaagggcaaagtagtgtgcaaaataaatccacactgaagattacagttgtgtaaaatacgtgtatagacaaaaaggcctggaaaacaatatataaaagtgataggagttgttaatgtgatgggattatgggtaatgttttcttttactttgcttttttttttttttaggttttatacaatagccatatggtttttattactatagaaatgagattaagggccagagggaatccaggcctgataatatgctacccttgagattgatttttgtggtcaagttgcaggcttggggataaagaattgataaatcccattgcagaaagagtacctgtttctgatttattgcactttgattctcctccttggctccaggaattgaggaagctcagataggaaaacgaggatacttaacacccaccagtgcccgcgaacacctttctgccctgtggaagaatgaaggtgctgtatcaggctaaagaaatagccttgatcttctctaggcttttatttcctggactcrttaaccctgccttattacttcttttaagttgtartgattgtagcttcctcctggaactgatccagaggtttggggcagtcttcagggcacattgacattgagtcatagagcaggagaggtcatacccagcaccaaaaacttgacaattatcgcagctgagcctggttatgaaatgacaactgcaggtgggcctcacttaatacaggttggcatatttttagaaggttcagtgtaacttattttaaatgcccgtaagtaaaatgctttgtccttctgtgaatcaaagaatgaactctgtcttatttaaattgggactttactataagggaaatccttctttccttttgagtgtataacaaaacctacgcagtatattcaagcccttgtgagagtatgttgtggaacgctgactataacctctgtgtaataagcgcttacaaatgaacatgttgttaaagaggtatcagaaaaaaaaaaaaagcactggagttagtatgattgcttctgtggcaggccctagtacattttaatctttttctctaggcattttttaaagtaaccagaaacctgaaataaagctttgatccacagaagatcctttcttggcagtaactgttaggggtgggaggaggctaacttaaaaaaaaatttttttattcaacatattttttatgaagatcaaagtaatgatgtgtgtgctgtctgtgttttaatagtccaggarggtgattaaaaacaagtgaagtttcttccccatccttgcccatctcagtccctggtttaagagctattgtccctgtagtacccatttttatgctatcatatcccctgcatacaaactgtcaygtacacaggggctattttttgtttttataaagaaaaatgaggccaggcacgttggctcatgcctccaatcacagcaatatgggaggctgaggcaggtggatcaattgagcccaggagttcgagaccagcctgggcaaccaagcaaaacctcatctcttaaaaaaaaaaatacaaaaattagctggacatgatagcacgcacctgtagtcccaactacttggaaggctgaggtggcaggattgcctaagcctgggagatcaaggctgcagtgagtcatgatcgcaccactgcacagcagcctgggcgacaggagtgagaccttttctcaaaaaagaaaactgtgaccttaactctacatattatcttgtattctgttttttcctcactcagtaatatttttatggttgtcctcccatgcccttagtgatagatttaaatggtcttcttggtttatttctttccaacgcaggattctttctgaactaccttttttcgggaatggatgatgatggtatggaatccagattcaatcccagtgtgttctttctagatttcttggtggtgccgccctcaaggtaataccctttaattaacttatttcacctgaaaaaaagcgtactaaggaactgaaatgtgacctctaggagaggtgaaagggccaagggcactgagagacaaagctgcagttccgctccaggtgcaggtggtgggagggcttgctttccttcccgtttgttgtgaacgcaataggaatgttggttgtttttgtttgtttgttttgaagtggagtcttgcactgtctcccaggctggagtgcagtggcatgaccttgacttactrcaacctctgcctcctgggttcaagtgattctcctacctcagcctcctgagtagctgggattacaggcacgcaccaccacacccaaataatttttgtattttacatagagatggggtttcaccatgttggccaggctggtctcgaactcctgacctccagtgatccacctgccatggcttcccaaagtactgggattacaggcttaagccaccacacccagccggaatgttggttaggaaggttggttgttttgagcatggtggggtgtgctccctacagtaggcatgggtgagaggctgaagaacatgaccctttcctcacactaaacattcatttattccgtatgtccccctgcaggtatcgcccagtcagtcgcctaggagaccagatgtttactaatggccagacggtgaacttgcaggctgtcatgaaggatgtagttctgattcgaaaacttctggcattgatggcccaagaacagaagttgccagaggaagtggccacacccactacagatgaggtcagggctgctctgttgctgatgtgatgagcacacatgcttagtgctaactctgtgagctgtggatgtagacactgggtctgggagatgcttcctgggatgttctgtgcagctggcagcagccttagtgtgagctctgggcttagggggcacctaggaacattaggggracacacatgggtctgagcatggaaaggtgtgggttctggtctagcttctacaccgaacgaccatgccaggtgaccctagttgagtcacttccttatactagtgtctgctataaagtgcatgtgatttgtggtgagattkcacacctaggctgttccgggctaccagctctcgcagctctagaaagaatagcctacttccctcaggctttaagagtgtcccttttgggtcacagtactagagctcatgttgccagctctattttggacacgttaatgtctccagcattggggtcaggaaggcagtattgcagagtggaaattcctctcagaataggacagtttcaactaacatttcctgagccccatctgtgtgccgggttaattagtaggtgttcagtgggtacaaaggtgaattgggcacccaggaagcttgctgaggtcatcaagatccttcccagctctaaagtactctctggatgcaaataggcagccttgggtagacagtccgggttctcagactccagccgctgcgacagtcccgctgtctgccaggcccatcacaaggtggcgccactgtctcttggacacttatggtgcaggttacacttggggctttctgtggttttgcttgtttcctgatyggcccgcattggtgtgcttttaaaaactccttagtgtaaaagacatcagccatgtgcatgccttagtgcagtttccaagaaaagaccatgggataactgtacccagtgaccagggttgatgtcccttaaaaatcgggcagcctggccaggcatgatagctcaagcctgtaatcccagcactttgggaggctgaggcaggaggttcacttgagcccaggagttttagaccaggtgggcaacatggcgaaaccctgtctctaccaaaaatacaaaaaatagctgggcatggtggttcatgcctatggtgccagctactcagggggctgaggtgggaggatcactggagccagggaagtcgaggctgcagagagctgtgatcgcaccactgccctccagcctgggtaacagagttagaccccatctcaataattaaaaaaaaaagaaaaattggtcgtcccctttgtcaaacaaatgcttcgcctctgaggggcaaatagcatcctctgattcctatgtcccactgccctctttccttgtgattgacaggatgtgttttttctccccccttactctctgtgttccatcctcatggcagcccttgccagtcaccgtctaggcattggggatactccagtgagacaagttctcactcatttcacaatcactggtcttgagccaggtaatgccatgagcagtgagttgggctaacagggcccggtcatcatgcaggtgatcgtatctccctctgggactccagccagaaggggaccctgagtgttttatgtagaatacatctattttccctagagctaaagaagattcctgtgttcctcaggtttgatgacaagcccacttcatcactactgggttttcataacattctcgtttactgaatcttcacccaccctcaccctcccacctcaagacactgacaggtttcttctcttatctgcccacactggaagacgtgggaccatctgtctccttgtgtcatacccagtcgattgggccagtagrtggccagacagtatcaataggtggtgctctaagccagctgaaggcttctgtgtatttctgtcccctgggtagggagtgggagagaggaggagacagggctaggggcaaaaatattaaaaaaggattggttaaatattccaatgagacttggcaatcagccactaacttgatatagctcagctggagacccacatcttagttgatgacatagaatatcgtatggcaaacctagttccttttaagaaattgttccacctgcatgtttgtaattggtttggatcaagtttttcaaagccrtaaataaaactgaaactgcatgtgagaattggttatctggcaagataacagaacttcataagaaatgtactgatgtgggaaggacttcttagttttctttaggaattgcatattaagggatttcagcaaaaatgccttaagaaagaagcatgcttataaattttgagttcatcttactactagaaagagacaggctggtaaatatataatagtgctgatatgtcttattgacatgtacttacaagattgatttattagcatgtttgtctctgatctgtcaggttcagaggagataaactccagagtgcatagttgtcagatccagggtaagaaagaaaaattaaatcaagccaggccttttggagcttttttccatcatccctgttttcttggtttcatcttccaggaaraagactctttgattgctattgaccgatcctttttgagtacacttccaggccagtccctcatagacaaactttacaacatttggattcgccttcagarccacgtcaatattgtgtttgatagcgagatggacaaactaatgatggacaagtacccaggcattaggcaggtgagcaaaaaactggattcccattgctagctacagaagataaataataaacattgtgtattgaaacaagaaactaataagcctactggaattcttgttgaatgttttttatgrccttttttctccataaagatcctggagaagaaagaaggcctgttccgaaaacacatgatgggaaagcgagtggactacgctgcgcgctcagtcatctgcccagacatgtacatcaacaccaacgaaattggaattcccatggtgtgtgtgtgtgtgtgtgtgtgtgtgtgtgtgtgtgcgcgcgcgtgcagggctcatttgctccccgtgggtggcagatgagaatgccgcagaggactggggacaggatgtgcagcagattattctggcttgggcggaactagcttctgcctcttcctggacagcccacaaggaggtgactggaagctgcatgatggcattgctgtcactccttgctaggcttacagacacctcctaccaacaagtcagcaccagggagctgactgcagggtgttccacatccccgccggcatagcttcctcctgcccacttcagcctagtcttttgaccttcctcaccaaattgaatacatgacaggggagaggaagagggcatggggcatatcagttatcagtcctgtgtactttccaggcatcagaaatgtgtaccccaggttactgggaagaggaaagggagtgagtcccggagagaggcgtgtgcatgttgcccaggtcctgtttcgcttctcagggtcagcagcttgctgttcacctgttagtgctctccccccgaccccctccgggagctagcttcgtcttctcacatccttagcacttcatgctgtggtgctcagcagcagcagcctttaatcggcttcctccttaatgggccggcctctatgtcagtaatgtgaaggtggtttaatttccctccgtggagagcctcatttccttgcacgccaccccctccacccctctctggggactggtgatgagcagcgctgaagtgttctttctgatcatcctgtgtccccatggcctcatctctttgtggcacacttgggtttcctggacaaaggcgtgatgtgtcaggrgacagcagtctgagaaggcccagtcctgtacccactgcctcttgggaaccatagtccttgcattcaaaggctggatcatgtggtgaggaccagctttgcaaagtccagtggtgacattcccaaatctgaggtcccgaggagacatgtagcaacttttggttgccctctctggacagggcaggggccacccttgttggccttgacttcatagtgcctacagtgtccccagctctgtgagagaccttttgtgctgccttttctatcttctaggtgctgggttctctttcttagatctgggtttgtttggtagtggcttgtccctggaggagagaccccgaagtcacttctctgcccacctgcagactgcygcaagtctcagggccatggtggcctggggcgtaggtattcctcacaggatagctgggaagattagagtggatagaactgcctctggccccttggatcacacacttcccatagagcactgttgacaggtgccacaggagcaaggagctggagaccagcagtgaagcacagactaatgtgctcccatataaagcagtgtccaggggtggagacagacagtaaatagatagacaagtatatgtatgctctgttgaacggtgatgggtggtaagtgcatcagcaacagtagagcaggctcaggctgaggaacgcagaggctggggtagccccaggagccttctgagaaagtgttgctgcgcgggacctgtacaaagctagacaagttcctttatgtaggacatctcagagcctctggtgtatttgtgtacatttggaagcattagaggtttataatattcagtagctcaaaaactcatttaacagggaacttgttttacttggagcgtatcccaggcccagctttaaacacagcacactgcattttcttaggtatcagaggaatgcgtcagtttcatctcaagtaccaccttgattgtaatggctgccagaactgtggagttgagatattccgatgccatgtctgggctcagggacagcaccatgatgcattartgatgtctgccagggtagatgagggatgtcagggtatttgaggacaggcatttgccacctgtctcaaggaagtgccccatgccacctttgggaactttgaatttattggcagataagaaaatgaagttttagactgggtaaaaaaattggctgggcgcggtggctcacgcctgtaatcccagcactttgggaggccgaggcgggcagatcagctgaggttgggagtttgctaccagcctgaccagcatggagaaaccctgtctctactaaaaatacaaaattagccaggtgtggtagtgtgtgcctgtaatcccagttactcgggaggctgaggcaggagaattgcttgaacccaggaggcggagattgtggtgagccgagatcgcgccattgcactccagcctgggcaacaagagcgaaactccatctcaaagaaaaaaaaattatataaactgctgcgcttaaattattctcctcagactaactggtagaaaaggaggcctagtctctataccattaagggagtagcagaagacaggcaggatgttactttgctcactggaagaccttcttggccaagtcaaacagctcctccacatcttgggtgaaaagacagcctgttgagacagatttggggtccatcagacctttttttatccctgccctgaayttctacctccattcctcatttccaggtgtttgccacaaaactgacctacccacagccagttaccccatggaatgttcaggaacttaggcaagcggtcatcaacggccctaatgtgcacccaggagcctccatggtcatcaatgaggacggcagccgcacagccctgagcgctgtggacatgacccagcgagaggccgtggccaagcagcttctgaccccagccacgggggcacctaagccccaggggacaaaaattgtgagtaagggcagctttggtcagggacccatccggctcctgttcggatyctggtgattggtggccatcaggtgtggctccggtgcgcactgacacaggagcccatccctaggaggaagctccccracacgtgggtggctttttagattcaccttgtagtctccgggcagaagartggctgcccttaaacaggactactcaaagggcagtccccagaccagcatcagcagcagccctggagcttgtgagcaatrcacatccccccacctctactgaatttgaatctctgagaatagagttcagaatctttctttaccgtgctttccagggggttcttctgcatgctgatgtttgagagccactcttaggaagggagtgctctgtgccagtgataaccaacaaataacaggttataactaatgtttccattttgggcaattgctaatgctagcccatagtgctgtggtagggaatcctgaggctctatcaggttccactggaaggagcacatgatcgattaacaatgttgctgagtgcatgaaatcagcaggtgacagctctgtggctctgtcacataatagccattcctgctgggaggggagtagcagatgacccctaactaggcaacagtggcagcagttgttggagggaaatggattcgacttggatgtaacccacaagtgactaccggagtcaataggtgactgcctggattttcctcacccacctgcacagagggcctctccttgccctctgcccacccatacccatggctgacctgcccttctttaacactgagttcacctctgcaaagttgcatcagccttgaaggaactttggaggaaccragaggaaaaggaaatgctcctggccttgcggcggtgcccatcactgctcatcacaggccttcttgcttcctctcgttctcaccgccrtcctgaggggcagcagtaatacactgcctgtattactgtattctcctttggtgacagggcacatgcaaacatagatcaagtcacctcttttgttcttctctagtgcacgaagtaaggtttgtattcaggttcgtagaatcggtctgcctttcctaagtgcctggtgtttcgctaggcactgtgtgagcaatgcaaaaagaagcaaggtgtgtttcacttcacttacatttaactcaggtcaaacatgtgaaacagactcacaataggaaaggatgagaaagagactaggagaaggggtgagggatgaggcagtactgatgccccctgcatgctagcactttgcagtccctgcagacggatcctcgccaccctggagttgacagcatggtgggggaaccactaggaagtaagcatataaatgtattgctgttgcggaggggtgtggtagacaccatagggaacagcagtgacagacagtgactttaagcacataatgtccaagaagaaacaagtttgaggggaatgtgcagggcaagtgggcagggagagtttggggtcatcaggaggcaactgtgagccaggtgctggggccagcctcagggctaaagaggggactgaaggcagcgaattcttgctgctctctcaggccttagcaagccctcattcctctggggtcagatagtaaatatttctgtggtcctgggccatgcaggctctgctgtagctgctcagctctgccacctaataccaaagcagccacaggtagtacacaaacaaataggcatggctgtgttccaatcaaactttatttacagaagcaggtggccagcctgaggactgtagtctgctacccaccaaaacctgtcattttttttttttkattttwtttttttttgagacaaggtctcgctctgtctcccaggctaaagtgcagtggtataatcacagcttgcttcagcctccacctcctgggctcaggtgatccttctgactcagcctcccgagtagctgggaccacaggtgtggctagtttgtgtattttctgtagacatggggtttcaccatgttgccaaggatggtttccaactcctaggcccaagagatctgccctcctcagcctcccgaagttctgggattacaggcatgagccactgctcctggcctgtaatttttgaagactttggttaatgtgttgcatatgggtcagggcaaggctgaaggggctgtgtgaggttgatgggaaggaaacactgaggtctcgtccggggaggaaccacaggctaggtgaggaggggaaaggccaaaaggacccatttcctctrtgaagtatgaaagctctgccccatcccctgggccttgtaaataaaagaggaaatggcccggagagccaaggctcattgccctgctcagcagcctgccagaagcaggcctttggctccgagcctgcctctgaaaattctgaccctggggcactggggcacrctaattttcactgcagtatttatttagagacaagagaaaggaagggccttgggtttgggttggcaaggggaataccctgtgctccagggcttctgtttggattggccggtgcctaccagactggcctgtgtaccttcccagctgtggcgagtttgcttacgctggaggatgtctcaaatttgcaagactcaaatcctaggcccagcctggcttattgggcttgggccacaggtctaggcagtttctcccttgagaggctaaagcaagaagacctcagcttgtatgacgcagtcagacagcagccagtgccctgggcagatgctcatgggaaccctcagagtttaggtctccttggaaacatgggacttggcaatggggaggggaaggtttgaattccttcgggagcaaaaagacggactccatgctaggtacttttaagattgctttgtagcacttgagggttttgctccctgcttctctgagctagagagagaaaacttttaacctcactgaacaggaatcggggagagagttttggggagtatctcttaattacttctagcctctctctttaatgaactttctaatgcagtttcataaatgtgggcaacayaagaagaaactagacttccaataatttgttgttttctcctgcctgctatctgttgtgatttagaggagatttggggtggcagagatttcaccaagtcttcataattcctttgtactacttagaggagcccttcargatgcatggggtggcagttaccttcatacatttgtcttttaaggtgtcactttatgttcagtgtttaggaggcccagtagttaatataattaaagataagggtggtaagtgtcttaataggcggtacaggaaagtcagctttgtgagagagatgtctgtcagaaggacatgaccagccagatatttataaggggggaaaagtatgagcagtggttatcttagaggggtacaattacttgtgatttttaaattcttatctttaaattgtattttctgttttccctctagcaatgagcatagcacttgttcaatatttctttctttaaaaataagtgaagaccttttttaaaatttacagaagcatcacatactcattataggaagaacratgctaagatrtaggaaagtagctgagtgtggtgactcatgcctgtaattccagcactttgggaggccaaggcgggaagatcgtttgaggctagaaggttgaagctgcagtgagccatgattgtaccactatactccagcctggcaacagagagagaccctgtctcagaaaaatagtacagcctagtgaggatccaaccacccctttcccatagacacacayacacacacacrcacaygcacacggagagagagagaagctgggttggtttttaaattgttttttttttttcatcatgtcacatgccacctgggttttttttttctttgctgtaatacattattgctatcactttaggccttgtatacatttaccttatccttgttcatcactgcataatattccatagtgtggatacactattgccccttctatggggcagtcaggttatttctagtttttgccgctgtaaatgctgctacacaaacatayatactcatctaaccttgtgtgggtgcttttttttttcttgaagagccaacagaaaatgtgttttaagtgttttaattgctattttcaaactcygttcccaaaagactatgacaatttacagctcttaatttttgaagtgcaataaagtgttctctgagggcattgaactaactaagaacccttttctggctctgctatatgaagctgggcaaactttttgtgaaatgtagaatttctgtttagaataatgtactcacatrtgatcacygbgggggggattcgaaagtctgccaatgcctttcaaacccagtggttttatggttatgtcttcattttgttatggttatatcttcaggagttgtatccatttctttctttggattagttttcagagtaatccagaaacctgggacggctatgcatctctgaagaagacaaagacctgtggtcttatttgttccttatacttctgagcctagagccaggatcagggttgtaaagggccaggaccagaagggcctaggacgtatttctcagagatttccagggttttgctccagatgaaaaattccccttgcatttagttaactagaacgtgagacaaaagccacaccttggtcaagctgaggtgarcacttggaaagagccgtggtgatactgacgtttgcactgatcacccacctgtccactctgttcccaggtgtgccggcatgtgaagaatggggacattctgctactgaaccgacagcccacactgcacagaccctccatccaggcccaccgtgcccgcatcctgcctgaagagaaagtgctgcgrctccactatgccaactgcaaggcctataatgccgactttgatggagacgagatgaatgcccatttcccccagagtgagctgggccgggccgaggcctacgtcctggcctgcactgatcagcagtaccttgttcccaaggtaggtctggccttgaggctgttccgtggtcatcgtcagcatgacttagcacttttaagttgggccctgccagcccctggggtcattgggcagctccaggacaggggcgcctggaatggagggtcctggtttctcccaggtggggcttttagcccatctagtggcttagaggctgggaaatgtttctgttttgctgcgttgtaaaatgtaaatcaggacagaaattgtgatagccatcccagaaagccaaccttaataactgtgtgataggtcttgtgttcagcacttaaatttggattctgcaacttagtagcccccggctagcattagcatcccaacactgtaatggttctcatggtccactgatgactttgatcctttgttctgacaaacatgagttttaagaagcagcctaaccccaagggcccagaagagatcccgcagcagcccgtgaaggcatcttctgtcccctttgaatcctttccttctttctccaagttcactcctcaagggcaaccccttgtggtcacagctgtccagagggacasgagggaaggatagaacttcctcccccrtctccttagcagctgactcttggccaggagtggcaggggcctgagttagcatgtgctcatgggagggacagagcggggaaagaggcaggctgcaggaaagaagacagagtgtgttccagtgcctccttcaccctcaccacccacccaaaggtttgagtcctcctaaattataagccatttgcgccacaatgattcatagttatacatcattcatttggattgtggtggagtatgaagaataatcgtaacgtcaaaccaaggctcccatttcccaagtactttttcagtgccatacactgtgcagagagcactttagaggctcctcatttcaccctccccacagtccttggaggtaggtgctattcatgtccacattttacacttgaagsattcgtgtaacttgtccaaggacactcagctgagaagcagcaggaaggacaaggagttcctggatcttcctagggtttgtgctaccacagrgatggagacctctgtgcacagggagtgccargggctgctcagagatgcctagtgtcaatcagcatcctctgctccttggagcttctctattcccatcagccgtctgccacgaaggaatcaggcaggtggccaggagcccggcatcccggacccttttcccaccagatgcaccactgtggcttcacaagggtcccggttgtttgagttggcctttcccttctctgcccacctttgttggctgtggattagcaaagggactaaatgtaggaagaagtggtgaagggcctacccagattacttggaaattaaaaaaaatacatttgctaatttgaaaagtggctttttatgttttcatttaaataataatgtggctctgtggtggtggcagtaaaagctgccatttattaagtgggtcacaggccttaggcactgctgtaagcagtttgcagacattcccttccttatgaggttggtgtgattttcagacaaggaaacaccaagtgagtaatatgtcagccagcaatgaggccaagacttgaacccagcagctttggacgacacccgcccccccccccccgcccatgtgcttggctgtgcgtgttcttagccccactcgacagccaaggctgggactaagggaaggcaggtgacaggaagtggctgccagaactgtgtgggtctctgactctatagcagccgagtcatatttcaccagaggggacactaccggggagcagcagatggttttttgctggcagagtgacctgaggcattagctatgtggggagttkaggtgctctgaagtcctcagaccartgaccttgaatgtgctgtgcttgattttgattgaatacggtgcaaagccataggagacttcatgcttacattgtgtcctgcagtgggctgacatataaatccaagtggacctcatcacatgctaatatgcctatgagttttaggttgggcgtacacttaagggaggcaggagaacacaggtaaataaacttaatgtcaataaattaatttattgaaaaaagcttatgggagatggcttgaagattcactgtactttcattcactttcttttgtcggaggtaaagagcttttgattcttgataaattttatttagtccttggtgtaaatgccaagaagtggaatccttatatttgctaatggttataaaaatgcaacatgtctttattggcagagtcctaaaaggacaagagctgatttggttaaactaggaaaaccagtattttgaggtaatttttcttagcatatctttatttcccttagtttccatatttctttatttataattcaatttcttctctattaccaggttatcttccttaagtaaccataatactgaattaaagtacattttgtcgttggttttatgtacttagtagagttttgtggcrtctttttacttaaaataggagttgaatggaactcatttcttttccatgaaaacagttaaacttttcatttatgtgttactttttggactaattttttttccttctgtttatttattgagggcccatactttgtggaaagtttttaagcaaggcttcagatatgtttcctgacttctacttagtcagctagaaaattcaagttacagggataccctattcacaaagcatcctaaccagagacattaattgtwatgtcattttgctattaaggagaatagtaaagctgacarttgtctggggttttgattcagaggtgttctttctgatcctaagcaggagttaggaaatttagaattataagtagacctttagtaattgctttaatcagcattctgccatagaatttgtgatgattgcattgaaaatgatttagccatcaaagtaattgtctagtcatggaaaaatctggacagagagaggaaaaggcactgaatagatcacagaacctgtaattatgttctttaaggaaaaaaacaaaaggaaaaatcagtatctgccccccaaagactgtgagatgagtcaaatgcataatactggtttgggtttttcccccaagcaaaataagaccatctaggcaacaagaggtagagtataatttttttatgtacattattaagtgaaagccttcataagaggggctgtgtgctccatctgatcttgccttaggtctgtgccacctttccagcccatctgtaatcgttatctttgagtttacatagagcccatcactgtagtgtttagaccatttgacaaggatccttttttagcctttkagttagtacatatggttaaatttctggtgcttctcccagactgcatttgtgagttcccttagccttagttataaaacatgaccatactgttggctagtatttaacaaataatcaaatgattaataatctttatatccaaggcacaggtttttctcaaattcctataaacattgaaaagtttacaaaatctacatcttaaagaacrtcagtgagcatagctatttttacttcagcgtgcgttatgttgccgtgaacacagacccgacagataaggttcaggagactggggatcagaatggctgtgaaagtgtcaaatgaaattaatgcactyaccaaatctcaggcttttcataaaagcctttctttttggcatctggtagataacagcctttattaagggcccaccatgaacsctgtgctgtgttgtgaagagataactaataatggctattctcccttctgcagtcatgcacatcaggcccactcacagctctcttgaggaacctgtgccggaaccccttcctcccaacactggccagctcacccctcaggcctcaactgtgaaactgcccttcggagaggctatttctgaccatccccctcacctcaagtctatattatgacccaccctgttattttcctctttggcatttaaaacactttgtgatattgtatttatccaatcatttgtttactgtctagttcttcttcatcataaaggaccatgtctgtttggtcccctggagtagggaaaagcctacccagtgcctaggcattcaggaggctcctgataaatatttgttgagtgcatgactgatttacagaagagccaggccagaaacgtgtgaaaaatactaaagcataaaaccaaagtataaaaacaagaacacagctgacagcagccagaccaaatttaggcataaatgccaaaaatatgctggagtaactagaaccagatgggattaaacagagaaggccgggggaacgggatgagtttgaagcagtcttgatataggatagtgggcaaatggcaaacgtagaagccagtgctaaaccctggtcatgtgctttgggaagcagttggctcccaagcaagaacatagtgaggatgtgggcaagacaagacagggatataagaagggctcttgatagaaagtggcttccaggcaggcrattagggattagagtttgacttaagatttrttttcattcttcttgtgttgtctgttttggcttataggatggccaaccattggcgggactgatccaggatcacatggtttcaggggcaagcatgactactcggggttgctttttcacccgggagcactatatggagctggtgtaccgaggactcacggacaaagtggggcgcgtgaagctcctttctccttccatcctgaagccctttccgctgtggacaggaaaacaggtaattgggagagaacagccagtgtatgtaacaaaaggaaataggccactcatgtraaaggttttattctcagaagagtccagaccagagacagagaaatggctaagccagcaatagtctgactttctttcycctttgtttggggttcctgagtctgggtggcttcaagggagtgtctagcaagagtagactgcatagtagcctggtgcagtggctcacacctgtaatcccaacactttaggagactgaggcgggcagatcacctgaggtctggagtttgagaccagcctggctaacatggtgaaaccctatctctactaaaagtacaaaattagctgggcgtgggattagtgcctgtaatctcagctaccgggaggctgaggcaagagaatcgcctcagcctgaggcaagagaatcgcttgaacccaggaggtggaggttgtagtgagtcaggatcagccactgcactcctgcctgggcaacagagtgagactccrtctccacaaaaaaaaaaaaagtagactgcatagtttctgtcctttgcttctaacttaaatttggtgtcctcataatacaaatatggtggtaataggcagtggtgctggtggagtaatagtaatatttgttgggaagttccatatgtttgctgagtgctttagacacattatctgatttaatactcacgactaatctgcaatgcagacaccattattatctccatttaggagatgataaattacatgcccaagactacaggagacagatcaaacccaggacttttcaaccccagaagcatcataccatacttcctctcaaagtaaccaaattacatgatatgtggcgaccaaataatgaaaaacagtaaaatatgttcttctgctgttgcctgagtatccaagttcagccttaaggatcaacttctaattggctatgtgatcttagccctgtgtgtctcagttcctcatcatttcctgggacagtagaaattaacttgctaagctaagttctgattctaaacatggtttttctctttgaaaccagactaacccacaaacaaattcttgcatagtgtagtcactcttgcccttttcacctgttkgcaaaaaaaaagcccgtaccaacctttagagacacactaaaaaatctcacccgtgacagaagcaaaacctggacctatttcctaattttatttggtacagaggattttaaaaggattcaagatgtggcctctgggcataatggaatttggaaatcagcaaccaagatatttggaaaagccctcaatatttgtacttctaaataacgtacttcttaaatagctcatgggtcaaaagaatctaaagggaaattagaaagcattctgaagtagatgaaatgaaaacacaacaaaatttgtgggatgccactgaagcagaacttaagggggaaatttatacataaaatgcctaggttgaaaagaagaaaaagggtcccaaatcaatgacttcagcttcaagttcatgatctctaaggtctcttcctgctctccagttcttagtctgtggacctggaacttgattttcctttttaagccaaccttgcattcctggataaaccttccttggtcgtgaggtattatcctttttatatattattgaattcaatttgctaatattttgtctagaatttttttacttctgtgtttgtgatagatattggtctgtagttttattttcttataatatgtttgtttggttttggtatcagggtaatcctggcctcacagaatgaggtgttaggaggtatttcctctggttttctgtaagagtttgtgtagtacagtattcatattatttattccttaaatgtgttgtagaattcaccagtgaaggcatctgggcctagagtttctttgtggcaaggttttctttcttttttttttttttttttttttttttttgagatggagttttgctcttgctgcccaggctggaatgcaatggtgtgatcctggctcaccgcaacctccacctcccagattcaagcaattctcctgcctcagcctcccaagtagctgggattacaagcatgcgccaccatgcccggctaattttgtatttttagtagagatggggtttctccatgttggtcaggctgggctcgaactcccaacctcaggtgatccaccaaccttggcctcccaaagtgctgggactacaggcctgagccaccrcgcccaacctgtgggaagattttcaattaaaatttctatttctttagtagacatagagctatttttggttatctacttcttgaatgagctttaattgtttgtgtttttcagggaatttgtccatttcatctaagttactgaatttataggcacaaagttgttcataatgctcctttgttgaccttttctatctgtattgcctgtagtggtgtcacttctctcattcctgacattgataatttgtgtcttctcttttttcctgatcagtttgcctagaggtttatcagttttattctcaaaaaaaagtctttggttttattgactttatttttctgttttctgtttcgttgatttgaactttatcactccctttcttctgtttactttggtttaatttgctcttttttttttcctagttctttaagttctttaagtcaatttgagaccccttttcttctttcaatgtaggcattttatgtataaatttcccccttaagttctgcttaagtagcatcccacaaattaatatgttgtgttttcatttcatctacttcagaatactttctaatttcccttttgattttttttttcaatccatgagttatttagaagtatgttgttcagttatttagaagtacaaatattgagggcttttccaaatatctcgattgttgatttccggtttaatttcattgtgcctagagactgcaccttggatccttttcaaatcctttgtaccaaataaaattgggaaataggcccaggttttgcttctgtcatgggtgaagtttttcattgtatctctaaaggttggtacaggcttttttattttgcaaataggtgaaaagggcaagagtgactacactacacaagaatttgttcatggttcagcctggtgctacagagaaaaaccatgtttagaatcagaagataaggaacttagcttaggaagtttatttctactgccctgggaaatgaagtcttagagtgtttctccaggtcatttcatacagcctcttgattgattttctatttacaaaccgaaggtctctcattatttgttcaaagagcatgcaaagaaagagatttgcctgtcattgcaaatctcgagtttataactcagtgcacattcacaaagtgaatacatctttgcaaactctcacccagatcagaaagtagcatatcaccagcacccccagaagacmcctccacggcccctcccagtttctacccccgtcaaaggtaattactaacttgacttccaacactataaacaagttttgtctttccttgaagtttatttaaatgaaatctatctttgtgtgttacccatgttattgtatatagtagcagtttattttttattgctttataatgttctattatgtgaatatgccatcatgtatttatccatttttctattgatacacatttgagttgtcttcacttaccttcatttgactgttacaaatggggctactgtgaacacttgtcgtgtgtatcttttgttgaacacatatatacatttcagtgggtaactattgaggcatggaattactaggtcataagatatgtgtttaactttaatagatagtttcctaaagttttccaaaatgcttgtaataatacacacttctaccaggatggagtgcagttgtgccatctyggctcactgcaacctctgcctcccaggttcaagtcattctcttgcctcagcctctcgagtagctgggattacagatgtgctccaccacacctagcaaatttttgtatttttagtagagacagcgtttttccatgttagacaggctggtctcaaactcctgaccttaggtgatctacccacctcagcctcccaaagtgctgggattacaagcatgagccacctcgcccagctgttgttgttgttttctttttctggtttatttgtttaattttagctgttcaggtgagtatgtagtggtatcttactgttttaattatcatgtccttaatgacaagagaggttgagcacctcttcatatgcttattggccatttggatatcatcttttgtgatgtgccttttcaaatcttttgcctatttctatgtcattttcttattgacagatgagaggtttttaaactataatttggtataagtccattagcagatatatacattgcaaataccttctacttggtggctagccttttcacctaatactgttttctaatgatcagaagtttctaatttatagccaatcttggctttttgtgactagtcctgtaggagctctttgcctgccctgaggtcttgtaggtattcccctctgttatcgtctagtagctatattgttttacctttcacacttgggtctgctatctgcctagggatgatttttgtggatgtgcatgaagtgaggtaggggtcaagagtcatattttcccatatggatttcctagccagtgaatgcaacatcatttgttgaaaagtccactgctctactgctagtactcctgtgtcacaaaccaagtagtaatatatgagtgggtatgtttctggaccctgtttgtttccattgcaccaacagcacactgtcttaattactgtgggtttatactaaatcttgacttctgatagtaaaagtctacagctttgttcttcaagactgccttgataggctttaattacatctcaatatacctttaaaaaaaaaagactgtcaactattttggggtgtttgtatttccatataaattttaaagtcagcttgtaaactttcacactgtgcacacaaatacctgctagaatttttcattgggattgcattgcctctgtaggtcactttagggagaatcaacgtatttacactattgagtcatctaaattatgaacatagtatgtccttcaattatgtaaaagccttatacatcttttcattagattcactcctggatactgctatggtagatgatactgtctattaaattttctaattgtttatgattggtgtctagaaatacaattaattttgtatattgtccttatattcgacaagctttatgaattcagttattagatctctgtccttcaagttcttttaaactataaaagtaaacaagtttattgataaagataaaaggaaaaactccctccctccccaaccccactctccatatacacacatactctcatagaaaataaataagaatgaggccaggcatggtggattatgcctattatcccagcactttgggaggccaaggtgggtggatcacatgaggctagaagtttgacaccagcctggccaatatggcaaaaccccgtctctactaaaaatataaaaattagccaggggtggtagtgtacatttgtaatcccagctactcagaaggctgaggcacgaaaatcacttgaacgtgggaggcagaggttgcattgagctgagattgcaccactgcactccagcctgggcgacagaacgagactctgtttcaaaaaaaataaaagaaataataaaatcatatcataccttccctgggactgttcaggagaaccatgaaccacaattaaatctgacattcaaccacctgataaatctgatatttacaaccacctgtttgaccatgacatcctggtacctgaagcatgcattttcctgatggccaggcacatggacctcagatttggctggtctttaagatggcttactctgaacgagccaccaagtcctccaaagggaactccattatatcagacagtctgctttttcattgggaccacactaacacactctaaatatggcaagaagttcatttaaatgttttcataggctatgctgacaaatgtttttgtaattgtcttgtgactgatttcattcactggatgtactgggggctcattctgtgtctgtacatgtagatctgcctcgttctttttaacccctcctgtgttgtattcagtgatatgggtataccacagatgacttaactgtccctctattagtggatgttccgattattacctggtttttactattctaaacagtgctgtggtgaacacccatttctgtatatgttagtgtactttcattgacttatcttttattattattattattattattgtagagctggtgtttcactgtgttgcactggctggtctcgaacccctggcctcaagtgatcctccarcttcagcctcccaaagtgctgagattacaggcatgatccaccatgcctggccaagtatatctgttagataaattcttaaagtacaattgctgggtcaaaggatatagacatttcaatacatttttttaaatccattttatttttaagactttttttaaggttaatacaggcttagtataaataataattcccatagatattgctgcccttcttggtttaagaaaacattgcagattttttctccctagcatagtttatgaccagaaagtaaattatacatttctagaatgttagtgcaagaggagacttcagttcctcttgtctgggtcctttatgtttttttttttttcattaagatataattcatattcaacataaaatttaccattttatgaggtaggaggattgcttgaggctaggaattcaagaccagcctggcaacacagtgagacccccatctctatttaaaaaaaaaaaaaaaaaaaaaaggctgggtgaggtggctcacacctgtaatcccagcactttgggaggccaaggcggccggatcacgacatcaggagtttgagaccagcctgaccaacctggtgaaaccctgtctctactaaaaatacaaaaattatccaggcatggtggcacatgcctgtaatcccagctactcaggaggttgaggcaaaagaatcacttgaacccaggaggtggagcttgcagtgagccaagatcgtgccattgcactccagcctgggcgacagagcgagactccatctcaataaatgaatagagtagagtagagtagagagagtagagtagagtagctgggcatggtggcacacacctatagccctagctacttgggaggctgartatgaggctgcagtgagctatgattgtgccacagcactctagcctaggtgacagagcaagaccctgtctctcttttttttttaaaggaccatttcaaagtgtataagtaggtttttagtgtattcactatgttgtgcaaccatcaccacactgtaatgccagaacatttccatcactccaaaaagatgacatgtacctaataggtacagcagtcagtcccaattcctccttccttctcatcccctgacaactactttttacctgtatgaattagcctgttttggacatttcatataagttgtatcaaacaatatgtagccttttatgacttatttcttttacttaatgttttccagttccatccattttttagtatgtaatagtactttattcctctttatggatgaataacattccattgtttcctctgtatccatttgtcagttgataaatggataatttggattgtttccattttttggatactacaaataaacctgcaatgaacatttgtgtaccagtttttgtatgaacgtgtgttttcagttttcctgggtatatacctagaagtagaattgctgcatcatatagtaattctatattcaacttttctgaggaacttgcaaactatttttcaaatcaggtgtgttatttacatttccactaacaatgtatgaaggtctcagttactccacattttcaccaacacttattttttgttcttttttttcctttatagattcttctaattctagttctatttctactactgctgccattacttcctccactgaagtcttgacccyctgaaagtcatacttaagggttggaatcaacttgttccaaactcctgttaataytgatgttcctcccatgaatcacaaattttttaatgacatctagaatggtgaatcatttccagaaggttttccatttactttgcccatatgcatcagaagaatcactatctatggcagctacagccttaatgaaatgtatttcttaaataataaggcttgaaagtcaaaataactcctttatccgtgggctgcagaatggatattgtgttagcagacatgaaaacagcattaatttccttgcatatcttcagagctcttgggtgaccagatgcattgtcaatgaacagtagtaatattttgaaggaacctttttttcagagcagtaggtctcaacaggtacttgaaatagtcagcaaaacatgctgtaaacagatgtgcagtcacccacgctttgttccacttataggcacaggcagagtcgatttagcataattcttaagggccctaggatttttcacaatggtaaatgttcactggtttcaacttaaagtcaccagctgcattagcccctaacaggagagccagactgtcctttgaagctgtgaagccagacttctcgctagctgtgaaagtcctatatgtggcatcttcttccaatagaaggctcttttatctacattgcaaatctattgtttagtgcggcaaccttcatcagtgatcttagctagatcttctcgcttagcactaccttctttttttttttttctttttgagatggagtatcgctctgtcacccaggctggagtgtagtggcgcaatctcggctcactgcaacctccaattccctggttaaagcaattctcctgcctcagcctcccgagtagctgggataacaggcacccgccaccatgcccagctaatttttgtatttttagtagagacgggatttcaccatgttggccaggttggtctcaaactcccgaccttaagtgatccgcctgccttggcctctcaaagtgctgggattacaggtgtgagccaccacacctggccggaactttttcttaatttcattttcagattgttcattgctaatatagagaaagagaattaatttttatatgttgaccttgtatccttcagctttgaataagtcatttacaagctctaataatttgttttgttggcacttaagggttttctctctataatatcatgtcatctgcaaatgtggttgtacttctttctctctaatctggatgtcttttatttattttcttgcctaactgccctggctagaacctctagtacattgttgaatagaaatggcaagcgtagacatccttgtcttggtcctgactttaggcagaaggcatccagtcttcyatcattgagcatgttagtagtaggtttttcataggtgcctccctttattaggttggtgacagtctgttcctagtctgttgagtatttttatcctgaaagggtgttggagtttatcaaatgctcttctgccccattgattttacagatgaagtggcaggtcatatttccctgcccttggatgggtgtgtttctgttacctttcacaccaagttccagtcttgactatgcctagcctgggggtccccactgtgcatgtggcaccttggttgaggtgcagcttgaagtaggcaccccaggacgtgtcactctcctgcctttgctccctcaccccactcaccgcacagtgctggccttctatggagttgaggcatggagagtgtgggtcataacctttctggtcatcttctgctgagaaaacagaatattttctgctctctttaataatgctgttgtccattgtcccctgctcctggtgcacgtgggtgaaaaggcagctgctcttataactgccctgtcccattgcccactctcttttttttcttgagacagagttccactctctcacccaggctggagtgcagtgatgtgatcttggctaactgcaatctctgccttctggattcaagcggttatcgtgcctcagcctcctgagtagctggaagtataggtgcacgccaccatgcccggctaaattttgtatttttagtagagatggggtttcaccatgttggccaggatggtctcgatctcttgacctcatgatccacccgtctcagcctcccaaagtgatgggattacaggcgtgagccaccgcgccctcgttgcacacatctaaagacactactttgtggggcctgctgcaggcacactaagcgctgttgatggcagttagtctcccagccctggagcctgtcacacctgccggtctgcccctgccctgcttcatctctgggaatgtgtgcacctgcattcggcccttctgtagccaactcyggttatctccagataaagctrtctccctttgagctctctgcagagcagccgcttgagaaagygcttctcttggcttcctgttagcagtgcttgttgggtggatgacccctctgagggatccarctggggccagggaaagattccttggcttttcagtagctataattaattccagtcatagtaaagaaatatctgagtatgtggcataaaatgaaaacaatttactttttcctctccttcctttggtctatttaggaatttaattcaagtctaggggattattcactttaagaactattttagggagtaaaaatcccagtgaagttcttttttgttttcattcctcattggtttaaataaaacctgaaatcaccttgtcctatggaggtggacctgtctgtttttcttgccatacctgagatcatcagaaatggcattgcaagggcaggaggtcctaaaagggaagttcttaactcttctttttgccatcagtttgtcctcattttgccatcacttttctttttgccatcagtttgtcctctttttctttgcaggttgtgtcaacgctgctcataaatataatcccagaggaccacatcccactgaacttatctggaaaggcgaaaatcactgggaaagcctgggtgaaggaaactcctcgatccgttcctggctttaaccctgactcgatgtgcgagtcccaggtatggctgtccagctgtgtggagtggagacttctagtgcyggggttagacagattggtttaaaatggagacagaaatggaggcacattcacagaagcaggtaytgtgcctcagaagagaaggcgttgtgcctgagttgttgtcagcttttgtttcggaagggttcagggttgatctccagcatttgaccctcagtataaaactcacaagcagtttaggaaagcttctcctgcaaaaaggctgaaattgattatgcaaagcttggcaatgcagagtcctgttttcctgcaagactgctgagtggcttcagataatcaaactggtataaggctccacamccmtaactctgagccttaggaaccaggccacaaaaggacaggcccagggcagagagagctgtccacactgaagatttccaaggcctctgcatgttcccagtggagaagtctttccaggcccccagtgcacaacgcgttrtcacagagtcttaatggacagtccattcaccccgaaactgccaggtttcttttcctttatagaccatatgcttcatgggtgctacattacgcagctagaaatgcttttctgttcattagcttctaatgctttaacccagctttgagaaagtacacattcaggccttagaggatgttaggaagattttgttgttactcccagggttcaagggaggaagtacctaggccagaggcacagttacgaggttgaagctcgccacttcaggaagaccttgtaactagaagctcccatgtccggtcacaggtctttgtcaaggatacttgacctcaagtcagcgtgggtgggtgtggggagtaggggatataaaacacatggagagagagtgtgagtgtgtgtgtatgtctctgtggtatagtccctgaagggaagaaaaaaaactgctggtctgtatatgcttgcctctgttatattaaaaaataataataatatatatagagagaaaatactagtttcacatatgccctacttttttccatgaaggattctaggcgggtcacagtagagggacttgcacaacgagggtcacacatggagtagagggtgggtgactcccacaggaggcatcacccgcagcccggcattggtggccttgccctctrcaggtgatcatcagggaaggggagctgctctgcggagtgctggacaaggcgcactatgggagctccgcytacggcctggtccactgctgctatgagatctatggaggcgagaccagcggcaaggttctaacctgcctggcccgcctcttcaccgcctacctgcagctctacagaggcttcaccttgggtaagtgccgggctcgctgccctggggcagtgacccgtcagcgcagccgcctggccatctcccaggcccaggacagagagagccgtccacactgaagatttcsaaggcttctgtgtgttcccagtggagaagtctttccaggtccccagtgcaccacgctttattacagggtcttaacagatagtccattcacccccaaaactgccaggtttcttttcctttgtagaccatatgcttcatgtgtgctacattacacagctagaaattcttttctgtgtcctctcgggaaggagctgggaagtaaccaggctcctcctacaaaggcgccctcacttggccacccctctcctccacagccagtgcttattcccgttcacagtgcagaatggcaccctcgtgcccatttccattctgtttctttcctaacccctccctttacaggtttctgtcctcggactgatttctcatactcttacaaccccattccctgctacacaagtgccctttcagaattctcagggcccatcccactccacagaggggtttcccttttgtcagaactgcccactgccggctgggtgcagtggatcacacctgtaatcccagcactttgggaggccaaggtgggtggatcacttgagcccaggagttcgagaccagcctggccaacatggagaaaccccgtctctactaaaaatacaaaaattagccaggtgtcgtggcaagcacctgtaatcccagctactcaggaggctgaggcgggagaattgcttgaacccaggaggcagaggttgcagtgagccgagattgtgccattgcactccagcctgggtgatggagccaaagaactgcccacgccttcccactgcggtggggccatcagcgctcttggaaacactatgctgggcaaacctgtcggggtgatcctaagacaygaagaggaactaccttgtttgcaccccagaaatgagtgcacgctgttttaggaaaatrgctttgataaagaggcttcaccttgggtgagtgctgggctcactgccctggggctcccctgaagcagtcacctggccccttttagtgtgggcttgagatcagatctgtccaaaggctcagcccctggccaggcttatggaggacactgcacctccatgtacacagagcagggtccagcccttccacgctgttcgcgttagggggacgcgagatgctgcgtgtcaggcatgcaccgcagtgtgcataggcgttgtctggttcatggtggaagtaaggctcctttgcttcacagacccactcgtgtgcagacagagtgggagtctcagcgtagggcctgtggacctgcagctgctgcagctggagtttgttcattggcccacactggggcctgcattatacattttattctattttaattgtatcatatatttaatcatggaaaggttaaaaaaaaaaaagcatacatgaagataatttaaaatcacccagcatgcatttgtcagagataaccactaatagtaatttgatgtttgtttttctagacttttctagtacaaatacatttggaaaaagtgggatcctacgctacatactctacttcccttacccacccacccaccaaatgtccaaatgtatttataaatgtcctttgggatcagctaatacaagtctacatcctcatgtctggtaattacagattattccattcttatggatatattgtagtttatttaaccagttcctataattaaacatttaggctgcgtccagattttcacattattgctgggatgagcatccttgaacaaacatcttggcttatatgtcccattattttaccaggataaggattataagttaagtctgtttggcagctgaaactcaccttcccccatcttaattccactaagagacctgagccacttctgggctcaaggtccaaggtcacccacttccagttgggaaccagactagagtaccttccaggataaccaaagaaagtgaagcatgatgactacacctcatgaaatgtatatttcagtttcaaatggtgacctagaataagcacaaggatttctgctaactagaaaaaatcagagcgcttttgaaacgaaaatagaggaagatcccacacccagctcatgatgaggaacaaacttaacaaaggtgccaggctttagctctgcttagtgcatggtacaaagagcagttggtcccttgagtgtgaagatgatccagaggctcagggctgcagaaggaagcagggccaagctgggagtggggctacaagggggaacaggcgagagattgacttcactccagcccgtctcagctagcggggtccataaagggcacagctagttggcctgtagctgaacccatgggaatgcccactttcacggtgtggcctgcttacagaggaactgtttctttccccttctgttcacacatgttcttagaagccctccaggaccttgcgttgggaattccaaatatttcagccccatcttttgaacagtacacctgctgttttctttcccactcagatcttggctgagggactcttgagtccagtagcacttacagttgcagaaaagaactagttttggccaggtgcagtggctcactcctgcaatcscagcactttgggaggcygaggcaggtggatcatgaggtcaagagatcgagaccatccwggccaacgtggtgaaaccctgtctgtactaaaaatacaaaaattagctgggtgtggtggcgtgcacctgtagtcccagctactggagaggctgaggcaggagaatcacttgaacctgggaggcagcggttgcagtgagccgagatcacaccactgcactccagcctgggcaacagagcaagactcagtctcaaaaaacaaaaacaaaaaaaaaaacactagtttgatcaagagttgatgtggaaagacctactgctgcccaggatgaggaattcctcaaccctttgagccagaagggcaggcttcactgaagtgacccaggctgtcatcctcctgaagcaatgctgagggacctgyggtggtggtccttgtcacccaggctcgggtgtgtctgtgtgtgtgcctacacaggtatactcagctatatagggtggcccctgtgacatgtgacttctgggaccccagactgagatgttctctctctctttttccctgagcttatcttttcatccaaaacctcttcttcaccttcagcctattcatccaacacatgtctatggagtggagatagtatagctggtggctaagaacatgaatttgggacccaggcctgggtttactttctacccatacgaccatgggaaagtagcccaattttgagcctgagttttgtcatttgtaaaatggggattataaggtttgggctctggtaagcacctaagagatggtggcaatctgttaataatgatgttaatatcatcttccttactcaggtatttcctgcatctgtggcactggactctgtgctctggccttactgagtttagtctggtgggagaaatcaggcctgaggtcscctacaagcttgtctgtttcacttcacaggcgtggaagacattttggtgaagccaaaggcagatgtcaagaggcaacgtrtcattgaagaatccacccactgcgggccccaggtaaggagggacttcgaggccgtggcctgccctagaggggtgaagtgtgtgctgagtcaaaacccacactctcgtcgtttggcctcagcctccgctgtgtttctgttctcattctaggctgtcagggctgcattaaacctgccagaagccgcatcatatgatgaggtccgaggaaaatggcaggatgcccatctgggcaaggaccagagggattttaacatgattgatctgaagttcaaggaggaagtgaaccattacagcaatgagattaacaaggttagcccagcattgcatgcayttatccccaccactatgaatgctgatttttaaaaaaattacattttgattctcacctgggccctacagagcaccttggctgttgaacagctgactaggtgagatgcgaggtgggatgggtagaactcgttgttttgaagggcccagggctttgttccctgccccagttagggtctatacaggcctcagaatagtgccaagagagaatgctttgtgctgtttttctttataaatgtttttattttggggtgactgcattaaaggggctgaatggggccaccaggggtraataagcagggtgagggacccggatcgccctggctgctcatgcagcggagccaggagtgaaggctcaggttccagtcctggctctgccttgaacttgctgtgtgaccttgggcaagtgagataaccagtccctgccttggtttcctcacctggaagtggggctgtgaggggcaccacctcacagggctgcagagaggcttcaggagctactagtacacaatgccaagccagttcctgggcagttgagaaaggagaggggaaatctctgcatgagctgaaaccacagcctgcttttctctgcctttctgccccagagccagggttctccatcctgctgcttggaggagctggcctggccctcaccctgcctcctgggccctggggcccagcctgaggagtggggaggaggaggcaatgccaacactcatcaaaagtcaaagttcgtctgtagtgctctcttgcctggcttttagcatcccttaggctgctgagaagaccgacttctcatggggacaggttccatccttgaggggttttgttgacaggagctttcctagcacctccctgagaaccaggaagctcagcttctagggctgactggggatgctaggagtagggaagttgtcttcagatgcatctcagaatggtttcttgtccctccagttgccctcttcccaccacctccgcccacccaggctctgcctctcctgtgttgggccaagtctgtggaattccaggcacaggctagaagccccagactcagagcccccttctcagcatctccccaggatccccctgaaggggcatrcttggttctgctggctcttgagccaagacagagcttcctacatggggcttgggtggcatgttcgtaaatgtgacatgatgcggatgttggtattcacgctgggagaggacccaggccaggctctgctgggcgaatcaagggcatcaccttaaattttattcttctccagcttctttttagaatcacgaactggatctgccagcccctctacttctccttttccttctccctttttgctgctctttggccaatgaatgaaacctcggggatcctggcagaggaagtccagcgagtgcagggcagggagcacctgtttgacctctcaggggttccagggaaggattaatgctgaatgaggctttctcttacctcgagtgggatttggtacttaggtctgaataaatattctggctgtattgcttctgcttcctggatttacatcctgattctgggatttttaaagaaggtgaagtcactgaccactgtgctgatttaatctgcaggcatgcatgccttttggcctacacagacagttcccagagaacagcctgcagatgatggtgcagtcgggagccaaaggttcaactgtgaacacgatgcaggtatgtgcagaggcgggttggcagctttacaggtgtcagcaaaggcaggtgggggatagcaggaggtggtttcagtttgttccctataaaacatgacaagtaaaaagaggaaagcgtgtagaaatcactacaggagctaaccactgttaacatgccaatgttaaaggcagatgtagttatgaatatgcagatgggatatgtataacgtagatatatattacaaatttacaaactgtactattacatatattcacgttatatagataaattatgtatactcacacaatttttacgtaattttgcatgattgtttctttctttctttcgttttttttcgagatgragtcttgctctgtcaccgggctggagtgcagtggcgcaatcttggctcactgcaacctctgcctcccaggttccagagattctcctgcctctcgggattacaggcatgcgccaccatgcctggctaatttttgtatttttagtagagacggggtttcaccatgttggccaggatgctttcaatctcttgacctcgtgatctgcccacctcgacctcccaaagtgctgggattacaggcatgagccaccgcacctggccgatcttttcataatattaaattataaacataaacattgtcctagagatttcttaaccttaaaccttggtgaccttgagagggtctaaaggcccaccccattgtctgttgagtgtgacaacagaaaggccgaaagccgttaggaaatcccctgactacatcgaaacctagatatactgctctcctccaacacgccaagagtattaacaggcagctttctaagcaaatagctcaatagcttgagttcccattttgttgttgttgttgttgtgttttgttttgttttgtttttaattgaaaataagacagagtctccctgtattgcccagggtggtctcaaacttctgggctcaagggatcctcctgcctcagccccgcaaagtgctaagattgtagatgtgagccaccacacccggccctgagttcccttttggctctagaatgtgaggatcgcaataaatggctgtttcctgcaggcctctctttccccatcaggaccctccagtcctttacaggtataacatgagatggttctgagacatggctctttttatagagagcacccattttcaactgaccccaaatgtgaaaatccagatcagtcaaccaaaggaaggtattttttttttcttaaaatgaaggcttcctggtttgtttagaaatgtaggttagccttcaagaactcggtttccatgcagcttttcttcaaggtcagattatactttccctgctgggacaaagcactgttaaacacacatgtggatcttcagtttcctgtggatttcctgtcctccagatctcgtgcctgctgggccagattgaactggaaggtcggagacccccgctgatggcgtctggcaagtcactgccctgctttgagccttatgagttcacccccagggctggtggctttgtcactggcaggttcctyaccggcatcaaacctcctgtatgtattttggtttttccatttagctttttccctcatttctaggcttaattgtaggtgaactatgactgccctacagggtagggcagaagacacygggggctattgtagctgtcgaggtcaaaaagtcctaggagatcagggaagggagtggcctgtctggtcaggaaaggctgctggaggtgttggcctgagcccttcaggaagcgcactgtcctcactgtcacctttgggacctgggtcccattctctgcaggagttcttcttccactgcatggcaggacgagagggcctggtggacactgctgtgaaaaccagccgctcaggctatctccaaaggtaaaatgtatctgccgtgccccttgaggtagagtgccagggcccttcctsccatcatctttcacattatatcagcagctcatttaagattccttggatgaaaaaacttttggaaagtttccatgaatggcctgagacagaaagcagcaaacactgttccccttcgcaggatcggtagagcatgagctcagaggcttataccaagggctytgtgttctgagggtctgccattccctgggggaagctatggctgtgggagaaggtcttgggcagtggcaagcttatcttgcttcctagaaggctcagctgccaagacagtagtgactaacattgagctctgtccccacagcttggggtggagggacagtgactgctgggaagcccactgttagggtggcaggaggggaaacctaggcagagtgtccggagaggtaagcaaaggggctaggaccagggcagagagcagaagaagttgagataaaactgaggagaaaggccgccagtggagggattcacatcagcatgtggttcccaataccccttagtgtccttggcaatccctgggctgaccaagtttgagaatccttgacagctcccctgcttcgcccgtcttttggttctaaggacactggtctctggggagctctgcattgtgggagagtgtaggggcagacagtcatctcagcagctggggctagatgggagcccaggtctaggggtggcagccaagctgctcagtaacatggctgcagcctcctcctcctagaaaaccatcaggaaatgcagcccctggctgggggacactggagcaagcccagaccccggggcattggatctagcctgttctgaagtcttgtttgcctgcagaacaggagcccycctttccctcccctccactgcccccaaccctcatcagaggctgccctggggaggtgatgggccggcggggactgagccgatggtgtccttacaggtgcatcatcaagcacctagaggggctggtcgtgcagtatgatctcacggtccgtgacagtgacggcagtgtggtgcagttcctgtatggggaggatggcctggacatccccaagacacagttcctgcagcccaagcagttccccttcctggccagcaactacgaggtagtgtgctagatcccggagcctgggggccgagcagtaggcctcccccaccgaggttagagaactggaaygcgctgagctttgcaacccagtccaagtggccattggaaagtagagtgggaagggtttataagacaccggtcagtgccctgaaacacttgacaatttcaaagcctgtgaactttcatyacttgaggtggctggagggcacgagcacctctggaataatacctactctttggggccatttgccgtgtgctgggccctcagctaaagcacactatcaatactatccrttttcctcctcactgcaacccagggaagtaggcattactctgccsattttgcagctgaggcaactgagtatcaaagcataagtaaacagtcggtgagtggcagagccagcatttgaacatgggcccgtcagacacaaactcatgattttcattgtataccttaatgcccttgtagtgaccatcactgttgactgggcagtcaccccatttgcagatagggaaactgaaaccgatgtgacctgtctaaggtcatcaagctgatggtagaattgagggttgtgctctggtgctgagtcctttccatcctggttcctatccctgagcttggccatcactcttcccctcttcctttcttcccagaaactcccttgtgctcctggaggggctctgagtgtgctgctttctttcctgtgtctccctctgctcccaagaccattggttcccaaatctggtttgcacaaagtgagggccctgattaacaatggatgctcagcctctctgagagtggtgctcggccccatcatgagggctccacaccagccacctgggtcccctgaatttgtgctccatggccctcttgtcacgccctcatctctttgatctcatgtgtgtgatttgtttgtttgtttttttgtttgtttgtttaggtgataatgaaatcacagcatctccatgaagttttatccagagcagatcccaaaaaagctctccaccacttcagagctatcaaaaaatggcaaagcaagcaccccaacaccctgctgagaagaggcgccttcttgagttattcccagaaaattcaggaagctgtgaaagccctgaaacttgagagtgaaaaccgcaatggccgcagccctgggactcaggaggtgatgcagggaggtggtgtccttaatgtccagcacgtccaggcttagtcagtggstgagggatgaggggctgttttcctaagagaaggtagaatcatgaactccagctttgttcaccgtcagtcagaacagaatggctctcaaatgggaatgtaaggtggggactcttaacaagggtgtaggcagggtttgggggractaactggggcctgtkwcttcggggttccccgcgatcccaggtgtgaaggaatggggagcagtcatgagaaacggagaggacgactatgtgctagggccactggacagagccctgggtagagacccactagaggggggttgaggataaataccaggatccccttcctcctgcctttccctctgctgctggtgcctcccatcagccaagcacacctgggagctggaagcaggggatctctttgaagcagtcactttgggacagccttgagggcacagagcgtgtgaaagagcctggatccagaaataaccatggatccagcacagtgactgcatcctagctggcctgagacagtcgtggctttgcctcttgtcctagcctaatcataacagtctcctgtttcactctaaaagaagcccagtttgctcagtaaattacatgcttgccctccctgggcttgaatgggccaggatgaagagctgctaggcttatagtcaagcagggtgccctaggacaggttgaagtctctccccattttaaatggggagatggtttctcattgcaatcaggtttctttctgtctccctttattctcattggaagccaatgcttttgatccctcttatgctactgggtatccctcccacatagctgagacccatccttctgttcagatgctgaggatgtggtatgagttggatgaggaaagccgaaggaaataccagaagaaggcggccrcttgtcctgaccccagtctgtctgtctggcgtcctgacatctactttgcatcagtgtcagaaacatttgaaacaaaggttgatgactacagtcaagagtgggcagctcaaacagagaagagttatgagaaatcagagctttctctcgacaggtattgacagtgatttgttgcacaacatgtgcaggagaatctgcctcctagcccctgcctcctagcccctgccctactcactccggaagagggctgcctcctgggtttgagacttcagctagagggagggcagtaagacagccaggggcaacgcacaagccccaagggcccaggagtgaacaagtgcaagggaggcaggagtggacacccccatctgggccaagatagggatagtggtctgctgggaggcttgcaggaaagtctgctctcttgggtttggtgtggtgggtggggctgactgagagtcagggaatctggtcactgttcacctgctgccaaccgtgtgacccagggcaggtcattcatgcccagggacaccaggtcttaacttctcatgaggccttggatccgattactccagtaatcctttgagctttgggttcccatttgaaggcctcagcttggactaggacagacacacacacacacacacacacagacactgtagctcagcgcgcgcgcgcacacacacacacacctttgagctttgggttcccatttgaaggcctcagcttggactaggacagacacacacacacacacacagacactgtagatcagcacacacacacacacacacacagacactgtagctcagcacacacacacacacacagacactgtagctcagcgcacacacacacacacacacacacacacacacacacagtgtagctcagcgctcctagtggctgttcttaacagggtcaggcttcataggaaaaatggttagtaaattacagaatcgtgcggcatgaatacttctgatgtggtctgcagccatttgcactaactaaaaatataaacactctcatcacccccatccccataatggcctagtgaacctctttctaatttttatagcaggaggtttaaactgtctccaaattgtcataattgagaagaaagaatggataaaggaaaaagtgaataatgaacccagaaattctcctgcttagggggcttgtggtaacagtcccagagtggatatgtgacattctgggggcaaacatgaggagtccaagcatgaatgtctagagcttcagccacccagctgggatctgtgctgtgtaatttgaggacatctcagggtcactggtgggaatttgaagattagagggatcttttgcctaggaaaaacgagtccagaaagaggtagaggtttcagttttctggtttcgggcagcattgacagtctgtggtgtctgctcctgacccctgccacaacccccaccctgaccccccaccaccgtctctaggttgaggaccttgctgcagctgaagtggcagcgctcactgtgtgagccgggcgaggctgtgggcctgctggctgcccagagcatcggagagccctcyacccagatgaccctcaacaccttccactttgcaggcagaggcgagatgaacgtcaccctgggcattccaaggtgtggggcacaagggagcacagggtggggtctgtcctagcctctcctggagaaggggccatttaatgagagggggtgagtgagtgtgtgtgaatgagagagtgtgtctgtgtgagagagggacagggtctcattaaagtggggatcagggttagaatttccagagcccagctggtttctttggtgcccaggcctggtaggatctccatttattcctctgccaactcctgcatccamgttcctggggatgcctgtgagactgcacactgctgggggaaggactcaggaacgtacattgttaacaagccccacacaaggtgcctggttgcccaactccaggggagccattcacatagaacgtgcccccacgtggccctgggccctggcccttcaggtaaatatatgtgctggacaaggggaatgagtgtggggtcagacccatctgcrttcagtccctggccctgcctttttctagcagaaagactctggacaggtacctcactttccaaacctcagggggtccttctgtggaaggccagaggctgggacccactatacatccaggcagtgagggctggctgagctcagcaggagcactgtgggtgctagttgccttccctgcatcgcttgttcattcagtaagcgtcagcaggcacctgttgtttgcaaggcacaggtgataggaaacaagaatcagacaaagccctgagcacaaggagtgggccctccagggaggaaactgacaggggagtcccttactgttgcacacgaggccagagctgggattctctgatctagcatattatccctgtgagatccccaggcctctctcagattccaaaagaactctgacatcattaggagaagctgcacccaaacagaaggtctggttgccactcatgattggatgtgcccttattctgtgacaggttgcgggagattctcatggtggccagcgccaacatcaagacacccatgatgagcgtgcccgtgctcaacaccaagaaagccctgaagagagtgaaaagcctgaagaagcaactcaccagggtgtgcttgggggaggtaacgtctctccttcccaggttgcagacggggtgaaggcatgttcctatatcctccccatgtgtgaagaacaggctttgcttactgctctgaccctaggctcagattcccaccaatgagagataagctgtctctgccaggtgctgagcagagatggatcaggaagcttttaagasagtcattagttccacagcatcctcctgtgcctgaaaaataaaccatttcctgagtttgcctacccgctctgctgaggccactcctaggaggttcaggccactctctggaggtgactgcaggctgtgggccccccagcagatccacaccagtatagctcaccagggtttctttggggtttggcctgtggtctcagctgctatctctgtaaacccttgggtctcgtaacccactcacattgcgcagtcacctaggacctgaacaagtcaagttctctctgtccgtctggttccaggtgttgcagaaaattgacgtccaggagtccttctgtatggaagaaaaacasaacaaattccaggtgtaccagctgcggtttcagttcctgccacatgcatattaccagcaggagaagtgcctgagacccgaggacatcctgcgcttcatggaaacaaggtcagggctcaggctgtgattgtcattgaccttgacccagagaatgcgcttgaactggggcaggaagcacctagccacaaggctcctagagattgagtgcctttgcccaaatgagcccttcaagggaagtgtttaggaagcagagggccttgcagcctgatctggaaacctgaccacagtctggcttgtgggtatgactttmttagccacacgtcactccctgagcccatttcttctcttgggttgacgtcaggattgttgtcttctggggcttgcaggcattaagacatggaaatgtgggtgtggtaaagagaagggagcaccatcaaagcggtgcttctgtggtgtcggagcagcacatgctgttaatgtttgctagggtgttactgcaggcagtataatgtggttcctgatgcatttagattctgtgaataatgaacaatgtgcgggtggcacgctgctgttagatctccattctataaccaggattgcctccagagaaattcgagttcctgtcccgagttcctgtccagtagggaaaaggaacttttgtctcaagttcaagttactgttagatatttgaaaagcagaggccacaatgctgagttccggggagcaggaggatgggctttttggggactggggcaagactggaagagcccacgaagcatttttgactcaccagctaaccctagacggtgaagtgtgaacacaaaaaggctgcatagcccagcaggtgacaggccagtgaagcaggcttggaggcccccggcagactgaagagtgtggaacctgtctcaaggggcacctgttactatgcaggaatggaggcccggggggccacatcttttgatttaaaaagaaagaaaacaagcttcccaccccctacgtttttttctttcttgggtcacttgtttacttgcctttgcttttatataattgaggtctcctgacttttaaacatcagcaactaattcatgtgtttttaaaagcccagtaaggcccagatggttctcatctgttgcaggatctggccacaggccactgaccactgcctctaatctagaccagttcttggtcttctgggagctgctcagatagagaagcaatgacagagcagaagcagaaagctccctgcactcagccatcccacaaacacatactgagccatgcccattcgtcgctgagtcacrggggcaggcgtgggcaacacagtacgacttttctgccctcagccctctgccctctcaccttatggggcctggcctcgagccagccctctgtgcaggtggcatttgggatggtgggtcttggggtggaggagcttggatgtgaactcagtcctttggacgggggtcactggccaggtgcttcctgccccagttcacgagccctgggtgaagttgttgttggctgggcctcaggagcacctgcgttggtgccagcctgggctgagaacattccttctgtcgagtggtcctctgtgctatctgggcactgggcagagtggcaggggagtgctgtgtgcacccgcctgccagctccttaattaacagcgaggaacataactaccaagtgcagggggcgtttgtgctggcctggcagtggttttctgggaaatgggaattcagatttcatggcctctagagaataactaagggtggacggagttagatgttttgccccagttctgttcacaggaggcccaggccagcccagcaggtaggtcggcatgaggctggcgccagcccatgctggggttctttttacttatattacctcatggaattgaaaataggaaatcactttttaagacttcttcctgatgagggacagccctggcttgttcccagccgtgaagtactttttcaactcctccctktgttttgcttgtgaacttgaaaatctgtgataaataaagccatgcgcagtagcttttggtggaggtggcctcaaggactcagcagaatggggctgaggggttaggcagagctaaaagatggggcastggatgagctgggtgcggtctggactccctttgtcaggccccaggcagcagagcagctgtgttcaggcctctggccgcccacaggaaatgggaggaagtgtgagtgcactttcaaaagagcagccaacccccaagaagctttttctccttcctttctcccatccctcccccttccttcctctctgccaccctctttttctttctctttgcccccaccctcccttctcccagctgtggagtcatgagacccttgacagagcctggagaaaaacagcacgagacagatggttccctaggtagagatatacaagcgtagaaggccccccagatctctgcactggcacccatcacatgggctgtttgtgtaaattgtctggcaggtggcaggggagatgaagtggaaagagcactgagctaggagttaggggctgtaagttttggcctccggtccccagccatgaaaagacccagctgacagtctgtaattgtagcttctgtgaatctgactttccaaacagcaggtggtrgagctgttgccaggcgcgttcagaaaccgccaggggtcatgtgctctgtttgtaattatttacgtgggacgggaggcttctctgcccctgcccctcctgttccctttctgttgctacattcmggtgagctgcacaaccttgagaaggcagtcactgtgggccgttagttcccctgctcttggcaaaaccatagaagggcaaattgcacctccaggaaaactggcacactggtcacatgcctaccacttactcaccagccattcattctgccttctcacctccttccctcctacgttctccacaagtcctggtcaccaaaagaggcagggaaggcagaaggcatccccaactgggggaatcagggagggcttcttggaggagttacagctgctgaggcctggccttgaaggatgagtacagcttcagtaggtagatattggccagggaagttactggcagagtgagccgctcaagcaaaggcccaaagggtgcacagggtggagggagcagatgggcagttagagttgaggccagatgtgaaatgctgggggcaaaagcatcagagccgtgacattgccacaagttgagacaggctggggcgcccagctgagggaagcagccctgtgtgtggcagcagctgagccccgcacccccactccgcctcattccatctcctctgctctgcacagtagcctcgggtgcagagtgagagtgatcccatgttgcagatgagatcaaggccctcctctccagtctgtggcaggtcaggactttaacctgaacctgtccttacagaaacatctctcccaccccctctttccagtgggattgtatctttctaaagtcaagcccggccttctctcatctggctatcctgttcctgtccccagtgcctggtaaacaagctcttctctggattaatggatgagggggcttttttttctgccaagggcaaaccacgtacacctttaaaaagttaaaaaataatattggggtctgggtgcagtggcttacccttgtaattccagcactttgggaggccaaggcaggtggatcacctgaggtcaggagtccacaatcagcctggccaacatggtgaaaccccgtttctactaaaaatagaaaaattagtcgggcatggtggtgcatgcctgtaatcccagctactcagaaggctgaggcatgagaatcgtttgaatccgggaggcggaggttgcagtgagccgaggtcgcaccactgcactccagcctgggggatagagagactccatctcgggacggtggggggaactaataataataatattagggaagatgagtggcattcttttgtttttaatgagcaaaatagtatacatttgacctgcctactttttcaaatgaagactctaagctccttgagggcctggagtctgtcttttcgtccttgctttgccaccagggctggcacatgctgggcacagtataggcgctcagagaaagtgggacggctggctggatgtgtgagggacccgattctcacagtcacaagcagccctttttggtgtgctattctggcctgttggaaaagacaggcagggggttacatgaggaaagaagtggtatggaggggacagggtggatcctaagaggccctaaaaatagatggctctggaggaagtggcagggggccaggttctgagcttcaggttggttcttttaaattggtrtggttctaacttgttgacacgattcattgccacaagctaagttatctctgcccttcgaaattttratgagcccttccgaagtcctcgttctttcgtcacattgccggggctcccacaccaagggagttctctggccagagcaacaccaccttctggagatgctgcaggttgtgggcargggaaggtcctagtcctgggtggggttcccctctcctacagtagattctgccttccttgttagaggacgaccacagcggcacctacaactgtccttcaccaagcacgcastctgccaggcgctgtgagaggaatcagacatagggttgtttctcatcattagcaaacaagattgcagaatacgtagtaattcccatattttctagacaatggggcttaaagctgaggaagctgcctgtcctactcataccccgggagtggcagtgcacctattgagaccaggcctgttggactgtggaaccggtgttcctgatacgccagagacggttccaaaacagcgggtagggacaagtgagtggctaggagaggctgggcctccatctcgtgcactgatcccctgtgggaatccctcagcgtcctatcccccaaatgagggtagggctggacatgctggtactgcacagggctttttggctttcttcttgttttagattctttaaacttctgatggaatccatcaaaaagaagaataataaagcatcagctttcaggaacgtaaacactcgaagagctacacagcgggatctggacaacgctggggagttggggaggagtcgggtgagtgagtccccgggggtcactagagttgcacagggacagcccccagactgggcaggctctgtgcctattctctgtgctcctccagccccatcctggtgctggcccatctcctacctatctcagcttttacctgctgttctgagagcccagaagcagcattcacttcttggcctgatgggccaggcaagcgaggctgccaggcagcatggtgtagccagccccggggcaggcctccgcatcatagctctgctctccaagagcccgctgtaagtggtcttcatcctgaggagggactcgaggtcatggcgtgcgctgagcctttgaaagttctttttccggtttcctttggctctgccttcgacttgcccaggcaagatgaactgaggcccaccagggcactggcagggaccagagaggtatctggaagcagagaagttgggctgcagtgacaaaaaggggaagagggaaaaaaccagtaggagcaaaatagtccaggaataaataatcagatatctgccaggagacccaggagcaggccagacctgagggtggtgtgggagcaggtccctgggtgccatctgagccagcagccagcctgcttgggttggggatgatgtggactgggactacccccaaccagctctgtggtctcagttgtgtcacccttctctgggtctgtcttctcacccctaaaatgaggggctggcctacaccagggaaaatgctaggtctctcctgctccgtgagttcacctgctagctcactcaagcacaagcgggtgtggactatctttagaatgctgcctggtcttgattcttaattcacccagaaggagagtataaaaaactaggagccaagttcaggaggagaaaggaagagatactcagtattctacaagataacccttccttctcatccccacctgcaactgggtttgatcaaaaatatttggaacaatatttgacaccatcttcttctaagaaagcaagtcctggcacttttttttttaatttttgggaatgaaactttgcaagtaagtrgtgcatgtaaagatgaagactgaagggaaggaggcctgggttctgggactggacagagtagatgccagtagacgggttgggttgggtggcagtggatggagggtggtggctggatgggagaaggggttagaagggtggggcatggatggatggatgggttggtgggtggatggatggattcactgagcactagatattggagttaatctttttcttccttgcccacaaaccacagggagagcaggagggtgatgaggaagaggaggggcacattgtggatgctgaagctgaggagggrgacgccgatgcctctgatgccaaacgcaaggagaagcaggaggaggaggtgagagaccctgtgtggggtgaaggagctgtggtcccagcccccttccctgttaacctggagggattatctcccggcacccaggccacacctctgtgtcatgaacccacaaggaaccctgaagcagcacctgcctgcccagcatacctctctcttgagaagatggggttcatagggtgggaatttggcacaggtccactccagggctgccttttagatgtggccatccctggacttaaatcggactcaaggatccagacaggcttctggcaagaaaaagtcaggctgcctctggtttttacaatgaaaatatacctctctctcctcccacaaaccagtctcctgctgtcataatggccgagggaacttaccggtgagcaggtacaccagtgagggctgagtgagggtgagctccacctctgtgaggggctcakggggacagagaggtggcattctcaaggcaaaaggaagaagaaagaccaaccaggccggagcagaggagccgggagtgtggagcaggtggggcctaggtagcccaggccagccaaggctttgcaggggtctttgttccacaggcagagtccaggtagatggtgggtccccaagtgacmcagcctgtgctcccttttctgccaggttgattatgagagtgaggaagaggaggagagggagggcgaggagaacgacgatgaagacatgcaggaggaacgaaatccccacagggaaggtgctcgaaagacccaagagcaagatgaagaggtgggcttaggcactgrggaggacccgtcccttcccgccctcctgacgcagccccggaaacccacccacagccaggrgccccaggggcccgaggccatggagcgccgggtccaggctgtgcgtgagatccacccgttcatagatgactaccagtacgacaccgaggagagcctgtggtgccaggtcagtgtggccgtgcaggccagggcttgggtggttggtccagctggccaaatccctctgtgkaaggggcctgctgagctcccctgcacagctgggcagggggcagccaacattccccatggtctcccactcagagcacasccaggcctcctgtttggggcctgcgagagtcatttgttctttttaatcccagatccctttaggaatctggtgatggctataaaccctctgccccgaaaaagggcccacacgtgtcattttcaaacccctagtaagccagttctccccgatctttcaagacacacaagactgatctaccaggccctttaggtactttcaaatacaccacctcctttaatcttcagtacaacagatatgttaccatggaccacacgtgttgtagagacactgttcgtgccctcaggcagggacacttcagttccccacacacacagcccctgccaccatctttttagggatttcatggttcccttaaagcctggatgatctggatgcctagacatgtgcacacacttacgctttgtctttcctttgatccagttcagtggttcccaagtgatggggtaataacaagaaccactgatgggattgcacgcgtgaaacaacgtgtaccctgccttgtggtctttaaggacattaagagcagtgcagagtggatgtgaatctcaatgttgtcaccgacagctgtgaaaacaaccccactgyttccccctgaatctgggggactggagatggctgacctgtacacagttcagccatctccaatgttcagactacctgctggcttgcccagcaggaccactttcccccagccagggagttcctgaaaaggttttgaaggagtctcgcctcagtcctctttgtggggactggagtagctgtcaccctacccagctctccctccttttgcaggtgacagtgaagctccctctgatgaagatcaactttgacatgagctccctggtagtatctttggcccatggtgccgtcatctatgcgaccaagggcatcactcggtgcctcctgaatgaaacaaccaacaataagaacgagaaggagcttgtgctaaacacagaaggaatcaacctcccagagctattcaagtatgcagaggtaagacaggctgtctgctggcctgggacaaagcattagtcctcaccccacgttgtctcaagacccagccactgggaggctcgctctacgcgatttactctggcccttcctgagccatttgtgcttccaggccacattccccaaaccaagtgtgcgtgtcctcgtctgcctcccggggattctggggcacgttagcctcattcaggtccccagtaaagcaccctgctgaacttatccaacccagagtcgcccgggttaatttgagtagagttttttccttgaaattaagaccctcgggccgggcgtggtggttcacacctgtaatcccagcactttgggaggccaaggcaggcggatcacgaggtcaggagatcaagaccatcctggctaacacggtgaaaccccttctctactaaaaaatacaaaaaaaaaatagccgggcatggtgacgggtgcctgtagtcccagctacttgggaggctgaggcaggagaatggcgataacccaggaggcggagcttgcagtaaaccaagattgcgccgctgcactccagcctgggggacagagtgagactccatctcaaaaaaaaaaaaaaagaaagaaattaagaccctcccgaagtagagttgtgagaaatcattgctgcatcacctgcctagatgctgtttgctttatctggtaaagggggtcccaggggtagaggtgccctggcattcctgtcccacctgctcaccagctcatctgtcctttgagctgtgtctccaagtactcccacttcaccaactctcccagaactttctgggtttcccccacagaacactgaggaactggggccctctagcctaaccccccaacaagtctatgctaagctggcaaagctccccctgccacgtacacttctgcccccaccaatgaccaccctgcaaagtctcctgctcccctgaacccttttaccaaacacttcccagaggatgagcaaggaggattggcacctgccaagagtgcagggtgagaggctcctccaagacagctcagccgcaccttggccccttggtaaggcccagcacatgcctgtgcggctgactggcccccactccatgcaccctggaggggtgtgtaatgtgtygctgctaggggaactttccttgcttcctaagggaagccttaatcctagtaaacaggtctcagtttaaaaataagaagaaaaaatccttttcttccyattgaatctaaagcgtgtccaaagtggacacgctggattcttgtaatgacgatacagaccttgggccccggccagcgagccgtcagcagctctgcctagccatttccttctgctaatcctgggccacctcttgaccactttgtcatcagctgtaccgagctgccagacacaaggagagagagagcggccagggggagatacgcaggcagaagggagcagaaggccaggccctctaaataaatcccttccttcctctctccaggtcctggatctgcgccgcctctactccaacgacatccacgccatrgccaacacgtatggcattgaggccgcgctgcgggtgatcgagaaggagatcaaggatgtgtttgccgtgtatggtaaggggagcttgcagataacaccccgaggtctgggcaccagccaggacaccagaaggctcggcaggagggtcaggaccgtgtcggtccagcaccgagtcagtccagcactaaggcaggcactgcagcatgcgtgcagtgagtgcacctgtaggagactgcagatctgtgaagaggtgacgtctcccatcactgagaccgcttcagtggtgtctcatctgctggtgccttagagaaagctcctgattgataacttggccccatcctgcctttggggtttcagttcccaagtgaaaacagtgcggttagatcctcatttcctgtgctgctggaaggaagcgggaagcaggatgcaggggtcagggaaagatgccccagaccacggggaagggttaagtagcgtgagcaggtggcggasstgaaggggagccccagagtctaactcccaagccatgtgctgatgtggaggcagcttggcttgtgtctgctgactgctcccgtggtcactgcttaatccctcctaattttacctcccgtttgacaggcatcgcrgtcgaccctcgccatctctccctggttgctgattatatgtgcttcgagggtgtttacaagccactgaatcgctttgggatccggtcaaactcttccccgctacagcagatgacatttgaaaccagcttccagtttctgaagcaagccaccatgctgggttagtgcgtgggcaggagccctggcctcccctctactgacgactctgggcacacgggctcacccatgggcatctttccatggttccttgcacaccagtgggatcttgggatctgaggggagcgggggcggctggagggggctgaacagcagacacgacagctgcctctacgctttgaaggaacaggaagagggccttcccctctcaagtgctagaggggggctgcctcgtgatcccatcagcttcagagactcaggacccacctgagtccygagacttcagtgttcagccccataatcacctcatgacattcccaacttctacctcaacaccctgacacatgtttttgtgtctctgtcaggatcccacgatgagctgaggtctccttctgcctgccttgtggtcgggaaggtcgtcaggggcgggacaggcctgttcgagctcaagcagcctctgagatagcagctaccccggcaccatctgcccagctccaaggacccttggtgagggcgtggcccagcctgccttctgcatgagaggaccaggagactggaatccagggcagttccaagtgacagtacagagcacagcagcgaccttgggcctgaaagcagtgggcctctgagctgggccagcttcacctggaaagtgacagagttgctcatccttgcccctccctgtctctggatttttatcaaggtttaccaagtcttctgagtccccctgagatggctggggcytcacctgtgctgcaggaggcctctgtggcataacccctaaggagaagtcctgattcacgattcactgagaagaccaaggggaagccatgctttgctgctggggaccccaggcacctccagagtagggaagcggggttcttttgctgtgagtggccagggacaacagacaagattcctgggggctcccgatgagcaggaacgtggagcctgctgcccaaggcctgctccttccggctgctccagcccctgggggcagagtccacaaagagtccccatcaagacttcttccctgagtcaagtacagcgtagcatagtcctccacccacccaacctctctgcctggccagggtcctggccctgccactgtgtggcgaggtgtccttctagaccacatcagccccaaggctgggagcagtcgctccagggccgcagcagttcactcccacacatagaacccaggtcactgctggggcgattgaacaggttgcctggcttttctctgctgtcagtttggtgtggaggcctatgttctgccccatacaccccacaggccctgcttatgggaaggaacacaggcctccagcccagaggactgtgccgccctgttcttggccgtccacgtttcctctccctctagcaccagcaatacatttccctggcatggacagaaaagacagagaggacttgtacaaaggctttgtaaaaccagaggctagcttctatctttgtctactgttatttcagctcagggcgggtaatwaacatcattggaactagctattaggaaagaaaaaaaacttggttttttttacaacaattttttcccttggtttgcagtttctgcatttggatttgagaacccagggcggggattttcttggcacagtcaggtcttgggtccctcttcctgtgctttcttgtctgaggccttagggggaagagctcakcctctgcagcctcctccacctctgcccctggcctgcctctgctgtgacctccttccagagctagctgctggccctgtggccaggagaagcagaggggagaagcctttatgcagaagctgtgctagccttggtctggggtggggaggctgctgctgtgaccttaggggtagggttggggatcaagggaggctttgtcaagggagagtgaccatgttgctccctacatccatgcaataggacccagcctgcacctcctaggcctacactggggaaagcctgacagaaatcagtacctcctaacggggtctgccaggttcaccaaggcatgggcacagaggaatatgacagttttgaggcaggcaggaagggcccagcctgcagggtaagacattcattctttgagttaaaggccatattcacttgatgatttctacacacactagaattgtgagagtgtccttgaaggagatcacaaagtaacctggtgactgtggcacagggtccgtggattccatctctcccaggcactgagggcgcagaggcgaaggagcaagccctgcatattggcagggctgtgaccatcgcacttagatcagacccccgacctgtgttgggatgtgagggatgccctcctgccccacccatccacatggttcctgggcagctctgttttattcctgtgtctttcctgatggatgagtattaagacagcatgtctggtttttaaacagacatttgggagcttgcacatcctgatgagcagggactcactgtggtggccttagggaattacacgctcactttggtggttctctatgctcggaagcctctgagagtggccttggcagcttaagatggcagaggctttggagtcttcttaggactgtaagtgcccattgaggatgcatttgagttttggaaagtaggcccaagtcaaatctgatggatggattcaagaacatggactaatctgcgttgtcatttttaatcaaaatgtaatggagattgatcatctggtggggttcacaaacttttcatgagagctgtgagttctttttttgagatgcacttttgcacttgttacccaggctgagtgcaatggcgcaatctcggctccactgcaacctccatctcccgagttcaagcgattctcctgcctcagcctcccgagtagctgagattacaggcatgcgccaccacgcctggctaatttttgtatttttagtagagatggggtttcaccatgttggccaggctagtctcgaactcctaatctcaggtgatccgcctgcctcagcctcccaaagtgctgggtttacaggcgtgagctactgtgccggccagagctatgagttctttcagaatcctcagatgccattagctagccactgtttggacatccttctcaccttgccctttggggtgatatccatacctacttgcttgcttctaacagtttttttatttgttttgtagagacgggttttggtttattgctcaggctggtttcaaactcctaggctcaagcggtcctcccactgtggcctcccaaagtgctgggtggtgtgagccaccgtgcctggccagttaattttttttagtgtctcttttttgggttctcaccagaaacactatcagcattcccacagatattcctgtgagtctttgaaacattttctatcctgcattgagtaagaataaaaccgaggaaggggtgaagcaccttgtctcatccccagtctggaacttgaaccttcttttctcttcactttgccctacccccaaataatatgtacaaatgtctgtatccattgagcactaactccctattccttccacctccccagcccctggcaaccactgttctacgttctgtctctacgaatttgacttctctaggtccctcatacaagtggaaaagtacagcatgtctttttgtgaccggcttatttcacttagcataatgtcctcaaggttcatccatgctgtagcatgtgtcagaattgccttcttgcttgaggctgctgatacctcctcatgtgtatataccgtattttgtttaatcactcatctgttggtggacacttgggttgcctccacctcttggctgttgcaaataacgctgtgaacatggatatacagatatctgaggccaggccaggcgttcacacctgtaatcccaatacgttgggaggccgaggcgggcagatcatctgaggtcaggattcgagaccaccctggccaacatggcaaaaccccatctctactaaaaatacaaaaattagctgggtgtggtggtgcgcgcctataatcccagctactcgggaggctgaggcaggagaatcttgaactcaggaggtggaggttgcagtgagccgagattgcgccactgcactccagcctgggtgacagagtgagattccgtctcaaaaaaaaaaaaaacaaaaactcagaccctgctttcctttgaatatatactagaagtggaattgctggatcatatggtaattctttaatttttctgggggaactgctgtcccattttccacagcagctacaccattttatgttcccaccaacggtgtacaacaatttcaatttctccacatccttgttcttgttaatagtagccaccctaatgtgtatgaggtgccatctcgtggtttggtgtgggctgtgtttcaatcagatgttgggacccttaagtgttctgcacctggggagagttaggaaccacttaaggagtgtctgttgcttgccaatcttaaaatttttagtttgcacctgaatcaggggctgtcagagtccagactgctcttgaaatagaaaagactggtcgttaaaggctggttcgttgagtctttcatcgttgagtgataccacctctgcagatggctcagtggggcagccccgtaccacagcctgcccttgaggttgtgtagtttagataggtcacagagttgctgggcctaccgcaggtctcctgaccctggtgcagttttacttcaattacaaccaccaaaatagctacagtcaaaaattccaaagttcctacaccatcaacctccaccccacttccgtccaaagtccacttagaggctctcagttttggaccttagaaacacttagggagctttttaaaaagatcgattctgtatttttagtagagatggggtttcacccagctactcaggaggctgaggcaggagaatcacttgaaccggggagttggaggttgcagtgagccgagattatgtcactccagcctgggcaacagagtgagactccgtcttaggaaaaaaaaaaagattgattctggccgggcacagtggctcacgcttacagtcccagcactttaagagactcaggcaggaggatcacttgagcttaggagtttgagactagcctgggcaacccagtgagaccccgtatctacaaaaattagccaggtgttgtgacatgtgcctgtggtcccagctactcaagaggctgaggtgagaggagcaagtgagcccaggagttcaaggctgcaatgagctgtgatcgcaccactgcactccagctcgggtgacaagagtgagaccccgtctgaaaaaaagattgatcccaaggccttgcccagattctgattttattggcctggagtgtggcctaggcattagaaaatcttcaagagagtctaaggtgcagcggaattgagagccacggacagaaaaagccctaaattgtggaaatgcacagccaccgtcaccacctatcggtacgatgacatctcaaggagtcactggccctaggtttctgcagtaggatcttaagatctgatctctgccctcaagtgagtgcacgtgcagtaaagctgtcatcgtgccatgacagatgtctgcaaggactttacagtggggtccaaaggatgccaccatcagctccacctggggctcaacaaagcctgaaagaagaaagggatgatgcttccagcagaaacctggaggcctgcagctctgccagcccagcacagcaagcgaggccatttgtccagcaggggcagaaggagggaactcagccagccagcgtttcctacaagcagctccatgagaggtttccacttaaaatgctaaatcataattatttaatcagattcgttccttaagttctttaagcagcatcgctgtcctaccacgagtggtcatcaaggagcagggtttaactcaactctgagttacccggcagggtacctgggtaactgcctgggttgaggtacccagcaggcttcatgtgcatgtgcacactgccccctgataggacctggtttattcacaggctcaggtgtcactgcagctccccagtgactatcttcgcgcaagttggactcaatggcctgggaggtttgtcccagccgacagatacctgaccatgcccatcctcaccattccctcccccatgctgcatccatccaaccttgatctccactgtgtcccaggcaccctaagatgcacaagctatgtgggccctgccctcacagaacttgtagtcttctgccccaaacaagccagttcaccgtcttcatgatcaggccaaaggttgaggtacccagcaggcttcatatgcacatgcacactgtcccctataggaccatgccttgcccagctggctgcactctagagggtgctttgtaggaaggacagagtggagaggacagtggggaggtacttgggtgttcaacagccagaagggagggaaactgaaaaagaatcaggagtccagccatcccctccccacctcctgcccccacttccaccctggctgctggccctttgcccttgaatatgggtgatataggtgtggctattcagttccagtcacagtgctgcctctatgtcttttgcaagctggggtcttccttactcagaaggcctggaggccctgccagatgctgccttccggactggctgcccgctgcagtgttttcacgggagccaagccagccccgggcctgtagcctcccatgtgacagagtttcagacaccacagtcctcagctggaccacagtaaacacttgccttccccaacccatgattcttgcttggaaacatgaacctgatgttccacgtgcgttcagccaatcaaacctcaagaatgtgattgagcagtgaggctgcgttttgggcaagacactgagctctgaaataagacttttcttggaatctcaagccctcaacttacagtgggaccctaagaaatgcacttcagtttccttttatgtaaaatggtggtaaaattaattgtgttcattaaattgcacacaactatacatgtttacctatacactaagtggttctcaacttggggcaatttgccccccaggggacattcagcagtgtctgcggacattttttgttgctactggagggaggtgctactggcatctagggagtggaggctagagatgctgctaaactacagtccacaggacagtctccacagcaaagaattgtccagccccaaatatcaataatgccgaggttgaggaaaccctgccacatacacatagatgcgggttaacattgtttattttacaaagtggaatcatttacattttagccattctgatagatgaagcagtggcatctttttttttttttttttttttttgagacggggtctcactctgttgcccaggctggagtgcagggttgcaatcacggctcacagcagcctcgaagtcccaggaccaagcaaccctcccaccgcagccttccaagtaactgggactacaggcacacaacaccatgcccagctaattttttaatttttttgtagagacggggtttcaccatgttgcccaggctcaaactcctgagctcacacgatctgctgccttcaccttccaaagtgctgggattacaggtgtaagccactatgcccagcctcatttgtacttcagtttgcaattctctattaataaatctaagcatcttttcacatgtttattggttattctgatttgcacttctgagaactgcctatttgtatcctttgcccatttttctattgggttattggtattgcttttgtcaattttaaagaattgtatttactatagatatagataaccttttgtcactgtgctaaacatttttctcccaagccaggtaaagaattcagcacagtccctgcattgtgtaaaaccttgagtaaagatgttagctcttggccacccaggccagtggccgcctttagactttggctagggcttctggagcagttttttttgtttgttttgtttttgttttgttttgttttgttttttgagatggaatctctctctgtcgcctaggctggagtgcagtgacacaatctcggctcactgcaaccttttctaaggtacatagattgattgaaaaagcacagctgggcatggtggctcatgcctataa

SEQ ID NO: 95626 - DNA, 26795 bp, Homo sapiens
  misc_feature (1)...(26795): n = A,T,C or G
accccgcctccgcttcctctcttgctgggctggcactggagaggcagtgggcactttggggcccggcagggggacgtttggctgtggagacgtcagcgggtcagcggcctccaccatgcccttcccggccacttccttccagacgtcctggggtagaaacagcttccagcaacacccatggcaattaacacagaggagtgactcgcaggaacttctggaagaggaggaaagatcttgctgatttaacaggaaatgccgacatcaacgacatcgagaatgcgggaccctcacaccagcctcacgagaagccggtggatacagcttattccagagggaggcttggatcagcacctggggaaaaaaggcagcccctcaacctggccagcctgcagaggagagaagcctgagcaagcgtcctccaaatttcacaacaggctttaccatgtggatgatgtaaccagtcatcagtacatttctgtaaagcaaagcacacttttaaaaaccagccatgctagtgggcctgaggattacctttcgtcttcctctttcctctgtggaagatgatattgcaaaattgtaaaaagagacaataaaaaagtggatgaaagggtatcctagcaagctgttatgaataaaaaatctcggtattttctggattttgtgctgcttgtgctattagtcaagttttaaaacatgcttaatttattatttcttcttgcatctaattttattttattctttttatttatttatttatttttgagacagagtctcgcactgtcctccaggctggagtgcagtggcacgatcttggctcactgcaacctccgcctcccgggttcaagcaattctcctgcctcagcctcccaagtagctgggattacaggcgcccaccggcacgcccagctaattttttgtatttttagtagagacggggtttcaccatgttggccaggctggtctcgaactcctgaccttgtgattcgcctgcctcggcctcccaaagtactgggattacaggtgtgagccaccacgcccggccttatttttttctttttttgagacggaggtcttgctctgttacccaggctggagtgcagtggtgcaatctcagctcactgcatcctccgccttctgggttcaagtgtttcttctgtctcagcctcccgagcagctggaattacaggcacacaccaccacgcccggctaatttttatatttttagtagagaccgggtttagccatgttggccaggatagtctccaactcctgacctcaggccatccgcctgcctcggcctcccaaactgttgggattacaagcgtgagccaccgtgcccggccggcatctaattttataatagttattttgcattccttcttcttttttcatttttctgtcatttttttttttgagatggagtttcgctcttggtgcccaggnnnnnnnnnnnnnnnnnnnnnnnnnnnnnnnnnnnnnnnnnnnnnnnnnnnnnnnnnnnnnnnnnnnnnnnnnnnnnnnnnnnnnnnnnnnnnnnnnnnnnnnnnnnnnnnnnnnnnnnnnnnnnnnnnnnnnnnnnnnnnnnnnnnnnnnnnnnnnnnnnnnnnnnnnnnnnnnnnnnnnnnnnnnnnnnnnnnnnnnnnnnnnnnnnnnnnnnnnnnnnnnnnnnnnnnnnnnnnnnnnnnnnnncacttagccagctgtggaggcacgtgcctgtaatcccagctactcaggaggctaaggcaggagaatcgcttgaacctgggaggcagaggttgcagtgagcggagatcgcaccactgcactccagcctgggcaacaagagcaagactccgtctaaaaaaaaaaaaagacatccccattggcttcaggctgcccgaaacctgtgcaagctccagccctgtgcttacttggttctctgccttgtggcagaggttcccagagctgtggggaaagcgcccccaacaagcagctggacccacctcacacgacacccccagatcagtcttggctggctcacagatgtaaatgtaaaacgtaaaaagactcccctcccaatagggaaacctatttaagacctcaggggaggcaggtgcttaaacaggacatacgccttgtggaagggaaggcttggtcagtcggatggcaggaaaactaggaccccctaagagccgttgcatggagggtctaggcacatgtgacatgcaccggccagcccccttgctcagagatcctgcatctgcaaatacaccagcttgctgaatgtgtttaagccccagaatcaatacccaccgtgcttccgcagttactcatgcacacgctcagagtgaagaagtctaggatccggttgcatggccggctcctccgaggctgcgaggcaggaccggtcccatcctctccccagctccctgtggcggccagcagccctcggtgatccttggcctgagaaagcaccgccctgacctcggccttcatcttcgcacggcctctccctgcatgcctgtctccagatcccctttccataagggcgcctcatgctggggtgaggcccgcccttgtgaccgcaccttaacctgattttctctgtaaagactctgtctccaaacaagtcacattctgaggtgctgggggttggaatgtcaacatagaattttggggggacagttctacccataagtatggttagactttagaccctggtttcctcaggggagtggtggggggagaggccctcaccagaaccaaacatgccagtacccccatctctacttcccatcctccagagcagtaagaaacacgtttcctgtggtttaagcctccagtctgtggtcttctgtcacggcagcccacgttgaccaagacagacaggaaagggagtgggagacacaggcctggagacgtggacgggcctgcacagaagaagctgtccctctggcagacaagctccgttgtggcgggtgccgtggtccaggctgggattcaaagttgttgttttttttttttttttccaaggcagaagaatttttcttagtacagaacaaaatgaaaagtctcccatgtctacttctatccacacagacccggcaaccatccgatttctcaattttttccccacccttcccgcctttctattccacaaaaccgccattgtcatcatggcccatccccaatgagccgctggacacacctcccagacggggtcgtggccgggcagaggggctcctcacttcccagtaggggcggctgggcagaagcgcccctcacctcccggatggggcggctggccgggcagaggggctcctcacttcccagtaggggcggccgggcagaggagcccctcacctcccggacggggcggctgccgggcggagacgctcctcacttcccagacggggtggctgctggacggaggggctcctcacttctcagacagggcggttgccaggcagagggtttcctcacttctcagacggggcggccgggcagagacgctcctcacctcccagacagggttgtggccaacagaggtgctcctcacatcccagacagggcggcggggcagaggtgctccccacatctcagacgatgggcggccgggcagagacgctcctcacttcctagatgggaaggcggcggggaagaggcgctcctcgcttcctagatgggatggcggccgggcagagacgctcctcactttccagactgggcagccaggcacaggggctcctcatatcccagacgatggggggccaggcagagacgctcctcacttcccagacggggtggcggctgggcagaggctgcaatctcggcactttgggaggccaaggcaggcggctgggaggtggaggttgtagcgagccgagatcacgccacttcactccagcctgggcaccattgagcactgagtgaacgagactccgtctgcaatcccggcacctcgggaggccgaggctggcggatcactcgcggttaggagctggagaccagcccggccaacacagcaaaaccccatctccaccaaaaaaaacacgaaaaccagtcaggcgtggcggcgcgcacctgcaatggcaggcactcggcaggctgaggcaggagaatcaggcagggaggttgcagtgagccgagatggcggcagtaccgtccagctttggctcggcatcagagggagaccgtggaaggagaccgtggagggagagggagagggagagggagagggagagcggattcaaagttttaaggccccttcagcgagaagctgctggtggctttggaggacgttctaggaagtccgtggagtgtttgctggaaggatgctttgcccgccattttaattaacgtgtgcgtcagaaagcagaaagttctggcagaaatggtagatgagggttttcctttttaagatgtttttgatgctctccactgtctcctaaatggagaaaggtatgtccttaaacagtttttcctcagaagccagctgcagtttgcaccgtggttcactgccatgagcaccacgggctcagtgagccacctcctcctcatgggccacaaggctgggtcctagctctcccagggcccaggcacagggggtcttggggcctggctgagggcaggctcggggtggggtctggcacaggagacagggaatgcaggggtggtgactccgggcctcccagcataggtgggcatcaggaaaggatttctgcggagcaccctgccacagggcctctgctccggctttccgcctggacgccttcctgctgcccccaggcagccctcattcttcagggtgctgtctgtcccagagcgcagctcctggagggtgaaggttccctgaagctttggctgcattccctttaccctggggtccacccagggtcctaccccagcagctcaaccagcagcttctggacaaacagaatcctccctggttgaggactgcgtctcccccctcaccatctcaggggcctgctcctccctcctcagactgggtccccggctcaccctccattcctggaatcccctgtggtctgggtgccctcaccagcacagcccctaggacaggtctcccggctccttccctccagagtccacagcccccagcccctttcaggcgtctccccacaggcccttccctgctcttcctgccccctgagaccgcctgctgcgatggccctggagccctgccctctgcaggtccccgctcggtggcccggggtggggtcccccgcttcgcagactcctatccacagttaggcccacgggggcaaggacccagactgctgccagcggcggggaggggtgacccgcgtggacgcggctctcaaaggacaccagcgccacctgaacaagacccgtggcgcgcacgaggcaggagagctgggcgctcggcgtgaggcccgggtgggggtcgcgagcggacagccccgggccgcaggcgggtcccccgttgcagtgaggacagcggtcgggcgccgggggtcctgggcctcgggcagggccaagtctgcgcgtgcgaagaccccacggacggagccgcccaagcaccgcaaaccccgctttccgggacccactgtgggaggcccgcagcgctgcccctcgccgggggcgtcctgcgcggccgggggcctcggacagcatccgcgtctcgcgtgggaggcgcctgtctgcgcagccgcgggccgggaccccgcaggtacaacgccgcgcgtgcggcgtccggagaagtctggcccggctgcggtcaaaccgagcccacgtggaccagttccccacggctggttcgcgagcggcctccgcgcacaggccccgccccttagcaggccccgccccgcccgatcacagggcccgcccccagccccgctcatcgacggggcacggctgcgacccttagtaggccccgccccgccagcccccagatccgcccaccagcagcgccccgccccgccccgcggccccgcctgcgcagtggggcaggcgcagtcggaagcagtgtaccgggccgtggagcggcggctcctgtacccccggcgcggacctaaaggggctcgagccgctcgggccgggaatggggcggcgccgagcccggggcccgcgcctggctgggcgnnnnnnnnnnnnnnnnnnnnnnnnnnnnnnnnnnnnnnnnnnnnnnnnnnnnnnnnnnnnnnnnnnnnnnnnnnnnnnnnnnnnnnnnnnnnnnnnnnnnnnnnnnnnnnnnnnnnnnnncgcgcctggctgggcgcggctccccgcgccccggcagcccggcctgcagccccgtgctgggctcaggaggccgcgcgcgcccggggccggggccggggccgggacccgagcgggcgggcgtcagagccccgggccccgctgccgcgccgggacacagcttccggaaggtgacgctcaccaagcccaccttctgccacctctgctccgacttcatctgggggctggccggcttcctgtgcgacggtgagcgcccgggcccgatgcctacccggctgcagccctgcctctgccccgtgggcgggagcctgagcggaggtggcaccggcgctttcgggggagtggagggcggggtcccagccctgctcgcgggacgtgccttcgtggggcggccggggcctgtgcgccgtggggccgctccaggctgcgggcttcctcacctgggaggtgcggacagcatctccatagtgccgcgcgatggctgcgacccaggggctgtgcctgatgcgagcgggacctcagctggggtccccatggccggcttcctctcccagtggctggggcagcaggtgtggctaagcagggctggcctgggcccctggccctagcccttctcatgctgtggcccagagtcccagcctcctggagagccaggccgggccctgccgtcccggtgcgcgtgtcccagccctgctccacccagctgcccagctcttgctggggtgaggacagcccttccctgttctgggcccgggtgctcccagggctggctctcatcttcccccgcggcaagcaggcgggccccggggactacagcccagcctctggagggagcgagggacagggggaccacagcccagcctctggagggagcgagggacagggggaccacagcccagcctctggagggagcgagggacaggaccggagttctggacgtttgacacttactgtgtcctggccagggacgctgaggtgggaggggctatccttagcctcaggcctttctctggggataggggtccactcaggtcagggtccgcagaggagactgtcccctcacacggggatgtcgtctgtggtggaaacggcatggttgttctgacccccagggctgcacaaggtggcctggcccgccagcttctttgtcacgtcagagcatggcacagccatgcctgctgcctggggatgccaggggcttccccagaggtggggagtgtgcatgtgtggctgaggcagctcccgacttgaggccagactccgggtcccctcccccttcggagggggcaaaagggccctcctgggcagcacccgtggaagaggggccagcagcggtatgggaaggagggcaccctccccgccaggagacccaagcgtggggcgtggggtgagcaggccctgtctccatggcagaggagggacctgggtgctgcctgtccccccttctctcggtggaccctggcctgyttccagagcttttctcttaagctgccaggagaagcttctcccggtcccatctggagacyggggtggctagggctgcagcaggtgaagggcggcaccagcggggccttctggaagagctccctgtcccagctggactgcctggggctccgtggcacaaccttcacccggggctgtcttggcagttgtgtcactgggtgccctgcccactcccagcccccgcagcctttgccccagcccagggttcctgccctcccttctgccccggccccaccctcctgtctgttttactgctggggtgtggcgcttgctcctcttatgccctcctgagcaccccgccggctcaggtgctccctgggtcctatgcacacagccagagctccttgggaggcttggggctgtccactccccagcggctcctgcctcccagagccctcacctgccttgggtggctctcggtctcaggcacggtgcacagcacgtagcagggacaattaggggtatgcgtagtttcgggggagtgagacacagatgtccttggtaaagccaatctgccgaaggccgagaagcccctgccacctggcgaacctggtgagcccagggctgccccttgagaggcccaactgcagaggcaggaggagtgctgggcctacgtgcgaaggggagggactgctctctggatgagaggatacactcattgtcctccaggatggtcaggaccacccaggttcttgctcctgggctcctgggctgcaggctctctccaatgagtgggcagggtggtgggggaactcgaggaccacagggcccctggtgcagcatggtgggtatggcagtcattgccctggggcctctaacttcctgggtaggacagccattgggtaggacaggggccaactcacacagtgctcattcccacagtctgcaatttcatgtctcatgagaagtgcctgaagcacgtgaggatcccgtgcacgagtgtggcacccagcctggtccgggtgagtgtggggctgggtgttgcacctgcaagaggctgggggatgtgtcagctctcgtagggtcgaggcactgaaaaccttcatgtcagacgttagtgatacctgcagttgaaaggcaaagggcagatactgctcgggattaaaaggctgagcaccctgcatggatctgcagggaatgatggtgataaaagccagtccccgaggtcgcaaatagcaagatcctgtccatagaatgtgctcaaaatgacgaaactaaagggagcacagatgtagagaggtttccaggcggagaagtgggcgtggctgtgacatgcagcgtgagggctcctgggggggatggagatttcggcatctggcgtgacctcagtttgcaagatcacacacttaggggagctgacaaaggcttcagggggtctgttcartttcctcacagctatgtgtgaacccacaagcatctcaaggaagcttgaataaaaagcaaaggcaggaagcctgggtgcctgagggtgtcttggccaccaccctccctctaagggctctgggtggggcagggaggtgactggcccaggtcactgcagggcacaggggacttcccttctctggtgacagtggtgacagcagggacatgtaggaagggccaggcttattcctccctcagctgtcagcgtcgccgtcttcagactgaggccccccaagtccgcattccctgatgcgttcargctgcaggtggggcgcaggccgcgaggcaggcccgggtgtgcagcaggacgggaagccaggccagcaggcacacctgccactggcgggcatccggctgcgccgtcccctctaatgtctgacgccctgttcctaatgatgcagttccccgggtgtgagcaggaggccttaggccggtggtcctggtggtggccgacaccctggtgattccacactggcttgggcggcccctcgtcatgtggacggcccgaggctgccgctttttaaaattgattttaatgtcttctatactttgctaaattgggaaartataagtatgtatttcaactgtatgcatgataggaaatttagaagatgtatttaacggccgggcgctgtggctcacgcccgtaatcccagcactttgggaggccgaggcaggtagatcatgaggtcaggagatcgagaccatcctggctaacacagtgaaaccccttctttactaaacaaaatataaaaattagccgggtgtggtggcgggcgcctgtagtcccagctactcgggaggctgaggcaggagaatggtgtgaacccaggaggcggagcttgcagtgagccgagatcacgccactgcactccagcctgggcgacagagcgagactccatctcaaaaaaaaaaaaaaaaggagatatatttaacaaaataaaagtcacccgccatcctggcatgctcacagctgctattctggaacacggtctttctgtgtatgcttttatcgggtgtggtttaagtttggggacaagggcgagagtcaggagtgaagacttggtccttctccttcccttctcgtggaaaagcaacagcccagctttctccaacacagaaacattggtccacactcgttatggccagattatctcccagagggcagtccctgtgtgctgggatcttcctggctcggaggagacagatgccaggccgtcgacagagcctcgcctgccccaaggagggaaggggtggcaggcgggcctcgctcccctgckctaggcagggctgctgggggaggccacagcctcctccctgcttttgaccagccaggctgtccccaggacccgggggtgtggttgttcctggggcctcgctcccctgcgctaggcagggctgctggaggaggccacagcctcctccctgcttttgaccagccaggctgtccccaggacctgggggtgtggttgttcctggggcctccagctagcacagctggctcagcctgggcagttctcagcaggagcgtgagctgcagagttgcgcaggtgaagagcgaggaggggtggcgggcagcctgttgcccttaccaagggtgctgaggtgaggctgccccaccaggttcctgtagcccactgcttcggcccccgggggctccacaagcgcaagttctgtgctgtctgccgcaaggtcctggaggcaccggcgctccactgcgaaggtacctggagcctgcctggctccccacccagtgtcctggtctctgctgcccagggtggcccagcccacccctgctgtgcagcttgtcaggggtgatgggggaggccaagggctggccgcctggcaggccacaggacacttaaaggatgcagggtgctaggtggtggggatggggcagacccaagcaccggcagaggcaggggtcctccgggggcggcagacacctctaaccctgcctgccccccagtgtgtgagctgcacctccacccagactgtgtgcccttcgcctgcagtgactgccgccagtgccaccaggatgggcaccaggatcacgtgagtgtaccggccccagggagccctggggggtggggcgggcccagctgctgactgcccccgctctgcaggacacccatcaccaccactggcgggaggggaacctgccctcgggagcgcgctgcgaggtctgcaggaagacgtgcggctcctctgacgtgctggccggcgtgcgctgcgagtggtgcggggtccaggtgggcgctgggaagtcgagggggtgggggtggggcaggagaggtgcggggttgggtgggtgctgggaggtggaggagttgggggggcggggcaggagaggcgcgggttccaggtgggtgctcgggggcgggcggcaggaaggacacggggtccaggtgggtctgcgtcgtgtggggtctttccctggacctggcgcacctggtgcccccgcaccctggctccaaccccccagctcaggcccttctccccccaggcgcactccctctgctccgcggcgctggctcccgagtgtggcttcgggcgtctgcgctccctggtcctgcctcccgcgtgcgtgcgccttctgcccggcggcttcagcaagacgcagagcttccgcatcgtggaggccgcggagccgggtgaggtgcgggccggccggggcgccctgggctgggggctgcgcactgaatgaggggtccgtgtgcccgacccgcaggcgaggggggcgacggcgccgacgggagcgctgccgtgggtccaggcagagagacacaggcaactccggagtccggtaagtgcccgcctcattccccccaactccactgaggtcccccgggcgcccgggactcacggagcttacccggcccagggaagcaaacgctgaagatctttgatggcgacgacgcggtragaagaagccagttccgcctcgtyacggtgtcccgcctggccggtgccgaggaggtgctggtaagggggaggctgggggaggtctgagccccctcccaggaccgcatgtccccgcacctggcgcacctgacctggctcccccaacctggcgcccctcacccacctggcctccccctccatgacctgccccccactgaaccccgccygaccccccacaacttggcccctctaacctggtgccctgcaggaggccgcactgcgggcccaccacatccccgaggaccctggccacctggagctgtgccggctgcccccttcctctcaggcctgtgacgcctgggctgggggcaaggctgggagtgctgtgatctcggaggagggcagaagccccgggtccggcgaggccacgccagaggcctgggtcatccgggctctgccgcgggcccaggaggtcctgaagatctaccctggctggctcaagtgagactgggcccgaggctcagggtctgctgggcggggtggggggagctccagctcagactgtgtccccacagggtgggcgtggcctacgtgtccgtgcgagtgaccccgaagagcacggcccgctctgtggtgctggaggtcctgccgctgctcggccgycaggtgcgtaccctgtgcctgctccccatgccggccagactyggtggggggtcgctgtccccaggaggccaggccaccatcccagcccaggcrtggctgtccccgcgggtgtcctgaggtggtgggggcctgcccagacccratgccaagctctaccccaacaggccgagagtcccgagagcttccagctggtggaggtggcgatgggctgcmggcacggtgagtagacagcccgtgctgggcgtggcggtccctgcaccttttgggtttggacctgctgcccaggctttcctgcagggtggtgccggacatcaaggccgggctctgccctcctgaccagctccaccctgcatccccacgggccctgggggctccgggcagctgcttccaaggtgggcgaggagccgggtgctgacggcctgtsccctcacctctgcagtccagcggacgatgctgatggacgaacagcccctgctggaccggctacaggacatccggcaggtgagtgggtgtggacgccggcccccagggaaccagcagccctcagccacagcctctgccccacagggtgggtgtgccccagacgccgagttctccttggctaggcagcggctgtcctggctgacagggcagcgccctcgtcatgagctacttggtccctgcagggaggcctygagctgcagatctccccgaggtcctcgaggggaacggacaggggttgtccacagcaaggaagcctctgtggcccctttcctcgttttcctgttgacttaattcctgggagtgttcctgatgccctgttttgctgttttgcgrgtgaggagacagagggcctggtgcggtggtgccgttctccccggcccagcatccccgcccctctccctgcagatgtctgtgcggcaggtgagccagacgcggttctacgtggcagagagcagggatgtagccccgcacgtctccctgtttgttggcggcctgcctcccggcctgtctcccgaggagtacagcagcctgctgcatgaggccggggctaccaaaggtgtgaccactgtggctggccgtgggctgctggcacggggcagggtcgagcggcaggcagtggggctgcagtgctgagccggctcctgcctctccttgagccaccaaggcctgagctccgggtccagcccacgtctcttcctccaagaggctctggagcctctcgccctctgtggccgttccctgcggtgctcagcctctgcctctccctctccctctggggggycctgtacctccagggagctgggagtcctgctcctggagtggggcaggggtacttcctggggaggctgcctttggggtgagatgtcacccctggacaggcggaggggctgtccctggccccagtgctgtgtgtccttcgcctcccaccgccctgaccacagcctgcctttgcagccaccgtggtgtccgtgagtcacatctactcctcccaaggtgagctgccctgagggacgtggtcacatgaggcccaggggtgttcctggggtgaagtgggacagccctggccctcacgtagcacctgacctttcccttgggcagccctgggctggggaaacgtcctggtttggttcctgccctggcaccgtgggggccatgggacaggctccccctgagtcctgggctcctgccgcaggcgcggtagtgttggacgttgcctgctttgcggaggccgagcggctgtacatgctgctgaaggacatggctgtgcggggccggctgctcactgccctggtgctccccgacctgctggtgagtgtgcggtcaagccggctcttcacacaccccagggggtggccagagggaggtcggggtctgcaggtgcacaggccccacagccagactcgctgttttcatctggcatcacttccttgaattcactgggggcttgtaggtgccaccttgtttgtgcctcayaacagcaggaaggactctgttgccygttttacagcaaggggcctgaggtcagagggtcagcgctcatccgaggctgcccagtaggtgataccagctccgtggggcaccgtggggtcaggcccagcttccacgctgcacctgaggcctccacccagtagggaggcccacaggaygcagctcctggatgtgccgggccccgctgcggctgcctcgccaagggccagagcgtgtttgtgaccagctgtcaggatcccaggcatggccctcccggtacagcctcagcctcactccccctgcccgggaggccttagggcctctgctctctgcctggagctccccaggccagtcagtgcagctcccaaactttgaacgctgcccttcagacccacagtgcccagaagagggggcacctggcaacagggcagggctgggggaaagggggatctggaacatggagacagggcagggccggggggaacgggggtctggtccgtggagacagggcagggccggggggaacggggttctggcccatggaggggctggagcctgggactccacgctgcacaccgtgccttcacattggcctctcgtcctcagcccatctagcccccaaagggtcccatgaggaccccccaggtgtccatggctgttctacccctgaaccttgacccttgatcgtgaccccagtccaggcgaagcagaactsgagcagaatgagttgtctgtggctgggacgggagatgcctgtggctccctgctatgcctccctcctgtgcccctacacccggccttgcctggctcaggacagggtggccatccccactgtcccgaggatgcagcccccaccccagctccactcgctctgtgggcagagccaggtttggggccgacacgcgctttctctctcccgtcagctgcctgccctggggtgagtggtaagtggtgaccgcaggcggctctgcctgccaagtgggtcacgaagccccgagtgtgtccttgcccccagccacggccggcycctgtgccgctgcccaccctgtgtctgcacccagcctgtgtgtctcctgttgcccagccttccccgctgtgggggccccagcctcctgtcgtagggtccctagcctcctgtcgtagggatcccagccctgagcccgctgtgtctagatccctgggtactgtttcttggggttgtgtgtggggagatggactctgtcctgtggtcgagggacgccgcgtgccaccctgtgagttaagagcttttctcggctgctgtgtaggtgggcggtggcctgggagccgccatcctccaaaggtgtgcaccagaggccccccaggggacaggccttggtctcgctggcacagagtgccacgcagagtcccacgtggatttccagcctggactcgcgctgcatggcccaggcgggtgtggtctgttcacacgcagctcagtgggcaggtctgaggcctttgtgctgggagtgccaggcagccagccggctgtcctcagtgccgccctgctggccagcagcgagatggggtgaccacgcagctcatgtgtgaggcctcagatgtgagggtgctggccacgccttcctggggagggggctggtccaagccaggtgggctcagggttgggggctgggcactgcctggcaaccccagcagtggggacaccccaccttgggtccccatcctaacccagccccctgtctgtcagcacgcgaagctgcccccagacagctgtcccctccttgtgttcgtgaaccccaagagtggaggcctcaagggccgagacctgctctgcagcttccggaagctactgaaccctcatcaggtcttcgacctgaccaacggaggtcctcttcccgggtgagtccagcaggacccctggtccagggcagcagcaggggcgggaagggccccaggaggctgccacagctgtctcggccggcaggagctccacggggatcccgtgctgggaccttgaagtcctccacacggccaggacgggcacttggaagaggcagcctgggtgggggatgggctgcgcccgcagctggtagaggacacttcctgtctcccgctaggctccacctgttctcccaggtgccctgcttccgggtgctggtgtgtggtggcgatggcactgtgggctgggtgcttggcgccctggaggagacacggtaccgactggcctgcccggagccttctgtggccatcctgcccctgggcacaggtgggctcagccgtgcagcckaggagggggcctcagggtctaccccttcctgtgcagcttttgccgaggcctgggctggctgtcctcgtggtggggtctgcacccagctgatgggcgggtgggtgtggacagatgctctgtgtctgcttgtgtcccagggaatgaccttggtcgagtcctccgctggggggcgggctacagcggcgaggacccgttctccgtactgctgtctgtggacgaggccgacgccgtgctcatggaccgctggaccatcctgctggatgcccacgaggctggcagtgcagagaacgayacggcagacgcagagccccccaaggtacagggcagcccggcgtggggtgccttccaggctcctgcatatgaccccgctacacgcgtcacaacgggcgtcctcttcccagccacactcgggtgtacgcgcccgcatcatcccctctgcaaagcgggcagttgagggagacacagaaagtagccactgctggggattgtgcygagccagctggcgacagagcctggccaggacctgcccatgctgccctctcctgggtgctcggcttggtgccagggtggtccttgctcttgtctctgcctgccggcagagctgttggggagctcmgggggcctggtgagggcggccgggtcctgggagatgaacgccctgtccccagatcgtgcagatgagtaactactgtggcattggcatcgaygcggagctgagcctggacttccaccaggcacgggaagaggagcctggcaagttcacaagcaggtaccggagcygcaggggctaccacctgtcaacggcatacctccctcaggtcccccagcaggaacaggcagaggggccggaacccggaggctgcctaaggyggggtagggcttcccctggtgatgggtgacctgccccgtcctgcaggctgcacaacaagggtgtgtacgtgcgggtggggctgcagaagatcagtcactctcggagcctgcacaagcagatccggctgcaggtggagcggcaggaggtggagctgcccagtattgaaggcctcatcttcatcaacatccccaggtgctcgcgggcggggctccccagaggctctgcccggcggggccatgggcaggmtcagccctcgtcctgcctgcacctacacctctgtgcccgctctcttatgcggcagctggggctcgggggccgacctgtggggctccgacagcgacaccaggtttgagaagccacgcatggacgacgggctgctggaggttgtgggcgtgacgggcgtcgtgcacatggtgagccgccggccgagtgggcgggcgagcccagggtgggcgtccccggtccccgctgagcccagctggcctctcccgccccagggccaggtccagggtgggcgtccccggtccccgctgagcccggctggcctctcccgccccagggccaggtccagggtgggcgtccctggtccctgctcggctggcctctcccgccccagggccaggtcagcggtgggcgtccctgatccccgctgagcccggctggcctctcccgccccagggccaggtccagggtgggctgcgctccggaatccggattgcccagggttcctacttccgagtcacgctcctcaaggccaccccggtgcaggtggacggggagccctgggtccaggccccggggcacatgatcatctcagctgctggccctaaggtatgtggggtgaggctggagagccaggggaggtgggccgggctgggccggccatgggagtggccagtggtacccaggtggtgctggcatggccggctgcggccagggagcactgactccgggagggtgcctgcttcagaggagggctgtgccagtggccaggcgggccacaggtggcacagggagcagccagacaggtccctccccttccgtgaaatggggctgagatggcatcagctgcccggggccccaggaccgggggctgcccgtgtaccgttctttcatcggccatgtcaccctggtcctctgtcccctgccctgggacaggtgcacatgctgaggaaggccaagcagaagccgaggagggccgggaccaccagggatgcccgggcggatgctgcgcctgcccctgagagcgatcctaggtaggggtggctggggcagcccaaggkctcgagccatctctgctcccgccagccttgttttcaggtggtctggaggcagctccacgtccacacagtggccrgccctgtggtcgracctggctacagccctgaccrcrgcatcttcccagtgacggagcgggaccmgccctcatcccattggtgacacatgttggtgtcacagccctcatcccactggagactggtgtgcgggtggcagtgttaccccgtgtcccgggtgggcgcagggctctggatggtgagccctctgccctgtgggggcctggtcctctcctcaggggtgggcacccatccctctccccactgagccccttgagctggacagtgctggatgcaggccgtccaggtgggtctgatctcactttgtgcccctcgggccgtccccctggccagtccttmagagcagcaggctccctggtgtgtccctgccccagcagacacaggctgccagtccctccagcctcacctccccgccctgggcagcaggtgtgggcagcgtgtgaggctgccgggtggtggtgactggtgacttccttgtgttcagggaagggagaaggtgccttcccttgttttctggccttgttatatacagatggcagcttggatctcaggtacagctccaggggcaggcagtgcccagctggacctggtggccctttcctagtgcctctgctkggggaggagaacctctgtccacgtggaggctaggaggtctcaggtgctgccctggcagcaccagagtgtgggccgggcccgagtgtctgcccctcggccctcagggtggggcacttagcacccagaagggaccaaaagcagggcatggcggtgcagaggagtttgggaggtgtaaacagcccatgcacgtggaggaggagctggctttcagccccagaccccacgctagcactttccacgctgcttgcccgctgttgatgtgcagttcccagtgcctgtgtgagccgacatctgctcagtcctatccctcgtcagcgtgtggagacccagctcctgcagccctcctgctcccacgcccccagacagcttggtggagggtcctgcatctgggccaggctggggtgcacccagccaaagacaaagctgcctccacgtgcccaaggattcagatggtgcactggccccgggaggagtctgaccaaaaatggagcccgctctgtggggaagccccgactcccccacgagaaacggtcccacggtgcggatctcccccttcccttgtggggcacagctggcctgggcctccaatcctgcggagctttcctgggtgtggctttgacctcagaagtggctctggtttggcctcaggagtgtggcctggcccagcctgctgcagcctcctggggggcccttgatgccactaatcccccgaccccccgcatctgccaaactgcacagacacacgcattgtaaggccgcttgtggcctccagcgtgcactcttgtttacgtcattgtcatcttcaagaccagtcctttgtgattagttttgcttcgcgagccctggtgtggactgtggtctgtatgaatcgtgtgtaactgtggtgaggggcttgtcctgtatgtgagtctgtacccaggtggggtctgtgccctgcacaccgggcccctctgtatttatcgctgcctgaatgcaacagtaatttatatccaggacaaatacagtctgggcgtcactatcctaccatctcttcctcatctttgtgtcaacaaccgaggggaggggagggcctggcttggcacccccgaccccaccagctctgtataggcctcaaaggggctgggagtgggctgcccctcgggtaggtgagcttggcaacgtgtcttcaggttggagagagtggataggcaaatgccataaagcacatttccagttcctgtgaaactcctctctccgcaaaaagtggagaacaatttgaggactgaaataagagcatgatatttcacaatgaaaataaaaccaggccacgcaagaaccactgcggcctgcccgtgacttggcttcccctgcccagcatcctgtcctccctggtccatctctggtgaggacggctgggagtgggctctgtggctgctagcagggggcagggaggagctgggactgtgggtcgtcctggcccgtgggggctggcggggggtgttcgggccgggcgaggccccgcaggacccgcagggtggccagggccaggcccacgagcaggcgcagcaacaggaaggcgcagggcacggcgatctgcatgaggtggaagatgcccacactgaacctgctcagcaggcaggtggaggcgaaggccagcaggctggcacaggggtacagcgccagcttggcgaacatgagcacatgctcccggccgccaaaccacaccgagggctgcagcgtctccgcctggtgcagcagcgccgtggtccacatggccagctggaagatgctggccaggaagatgatggtgcagctgacacgcacgcgctccagctcatcgcggggctgccgggcgaaggccgaggtctgctggtaggctagtgggaggccacccacgaaggccagcgagagcgtgttcagcagccccatggcccgcgtggccttgcgcacatgcaggaagagtgagtggtgggcgaaccacagcagtcccactgtggcgaaggagccgaagtacgccaggaagcgcggcccggtcgcactcagggcggccacgaggctgccgctgaacctctccttcacatccttggggtccgggacgttgtcttcgctgagaacagtgaatagatgcatttgtgccggccttgccgtggccacacaggccccagcagggtggctgagcgcctgtcagggctgcctggatctggcacgttttcagatgaaccatgtggacttcccagtgtgctaaatttcagaacgccgtatttatgtgtatttggcacactgactgttacgtgctgttcatctgaaattccatagaaactggcacccttctgctctgtgctaatgggagcccaaccctgctggcccagagtgctgctgggggccctgggctgcagccctctctggccgaggctctcctgtgtttgctgggcaggaccagcctgctgtggggcagcgaggtctgttccctcccagcttccagccctcggagccacccacacaacaccctggctgaagatctgcagagggcttgcctccacggttctcagatgcacatgggggtctcaggaggccaactccctccacagggaggctgtgggaacccccttgtcagggctgctgccttctgacggcaccacccagaaagccgggaacagtgtcgtccttcaacatcgggaagtgaaggacagtggtcctcatgcagccccagacagacttctgtcctccagaacaatacgcagagggcgaggggtgaggggtgggggttgggggcaggagacagactggaggcagcaagggcaggaagttgctgggagggggcagctcccctggccatggctccaggtggaggagaggtcactgtcccggccccacgctgctgcctctcttcggcaggtccctcccaaggggagcctcagctggcctgcacaatcaggcagctcaccctggagcatccctggcacctgggccttagagatcagatgccaatgaacgtttgcttcccgtttttaaaaatgcacacgacagcagagaagagcatcaggagacttggactcgagaatatcaagtacaggatataaaaccatagtgtctaaccccaaggtggtcacagtgctgaactatgacgagggaacaagacactccaaaaggatggaagatgtaaaaaagcaaattcaaacattacgatggccgggcacggtggcttacacctgtaatcccagcactttgggaggccgaggtgggcagatcacctgaggtcaggagttcaagaccagcctggccaacttggtgaaacctcatctctattaaaaatgcaaaaagttagctgggcatggtggtgggtgcttgtaatcccaactacttgggaggctgaggcaggagaattgcttgaacctgggaggcggaggttgcagtgagctgagcttgagccactatactccagcctgggcgacacagcaggactgtctcaaaaaaaaaaaaaaaaaaaccccacaaaaaccaaaaacgtgacgactgagacgagacgcgcgctctaacagacgaagaggcagatgaggccgcggaggagcagacgctggaaggaagcaacagccagccaaagggagcaggaggggctgcgaagcgatggggggcactgggagggagccggagggaatgggagggactagggactaggaggggctggtgttggggcaggggtgaggcctggggcagggggatacccatggctgctgagcccctctgagaggagtgaggagagcagttggctgctggtgctgacctcaccctggcaccccatcctcggctgtgcttggggtgggagccgctgggaagggaggggccgctgggaagggaggggccgccgggaaggttgtcctccctgaagtgggggctgccctgacctcacacaaaactctaggcatccagaggagggtggagccaagacccctgtgcctttctggggtttccaggatgagacgccagggactcaagacacattggccacctgatagctggggcaggtgacgcggggtcctcaccagatgtccaggatgagaagcgtggccacgatggcgtagactccgtcgctgaaggcttccacgcgctccttgctgagtggctcgtggaggtcaaacgagaagacttccactgggtgagccgagggctccctgtggcctggggacacgccaggagggtggagctggccaaaccccccatgtggaggtagagcccgcgtggctgtcaccgccctcatccatgaagaggcctggaatgtgcaggccaggagaggagacaggacagggacgcccgaggggcggagtgggggagccccagccaccaccacgcacacgggcctcggcccacggacagccctcagtgcggagcagccgcacggaggtgggcggactacaggcctctcaggccagcccacccagtcatcacctacccaggagcctgtctctgcaccagccggtgaccttgctgacataggggaggaggatgacagtcaccatcagcaggtaagactgcagggagacaaaccgcaggtcagtgccctccacaggggtccgaggccaggccttacccacacaaagctgtgtgccaaagcaggggctgcggcagaagggagggtctttgcagatcatgtatctgatggggcctagtacccaaaaagtgtaaaggattcttaagccagcacagtggctcatgcctgtaatcccagcactttgtggggctgaggcaggtggatcgcttgggcccaagagttcgagaccagcctgggcaacatagtaagactgtatctctacgaaaaataaaaaattagtcaggtgtgactgtgtgtgcctgttgaacctgggagacaggagttgcagtgagaggtgacccagctcactgcactccagcctgggtgacagagcaagaccgtgtcttaaaatttatcgtctatctccctatctgaaattcttacaactcaaaaataaaaggacgacccaattaaaaatgggcaaaggatgagaacagacattgctccaaacaaaacatgcaaatggtcgacctctcgcagatcaaaaccacaacgagattcttcatatccactaggatggagagaactgaaaaacagcaggtgttgatgaggatgtggacaaactggaaccaccatgtgctgctggtgggaatgtaaaatgctgcagctgctgtggaagtttggtggttcctcaaaaaattaaacttaaaaaattaaacagaatcaccaaatgacccagaaactcactgtgggcacacacaccaacagcctgagaagacagatctgaagagacacgtgtccagcaatgctcagagaggcatcactccagcaatgcccacagtggctccacacgcaacaatgctcacaccggcgccactcacggcagctacacgtctccagcagtgctcacagcggcgccactcacgacacctacacgtctccagcagtgcttttgttgccttctccctctccctagtggctcacattctccaagcaccaacagctgatgtccccatgagcagatactggtcttatccccaggggctcctcctccaaacactgtttgatgtttactgtcctgacacagttttgtatagattccttatccaaaagaaaataggctggacgcagtggctcatgcctgcaatcccagcactttgggaggctgaggtgggtggatcacaaggtcaggagttcgagaccagcctggccaacatggtgaaaccccgtgtctactaaaaatacaaaacttagctgagggtggtggcaggcacctgtaatcccggctactcaggaggctgaggcaggagaattgcttgaacctgggaggcagaggttgcaatgagccgagattgcgccagtgcactccagcctggcagcaaaactccgtctcaagaaaaaaaaaagaaaaaaagaaaataaaggctggcgtggtggctcacactgtaatccagcactttgggaggctaaggcgggaggatcactttagtccaggcattccagactaacctgggcaatatagcaagactctgtctccacaaaaaataccaaaactacccaggtgtggtggtgcacacctgtagtcccagctacttgggaggctgaggtgagagaatcacttgagcccgggaggtcgaggctgtggtgagccaagatcacaccactgccctccggcctgggtgacacagcgagatcttgcctcaatgaacaaaaaacaaaacaagaaaacgcatgcacccccggattccgggtgtcgctgtttctggtcatcgtcatcgtgaagcttctctgagaaggacactcagctgccccttccttcgatgagcgtccgtctctgtcctcgacaggctgggtctcggggcctcaggtggagcaggcctccctccctggtgccactcactgcagccctgggcctcacacacaagaccctgggtggaacccctgcctgtctgcgctctgcccccacccccgtgtttgttgctcagcggggacattgctcctatggtggcccccgttcctgcctgggccccacgggctgtcccagcactcaccaaggggacaaagaagagagagaagatggccgctgcaaagcacagggccgggccttggaggacgatgcccaggacgtgtcgtcggtacagagccctgtgggcagagcgctggatctgcgggctcagcaggtgcgggaagtggaatgcgtaccccacaatcagtgcctgcgggaaaagcaagctgtaggacacaggccccaagagcagagggggcccccacagcagtcaacccccgggctgcatggcacacgcacgcaagggtctcgaggtggggaggacctggccccgggctgcatggcacgcgcgcacaggggtcttggggtgggggaggacctggcgagtagaggtgggcttgtacctgggacactttgggcacaggggctgaggtggagagagaacaggagcccctgctggctcctggggccgcatgtggggggtctcagggcccactcttcccagtctctgg

SEQ ID NO: 95627 - DNA, 25987 bp, Homo sapiens
  misc_feature (1)...(25987): n = A,T,C or G
ggcagcagggaggcagctggtgggcctgagacagaataagggtggatatcatgggatatgaggctccatggggctctggaagtgactgctttgaggatgggaccctgacccagagcgaaacaaggatccctttcaaggttctgagctgagcagtgccagggcatttttcttttttcttttttttttttttgagacagagtctcactctgttgcccagcctggggtgcagtggcgcgatctcggctcactgcaagctccccctcccgggttcacaccattctcctgcctcagcctcctgagtagctgggactacaggcgcccgccaccacgcccggctaatttttttgtatttttagtagagacggagtttcaccatgttagccaggatggtttccatttcctgacctcgtgatccgcccgccttggcttccagagcatttttcaaggatccctctggcagctcactggagtcagggtgggagctggaagactggctgggggtcatgggggttgcccagagaggtatggtgcccagactgggtggtggctgtgcaggctgtgagcagagggactgatgaggtttgaggtgagctggggggtgaggtggggggtcggggggtcgtacagggcaactgtggatttcagcttgggcagctaggcgggtggatgagcttggagtgagactggtctcggttttggccatgtggagttggacatctgagggtgaactgagtgaggagattggtgtgcaagggtctggagttgtgagtgatgcttctggcctgagggaaagggaatggggtgaatggaatagcagccagccttgagcctggagtgagaagcagagaccaggctggccagggtctgagggcttcctgcggacgccacgcaggtgagcacagctgcccgtggggcagtgcacctcctgtggcagctggctttgtgccgcatctgcagtggtgggggatggggttaccaccatggaccggaatctggccctatacagctccccgtctgtcagtctccccatgccacagcacccccagctccacagcaaaggtctggacacctcaacgcctcccttctggtcctcccatggtgtacaagatcaaggcagagccttggcaggagtctacagcctttgggtgtgggctcctgctccgccccgcctctgctggtccccacctgctcctgtaccccgggctgggtgtccagcaggagcagcaggagtccctggggtccaccccacccggcccctaccacctctcctcccctccatccaaaggacacactggtagcaaagaagtataacttaagaggcacttggataagaattaaatgcccagaaggtgcattccaaagtcccacggagttggagtagcggggcacggtgacctggaggaaagtgaagacccagctgggcttcaggttttctctgcagaaccccaaggcgatagcccggcagcccctgaccctagcggggggagccccagcatcagagatgtccctggcctgacacccaaggcgcctctgagtgtcatctggcagggccagcctcgcagcgaggggagcccgggacagggatccccgcccccaggcccaggaaccccggggtcagtccacaggcccgagggcccaccctccgcctggcccccattgggaggggccttgagagaccgacgctggggaggggactgggccggcgagatggagcgcgcagcccacccccagggccggagacgcagacgagccaccgcccagcccgggaacggaagccgcgggggcgcgtcagcccttgtagaccccgcgcggggtgtcgctggggccgcggcggccgcacaacgggctcattcaccgcgcggccgcggctgagcggccgcccgggtccccacgtccccgcccctgggcccgagcgcgtgagccgctaagaccgcgcggctgccgggcctggtgagtgcgcggggcggggccgcgcgtgcatgggggttcgcaggcggtggggggagaccgcgcggggtggggagcagggccgcgctctcctgagggtgggggtgggagtgcggggcaggggcggaggccgggcccgctgggctgggggcgcggggcgggtacagacccgcctcttgggagaacctgcatctgtggccgggacgaaggggacacaggtgctagagggtgcgggccggggcctcctcttctccagacctcggagctcgcccacccgcgggagggtctctgggaataaactcgggtccggtctcaaagccctgtcggccgggcttcttcccacgggtgggaggcaaggatgcaaggtctcctttcccagtaaatggactccaatgtaaaacggctgatttaaagacaaaactaaggaagtaagcgtgtgacacaagactggccaggggttcaggcgggaggggggttcaggagggaggcggattcaggcaggtcccagttgctggggcccccacgccccctgtcctgcgtgggccaagcggggaaggaaggaggtgttggcagccctgcgcgtgcacaggctcggggtagaatgggctacccactctctctggccagcaaggcccctggaccccctgggcactcagcctctgggcctggccacaggacagcaccagccactgcctcaatgctcagagaaactgaggcagagacacgtgggagggggcaggtcaggccccaaggatcctgcagtgatgacctcacctactttagacacccagcctaggtggggactaaaagggcataaggcccaatgcctgcagaagacctgaggccaggcccctgcagtgcggctgaggctgttcctgaactacgctcacctgcctaaaacctcaccacaggtccccataagccagcctctggaaacctccaccacctttcctgaggggggaagggccacctcccactccaggtttttctgtggccccaggtggcactgcccaccccaccctgcatgcaggcgtctgcaccaggtgccccacccctgctgtagcacccaggtcctccctgcctcctttagggagaccttgagggaacaaccccagccccctgggtctccccagttctccaacaaccctgctggtggctgcacccagaggggcccttatctgtcccagggagggacctgaggccctgcgtgactgccttaccccacccactggccaaccgcttcttacagcacagctcccaactgctgagcaaacagctgcttcccagggaccactggggcccaggttgggctggggtggaagcaagggctcagactctggaggacagggcaggggcttcgaggagaaatcagacttggagagggcatcccaggtggaggctatgggggtatgagaccctggagcctgttcagctctgcccgaatctcacactcaggggtacgagaccccagagcgttcagccctgcccgcatctcacactctggggtacgagaccctggagcattcagccctgtccacatctcacacttaggatgtctcctactctctggccatcccaactacattccactcccatttcacctccaaatgggggcactgcagcccagtcttccctgggctcacccagggctgtggggaactagcagcgcttggcagacggcttccacaaggaggtacctttggtggggtgagtgtccagggtctcctccctccggggctgtgccccatcaatgtcagtgtcctcgtcttggggaaatggagccccggcacatcagctggttctgcgagaccctcggcttcaatcccacatggacaggagaagtagagcctgtggcttctgttccccggacagagtcaggctgcccaaggtgccagggccgggttggccttccagccccacccgagggacccaccgcagcctcctggcctcccttgggatgggagagcactgagggctgcagcccctcgttacactcaccctccggccacaggtgccccgtgcaggctcccacccagtactcactgtcaaagtcggggggacctgaggctcccaaggaattttttttttttttttgagacagaactggccgggcacggtggctcacgcctgtaatcccagcactttgggaggccgaggcgggtggatcacaaggtcaggagttcaagactagcctgaccaacatagtgaaaccctgtctctactaaaaatacaaaaattagccgggcgtggtggcacacgcctgtagtcccaactactcaggcggctgaggcaggagaatcgcttgaacccgggaggcagaggctgcagtgagccgagattgtgccactgcactccagcctgggcaacagagcgagactccatctcaaaaaaaaaaaaaaaagacttgtaggctggagtgaagcgctacaaacatacctcactgcagcctggacctccagggctcaagcaatcctcctaccttagcttcccaaagtgctgggccaatgacagcgtttgtttttgagacgggctcttgctctgtggcctaggatagggtgcagtggcctaatcatacctcatggcagcctcaaactcctgggctcaagccatgctcccacctgagccgcttgagtagctgggatacaggcacacaccaccacacccagctaattttttacttttaattttttaaaggttggggggcagggggcggccgggtgcagtggctcaagcctgtaatcccagcactttgggaggccgaggtgggtggatcacgaggtcaggagatcaagaccatcctggctaacatggtgaaaccccgtctctactaaaaatacaaaaaattagccgggcgtggtggcgggtgcctgtagtcccagctactcgggaggctgaggcaggagaatcacttgaacccgggagacagagcttgcagtgagccgagatcatgccactgtactccagcctgggcaacagagcgaaactccgtctcaaaaaaaaaaaaattagccgggcgcggtggcgggcgcctgtagtcccagctactcaggaggctgaggcaggagaatggcgtgaacccaggaggcagagcttccagtgagccgagatcacaccactgcattccggcctgggtgacagagcaagactccgcctcaaaaaaaaaaaaagaaaaggtggggggcgtctcactatgttgaccaggctggtcttgaactgctggccttaagcgatcctcctgtctaggcctcccaaagtgttggaattacaggagtgaaccatcgtgcctggctaataattccttttaaaaagcagcttacccttattttcacgtgtgggcctaatttagttcacttaaaaaaatcatttatcttcaccccagccctatgaggcaggcactgccggtcctggtctgtggtagaggggagggcagaggagccgtgagggtgaccaggcgctgtgggtcggtgctgggtccagtcagaccaggactcctggccagtcacggcaccttgaccccggcagtcctcgccctgggcggtgagcaccacacacagggcttacgcgagcacacacgcatatgcacgcaccggcagccttgggctgagccggctgtcagcctctgccctgctccagcttggaccaggctggctccttgcaggaccaggagggtgtccggcgactggacacggagaccaagcctccctcagccccgcctgggtttgaaggctgctgcactcgaccccagaccccagagctgaaggtttacctgtgctcagcccctgagcccccgcctcccgctggtccctaagcccccccggcagggccgcagagccacagctgcagccgctcctgggaggctgggagctcctcagaggcccacacagctctaactactacaagcccctgattacagttcaactcccggatcagccgatcaggtaacatggctggagaaacccgtgactcagcaatctgtaggtaaataattgaactacagagtccagggcacagaccactgcctgcaggttggcgccaccacccccactctccccgctgctcgcgggagccagagggccctgcggtcctcggtggtcttgccagcccctcgtcatcccagggccctccgcgcctgtgaggactccctcaggtaagaaccatcctgggcccagatctcagctgcagcagaggggggcgtgggagccgaggccagaaatgccctggactcgtggtttcttaggggcaccctcaggctcaaggcaggtggccctactgtccccattccacacacctggaccccaggggcttggggtgggcttcagggcatccagggacccagtgtggtggggtcttccagggaaggggacacaactcttgcaatgttgcctgagggccaggacccccgctctgtgccccaggggtgctgtgcccagcctgcatgtgtcaacctaccaggctgggctcactgccccaacacacccgccaggagactggagctcgcacaccctgggccagcgtgcaaacagcaggctcagcccaggctccagggtgtcctgggcacctggtgtcctgggagcaaagtctttgcctaacgtcgctgagaagaatgtttaaagtgaaagtacattggagtctgcaaacaggacagacccgaggcctcacgtgggaccagtcaggcctctaagcaccgcctccctaacgccacggtgttttccgagatcaagggaaaggtcaggtgcccttccggctctgccggcccagggtgactgtgtgcagcgggctgggccctctcggtgctgcctcgggacagtgtgtcatggccgttccacagtgagctggtgcagcctgggaaaaagggcgcctcacgtcccagaactgtctgggcaggggagacagacgccagtcaccctcctcccctcccagctggccctgatggggcccccgtccaggcatattctcagaattctgtcccaagtccaggcggatgggctaggctagtgtctgagtgctgctcccccagcagacttggggtcccagtacccacaaagcttggcagggacataggaggcctcttcctgagacttccgccagccccaggacccacagggcaggtgacagaggggtgggtggaggtgtctccaggagagcaggcgatggtttggatgggggagggagggctctggtgtgggcatggggtggacagcaggaccgtttgccaacctggggagccagggaggtggacacggagcagctggactcaggcttgcctgcacctgtgtccagtgactgtgacattctgacggtaggcacatgtgcgtggtggcagcccagcctgttcctgccccgttggggaggtgagcttcaggaggctacagggtggttytcagccaggaaccgcagagccaataggccggagctgagcctggacagggtgccgccacgccgcccctcagcactgctggcctcagcacaccccatggcatgggcttggtgtcgtaatcccatctcaccycacgatggattctggatccagcagggcccagcgtccatccataccgggcagggggctggggcccgcgctgccaggagaaggcccagcaccaatccccggccctgggtgggcgaggggtccgccccaaggggcccgttgctgccggggaccttgtcgtttggccctggatccgggggctcctgtgaccatgccctcttctcggccgcaggtcggccacgggacctgacgcaacaggatggacgagtcccctgagcctctgcagcagggcagagggccggtgccggtccgacggcagcgcccagcaccccrgggtctgcgtgagatgctgaaggccaggctgtggtgcagctgctcrtgcagtgtgctgtgcgtccgggcgctggtgcaggacctgctccccgccacrcgctggctgcgtcagtaccgcccgcgggagtacctggcaggcgacgtcatgtctgggctggtcatcggcatcatcctggtgccgcaggccatcgcctactcattgctggccgggctgcagcccatctacagcctctatacgtccttcttcgccaacctcatctacttcctcatgggcacctcacggcatgtctccgtgggcatcttcagcctgctttgcctcatggtggggcaggtggtggaccgggagctccagctggccggctttgacccctcccaggacggcctgcagcccggagccaacagcagcaccctcaacggctcggctgccatgctggactgcgggcgtgactgctacgccatycgtgtcgccaccgccctcacgctgatgaccgggctttaccaggtgaggagccctgcttgggcacagggaggggcccagggcacccccscttaggttttggccatccacgagggcaaggctgggggcaagcmcagggttggcagaggaggtgctggcccaagacagcaaggcttgggcagagctggggcgtgccggggcatcccagggcgaggcaccgacgcggagaggctgtggatgcaggaggggaggggcacggggagccagtccggtgggccatggccttggtggggaccagcaggccaggtgtggctgtggctcagtggtgctggactgaggccatgtggcctcccaggccttctgtcctaggtggagtgggggatggcctccccacccccgaaggtctcctgccttggcctgtccaccttggcccccgttggctccacatctgcatggggggcagtgggcaccatgtgtaggaagcagcaggaaggggttgccttctgataccagaggtcttaattctgaaataaaacgggctgctgcacgtgacaagggttagacgtgtctatggccagctgtgtgcacgtgtgatgctcacgtggatgtcacagttgtctgcgggcatgagcacgcgtggaaccagaactcaggcccgtgtgaggagtctggtttggaacacacggggccgcaacacagaattgtcaggtcctgtgccgtgaccaccacccctcgggccatgccaggtgctggtgaggggcaggtggctcccgccaggcgcctgctggcctgaccgcactccgtccacaggtcctcatgggcgtcctccggctgggcttcgtgtccgcctacctctcacagccactgctcgatggctttgccatgggggcctccgtgaccatcctgacctcgcagctcaaacacctgctgggcgtgcggatcccgcggcaccaggggcccggcatggtggtcctcacatggctgagcctgctgcgcggcgccgggcaggccaacgtgtgcgacgtggtcaccagcacggtgtgcctggcggtgctgctagccgcgaaggagctctcagaccgctaccgacaccgcctgagggtgccgctgcccacggagctgctggtcatcgtggtggccacactcgtgtcrcacttcgggcagctccacaagcgctttggctcgagcgtggctggcgacatccccacgggtttcatgccccctcaggtcccagagcccaggctgatgcagcgtgtggctttggatgccgtggccctggccctcgtggctgccgccttctccatctcgctggcggagatgttcgcccgcagtcacrgctactctgtgcgtgccaaccaggagctgctggctgtgggctgctgcaacgtgctacccgccttcctccactgcttcgccaccagcgccgccctggccaagagcctggtgaagacagccactggctgccggacacagctgtccagcgtggtcagcgccaccgtggtgctgctggtgctgctggcgctggcaccgctgttccacgacctacagcgaagcgtgctggcctgcgtcatcgtggtcagcctgcggggggccctgcgcaaggtgtgggacctcccgcggctgtggcggatgagcccggctgacgcgctggtctgggcaggcaccgcggccacctgtatgctggtcagcacagaggccgggctgctggctggcgtcatcctctcgctgctcagcctggccggccgcacccaacgcccacgcaccgccctgctggcccgcatcggggacacggccttctacgaggatgccacagagttcgagggcctcgtccctgagcccggcgtgcgggtgttccgctttggggggccgctgtactatgccaacaaggacttcttcctgcrgtcactctayagcctcacggggctggacgcagggtgcatggctgcsaggaggaaggaggggggctcagagacgggggtcggtgagggaggccctgcccagggcgaggacctgggcccggttagcaccagggctgcgctggtgcccgcagcggccggcttccacacagtggtcatcgactgcgccccgctgctgttcctagacgcagcyggtgtgagcacgctgcaggacctgcgccgagactacggggccctgggcatcagcctgctgctagcctgctgcagcccgcctgtgagagacattctgagcagaggaggcttcctcggggagggccccggggacacggctgaggaggagcagctgttcctcagtgtgcacgatgccgtgcagacagcacgagcccgccacagggagctggaggccaccgatgcccatctgtagcagggccaggcctgcccagcagcctctgctccctcctggggacccacagcagacgtctgcaagccactgctgagacccttcccagggaggagccacccaagagctgcactcttgtgccacagctgccctggggaaaccggggaaccccaactgggaaaggaggccctctgatcacacgcaggacccaaacactcagaaatcaagaacctctgcctccgagacaggctggcccacagtgctggctgggccccaatgcaccgtccctcagctcagragggatgggcctgacctgacgctcagggttgacatcttatttgaacaagggtcccccgccatcatgcagcctccaaggtgccaagaggactccctatgcccaggcctgcccggtgcccaccctgctggtaggagccagcggctctggccaagtgcacgagggtctctgtgtttccagaaggccccacacacccaagtgcccctcacacctcgtgcctccccctcacagggtggccacctgcaccagcgtcagggcccagggtgctgtgaccgatgagacctcagctcagccctcaggtgcagtggccctacccagcctggccagcagacacacacagggatgctcacgggtgcaccaggagccaggtgcggcgcagccaaccctgagcctgcagggagacctgcaggaagcccaccgtgccccatgcaggggctccctccagcacacagccctcaccccagcacagccagcaaggacacgctctccccaacagggtgcttcggcgggaggtgggggaacaaggggtcttccgagcagcccccagccctcccctcccatctgtgcctctgtaaggggctctgggacgcccagaccctgcccgccgcccacctggtggtgacaagctccagcagccagtgggtccggacctgcttgatgccgcggkgagggacgrcgcccacataggbgaggttgagctgctrgtcccagctgaggacgtactggtcagcctrgctgtgtggcagcgggggkctggggacaacaaaggggcggctcagtcccgagcctcagcatggctggcagcgcggctgacacacacgttcaagcccaggactgcccgggcgcaggatccaggcgctgcccgtgcgttcagtgactaataaaatgacccttagggccaggaatgtggggaggtcccatcttcatggggaacggcagcagcagtaagacgaggggccaacgccagccctggccctggccctgccaggaaggcgggtacctcagctctaggtggaaggaatgggacaggcaggccaggtcccgctgcagggccgtccactcccaggggagactcctggtttacctcaaagagcaggatcccgggcatcggcctgggctgcagggggcggcccaggctcacgccccggcgcccactcaggtggaggacccacccacaaacacggcggggggcgggcccgggagagccagggccccagaggagggagctccggtctctgaagctctcacagtgcgcagtcagggggcgcccgagctctccccgtgcggccagggggtcccggaggccgcggagcgctcaccagaagyctgtgctcctccagaagcgccgcaggggccacagcgcgcgggccgcgtccacctgcaccaggtgcggggcctcggccggggccaccgggggygcggccaggagcgaggccaggagcgccagcagcgckgcgcgggggcgcaggggacgyatggccacgcgtgctcggggactgcggggcttcgggctgcactgccggttccgcctccgggtcggagtctgggcgcgcaccccatgtgaccgccgccgcggggcggggccttggtgagggggcgatggccgggtgggaggggttgggtggcctcggggagcctcggggagccgggagcacggcagggcttggagccccgcttccttgcgggcctcaggggctgctctgaggaccgatgactcggaaagcgctcagaagaacgcttcgcccgttggtgctatgtgagttgagccattactgtcttgtttttctctgtttttgtgtgtttttgagacagagtcttgctttgtcgcccaggctgaggtgcagtggcgcgatctcagctcactgcaacctccatctccggggctycagcgattttctcaccccagcctcctgagtaaagcgtgcgctttagcaggaaggagaattaccccagaagagcacactgggccctccttacacttggcttcagatccatggattcaaccaagcagactgaaaatattgttttaaagccaaagcaatacgaaataatacatattttaaaacaatacagtataacagctatttacagagcatttacattgttttagggactataagtaatcttgatttaaactacacagtaggatgtgcgtaggtaatgtgcaaatactgtgccattttatatcaagtacttgagcacctgcaaattttggtatctgggagggtcctggaaccaataccccgaggataccatgggacaactgtagtacatgtgtagtccatgtatgcatgtgtgaatccaagcaaacattgtataaaaataataatggaaagaacaggcttggtgcggtggctcacacctgcaatcccagcactttggaattgcaggccaacacgggaggatcacttgaggcctggagtttgaaatcggcctgggagatgtaccaagaccccatctgtacaaaaaaaaaatttagccagatgcgatggtatatgcctgtgaggcccagctacccacgaaattgaggtgggagattgcttgagcttaggagttcaaggctgagacgggccatgatcacaccactacattccagcctggttgacaaaatgagaccccatctctaaaaaaagaaaagaaaaaaagaacagtctactaacaaaacgaaaatactggacaataatcctctctaagttgggagaaggataattagagttacagtgttctgggtctttttattttggggagaggggttaaaatattgcttaacattaggtcttcttatgttgaaattgcattaaaagtgattagccatttaaaagtgaaatagtgtgtatatattccaaattagcaaggaggaaaaacataatacaaaaaaattcattaagaaactaaaaagtaagaaagggagggaaaggcgagagaaaccatgcaagtacagaactgtctccaggaacagcggggtaagaccctcagtccaacgaccccagagaaaacaactaaaatgatggataactcgctttaaaaacaattcctcaaagcgtcagagaactgagaaaaacagtaagaaaccaccagtcccacaccgtggtgcaggacacagcaatggaaactgaattgtttcagaccagccgcctcctgagagcaaccatcagaactggagagcgctgaacggaaccgtccagggcactgggagctctgaggagcctctgaggcctcggggctctgcagggacaagccgggagggggcggggcccgctttggggcggcgactccacacccctgcagcgtatcccagccacacaagacatggcgacackctgctgcgttcgttcctcacactgtggccacaggacagaagtcgaggctcaggcggggggcctggtaaagactttgggtttttcttgggaccccaaagttctatcccctaaaagcaaaggtaaaccagcaacagaattgtctttgtggggactgaagccagccttaaatcacctcaagccctgagagaattaaggtgagccgctcaccgggacacctgtggacagaaaagtacaccttccctggaggaaggtaaaacaaaacaaaaacagacagaagtcctcactgcacggtgctggaatggatccgggtcaggaaaaattattacaaagtgcatgatggggacattcacaatttggaatatgccttgtacattgtgcaacaaaattctaccaatgataaactccagaattttttttgtttttgttttttgtttttttaaacgaagtctcactctgttgtccaggctggagtgcagtggtgcgatctcagctcattgcaacctctgcctcagcctcctgagtagctgggattacaggcatgagccaccacgcccagccaatttttgtattttcagtagagacagcgttttaccatcctggccaggctggtctcgacctcctgacctcgaatgatccacctgtctcggcctcccaaagtgctgggattataggcatgagccaccgcgctgggtcaaactccagaattattaaacgactcaatgattgcatcacggttgtgaatggagattttttgttcatttgtgatccatgctgaagggtttagaggtgaagaatcaatagatttgtaaccaaagttgctctggaaattaaagcaaaacaataaatttagattacatacagagactgagataaaagcaaaggtagcaaaatattaacagttggtgaacctgggtgaaaactatatactgttattgcaacttttctgtgagtttgaaatttttcaaaatgaaaacattgaaaaaaatattaaaacctcatgaaacttagtaaaaatttattgaatgatacacttgaacttgcttcattttattgtatgtaaatcatatctcagtaaagctgataacgaattggtttaacagcaaattaaatccaactaggctgagcaaggtggctcatgcctgtaatcccagcactttgggaggctgaggcgggcagatcacctgaggtcaggagttcgagaccagcctggccaacatggtgaaaccctgtctctaccaaaaatacaaaaattagccgggcgtggtggcatgcgtctgtaatcccagctactcaggaggctgaggcaggagaattgctttaacctgggaggcagaggctgcagtgaaccaagatcacgtcactgcactccagcctgggcaacagagtgagaccctgtttcaaaaagaaaagacaaaattaaatggtgttcttcaagtagaaagaatgatgtcccaaatcccagctcagaggtgcagaggaagaagtgaagagtgcggggggaagggaaaacctcccctgcctttctgaagtttcactaaaagggtacacagatttcttggattgtagttttatgtgacacagcagctttcagagcaaagacctaaaggcgcaggggaaaccacatttttatactcaggttctgtgaatctggaaataggattggacgaaaggttaagacctgacaggctaacagactcctgggggagcccagcgaggcccatctgcttcggttcctggaggcctctctctgcagctctccytcctgctgggtgggggcacaacgccccggaataggggtctgaccacatacagtcaaacaaggcaggccagagaattcctttatggccagtttttacacagaaagacagagaaaagttattagagtcatacttttaggtttatggctggctttggggaaaaggggcttaggtttctacgacctgcctgggacaatgaggggccagagacaggaggcaggagaaggcctggcttccaaggccttcactcygggtgacattttctgaaccccaacaaaagcaacagaaacggtatattgtgtataaacctaatgaatcgtaaccgcataaaacaatcatgttacagggtttcacatatttctggggaattaggatttacagcaagagtggcacaggtgctgtatgggaaaagtgaagtgagaggggaggagagcctcctgaagacgccctccgtcctgtccaggcccgcgcctgtcgcctcacatggcgagcgcctgcaggcatggttccgtgaagcatccaagacgtagagatgattctagttatccgagtgggccctgagtgtaatcccagtgttcctatacaggggagacggaggggggtttgacacagaggaggctgtaacggcctcaggagagattgaaagattgttctaaaatgtgtccccagggtttatttcagtgaggtgtggggagacacacggacccggccacgacaggccaggaggaaggccttgctgtgtgtagagacgtgtgcgattccgatttagattttggggctctgtgaggcaagagattcacacaggtctctaccctgcaggggacaccttttgggcaatggcccagtggcttataataaacgtggggaagaagccactggtcggcggaggccctcagggctgagaccacgcctggcacattgcttccaggtccgcctttcactgggggcgtccgggcaggggtggagcagcagccgtccaccgggctccccagcagtgtggccagcagcaccgtaccctcacgcacgcacccatttctcttcgctcagagggtcccacagggcttgccaggcagcccaggggtttacgggaggtgacctcctcccacacttggcatccggcaagccaccgaggacaggggaagccgccccctcccacagatggaagacagcaaggggcagctttgcctccatcctgcctagagaggcctctctgaggccaagctgagcttgtggggtgctggtcctgtgacccagtgcatacaggcagctggggatgaggccagaggctcagggtctgtgacagcctctgtcccaggagagcctggggtcagccagtcacttgtggttttaagagtggacggcactgggccaggcgcgctggctcatgcctgtaataccagcactttgggaggccgagacgggcggatcatgaggtcaggagatagagaccatcctggctaacacggtgaaaactcgtctctactaaaaatacaaaaaattagccgggtgtggtggtgggtgcctgtagtcccagctacttgggaggctgaggcaggagaatggcgtgaacccgggaagtgcaccgagcttgcagcaagctgagatcgcgccactgcactccagcctgggcaacagagtgagactccgtctcaaaaagaaaaaaaaagagtggacggcacaaggccaggttcttgctggttcttgcatcagaagccgctgggcagcttacggctgtcaggagtggctgagagacgccagccggctaagaagaggctgccaatgcctctacagtggagtctctgagagcactaacgagagtgcctgcagattttaatgcattttgtttttagacggggtcttgctctgtcccctaggctggagtgcagtggcgcgatcacggctcactacagcctcgacctctcaggctcaagcaggcctcccacctcagtctcctgagtacctgggactgcaggcagcacatgcctggctaattattgattgattgattgattgtagatagggtccctctctgttgtccgggctaagggtccctctgtcttgcccgggctggtttagaactcctgacctcaagtgatcctcccacctcagcctcccaaagtgctgggattacaggcrtgagccaccacgcctggctggtttttatttggacgtaaaatttggaaacgaggaatatgttgccaccagaacccaaaaagaacgaaaagatactggactgcgtgtcagtaggagggtgctctccatgcacgtgggcccgcgcctctgaagaaggcctggtcagtggaggtcccggcgcagcctggaaaaggtgggctgtgtccttggaggtggcggtgaactgcggcttccaggtggctgaaacgggccctgagtggagcagaggccgtgtctgcgtgacgtgacgcacgctggccggttgctgactggggagtcgctggttgagaccctgctgggtctcagggtgtgcggcctaaggggtgatggcagcctcgagattgtgaaaacccgccgtgaggcacccgttattttttcctggtaaaagaacaggcaaaatcaggcctttgtcttctctgcttgtatctaggcagttgctgttttttcctttctcccgacccccatccttctttctgtttaggctttcatctgccctaaaccctggtttttagtttctgtctctggctgataagagggaaggaggggagggaagctgccccctagaatggcccgtctgcagcgtaatccttccttctttttttcttaaacaaaatcttggttttcgtcttaaaaatctggcttatatctcaaggtgcgtagaattttttcctctttacttcctgtccatcctgattgtattaacagcacttttttttttttttttttgagatggagtttcgctcttgttgcccaggctggagtgcagtggcgcgatcctggctcactgcagcctccacctccsgggttcaagcgattctcctgcctcagcctcccaagtagctgggactacaggcgcccgccaccattcctggctaatttttgtatttttagtggagagagggtttcaccatgttggccaggatggtctcgatctcttgacctcaggtgatctgcccacttcagcctcccaaagtgctgggattataggcgtgagccaccgcacccagcctattttctgtattcttaatgcactggccttgggcgtcttgatcctggagagatcacccctccagagcccacaggtgcctccttctcacagtcacacaaagccagtgtccctgccctcagtcaccccagggcgaggtcctggccgaccaggggctgccgagcccagggcccagggaagtcgctccaactccaatcccgtcctgatctcacctggcagtgtccaccctgcctcatttgcccttcccgcagagcccccatgaactggggctccctccactccgtggccctgtgtgctgtgcccccttctcttgggaaatgtaatgtatcttctttgcaggaagttgtctccacgtctgccaccttaccgcacctgactaaaactaagcccaggtacaaattttagaacaaaggtgtgcggcctctggaaatcagctctggaagctagaaggggccagtagctttgcctcgggagggagtgtggcgctgccaacaggtggacctgcagagggcttgtgccagcctggtccacgtcatggcactggcatagcaggtccacacagtgggacggattcacgggaagctggtagatccccttccaaggcagcacacggttttgtaaaaggtgctaagccaaaattccttaaccacaagggctcccaccccgcctccgcttcctctcttgctgggctggcactggagaggcagtgggcactttggggcccggcagggggacgtttggctgtggagacgtcagcgggtcagcggcctccaccatgcccttcccggccacttccttccagacgtcctggggtagaaacagcttccagcaacacccatggcaattaacacagaggagtgactcgcaggaacttctggaagaggaggaaagatcttgctgatttaacaggaaatgccgacatcaacgacatcgagaatgcgggaccctcacaccagcctcacgagaagccggtggatacagcttattccagagggaggcttggatcagcacctggggaaaaaaggcagcccctcaacctggccagcctgcagaggagaraagcctgagcaagcgtcctccaaatttcacaacaggctttaccatgtggatgatgtaaccagtcatcagtacatttctgtaaagcaaagcacacttttaaaaaccagccatgctagtgggcctgaggattacctttcgtcttcctctttcctctgtggaagatgatattgcaaaattgtaaaaagagacaataaaaaagtggatgaaagggtatcctagcaagctgttatgaataaaaaatctcggtattttctggattttgtgctgcttgtgctattagtcaagttttaaaacatgcttaatttattatttcttcttgcatctaattttattttattctttttatttatttatttatttttgagacagagtctcgcactgtcctccaggctggagtgcagtggcacgatcttggctcactgcaacctccgcctcccgggttcaagcaattctcctgcctcagcctcccaagtagctgggattacaggcgcccaccggcacgcccagctaattttttgtatttttagtagagacggggtttcaccatgttggccaggctggtctcgaactcctgaccttgtgattcgcctgcctcggcctcccaaagtactgggattacaggtgtgagccaccacgcccggccttatttttttctttttttgagacggaggtcttgctctgttacccaggctggagtgcagtggtgcaatctcagctcactgcatcctccgccttctgggttcaagtgtttcttctgtctcagcctcccgagcagctggaattacaggcacacaccaccacgcccggctaatttttatatttttagtagagaccgggtttagccatgttggccaggatagtctccaactcctgacctcaggccatccgcctgcctcggcctcccaaactgttgggattacaagcgtgagccaccgtgcccggccggcatctaattttataatagttattttgcattccttcttcttttttcatttttctgtcatttttttttttgagatggagtttcgctcttggtgcccaggnnnnnnnnnnnnnnnnnnnnnnnnnnnnnnnnnnnnnnnnnnnnnnnnnnnnnnnnnnnnnnnnnnnnnnnnnnnnnnnnnnnnnnnnnnnnnnnnnnnnnnnnnnnnnnnnnnnnnnnnnnnnnnnnnnnnnnnnnnnnnnnnnnnnnnnnnnnnnnnnnnnnnnnnnnnnnnnnnnnnnnnnnnnnnnnnnnnnnnnnnnnnnnnnnnnnnnnnnnnnnnnnnnnnnnnnnnnnnnnnnnnnnnncacttagccagctgtggaggcacgtgcctgtaatcccagctactcaggaggctaaggcaggagaatcgcttgaacctgggaggcagaggttgcagtgagcggagatcgcaccactgcactccagcctgggcaacaagagcaagactccgtctaaaaaaaaaaaaagacatccccattggcttcaggctgcccgaaacctgtgcaagctccagccctgtgcttacttggttctctgccttgtggcagaggttcccagagctgtggggaaagcgcccccaacaagcagctggacccacctcacacgacacccccagatcagtcttggctggctcacagatgtaaatgtaaaacgtaaaaagactcccctcccaatagggaaacctatttaagacctcaggggaggcaggtgcttaaacaggacatacgccttgtggaagggaaggcttggtcagtcggatggcaggaaaactaggaccccctaagagccgttgcatggagggtctaggcacatgtgacatgcaccggccagcccccttgctcagagatcctgcatctgcaaatacaccagcttgctgaatgtgtttaagccccagaatcaatacccaccgtgcttccgcagttactcatgcacacgctcagagtgaagaagtctaggatccggttgcatggccggctcctccgaggctgcgaggcaggaccggtcccatcctctccccagctccctgtggcggccagcagccctcggtgatccttggcctgagaaagcaccgccctgacctcggccttcatcttcgcacggcctctccctgcatgcctgtctccagatcccctttccataagggcgcctcatgctggggtgaggcccgcccttgtgaccgcaccttaacctgattttctctgtaaagactctgtctccaaacaagtcacattctgaggtgctgggggttggaatgtcaacatagaattttggggggacagttctacccataagtatggttagactttagaccctggtttcctcaggggagtggtggggggagaggccctcaccagaaccaaacatgccagtacccccatctctacttcccatcctccagagcagtaagaaacacgtttcctgtggtttaagcctccagtctgtggtcttctgtcacggcagcccacgttgaccaagacagacaggaaagggagtgggagacacaggcctggagacgtggacgggcctgcacagaagaagctgtccctctggcagacaagctccgttgtggcgggtgccgtggtccaggctgggattcaaagttgttgttttttttttttttttccaaggcagaagaatttttcttagtacagaacaaaatgaaaagtctcccatgtctacttctatccacacagacccggcaaccatccgatttctcaattttttccccacccttcccgcctttctattccacaaaaccgccattgtcatcatggcccatccccaatgagccgctggacacacctcccagacggggtcgtggccgggcagaggggctcctcacttcccagtaggggcggctgggcagaagcgcccctcacctcccggatggggcggctggccgggcagaggggctcctcacttcccagtaggggcggccgggcagaggagcccctcacctcccggacggggcggctgccgggcggagacgctcctcacttcccagacggggtggctgctggacggaggggctcctcacttctcagacagggcggttgccaggcagagggtttcctcacttctcagacggggcggccgggcagagacgctcctcacctcccagacagggttgtggccaacagaggtgctcctcacatcccagacagggcggcggggcagaggtgctccccacatctcagacgatgggcggccgggcagagacgctcctcacttcctagatgggaaggcggcggggaagaggcgctcctcgcttcctagatgggatggcggccgggcagagacgctcctcactttccagactgggcagccaggcacaggggctcctcatatcccagacgatggggggccaggcagagacgctcctcacttcccagacggggtggcggctgggcagaggctgcaatctcggcactttgggaggccaaggcaggcggctgggaggtggaggttgtagcgagccgagatcacgccacttcactccagcctgggcaccattgagcactgagtgaacgagactccgtctgcaatcccggcacctcgggaggccgaggctggcggatcactcgcggttaggagctggagaccagcccggccaacacagcaaaaccccatctccaccaaaaaaaacacgaaaaccagtcaggcgtggcggcgcgcacctgcaatggcaggcactcggcaggctgaggcaggagaatcaggcagggaggttgcagtgagccgagatggcggcagtaccgtccagctttggctcggcatcagagggagaccgtggaaggagaccgtggagggagagggagagggagagggagagggagagcggattcaaagttttaaggccccttcagcgagaagctgctggtggctttggaggacgttctaggaagtccgtggagtgtttgctggaaggatgctttgcccgccattttaattaacgtgtgcgtcagaaagcagaaagttctggcagaaatggtagatgagggttttcctttttaagatgtttttgatgctctccactgtctcctaaatggagaaaggtatgtccttaaacagtttttcctcagaagccagctgcagtttgcaccgtggttcactgccatgagcaccacgggctcagtgagccacctcctcctcatgggccacaaggctgggtcctagctctcccagggcccaggcacagggggtcttggggcctggctgagggcaggctcggggtggggtctggcacaggagacagggaatgcaggggtggtgactccgggcctcccagcataggtgggcatcaggaaaggatttctgcggagcaccctgccacagggcctctgctccggctttccgcctggacgccttcctgctgcccccaggcagccctcattcttcagggtgctgtctgtcccagagcgcagctcctggagggtgaaggttccctgaagctttggctgcattccctttaccctggggtccacccagggtcctaccccagcagctcaaccagcagcttctggacaaacagaatcctccctggttgaggactgcgtctcccccctcaccatctcaggggcctgctcctccctcctcagactgggtccccggctcaccctccattcctggaatcccctgtggtctgggtgccctcaccagcacagcccctaggacaggtctcccggctccttccctccagagtccacagcccccagcccctttcaggcgtctccccacaggcccttccctgctcttcctgccccctgagaccgcctgctgcgatggccctggagccctgccctctgcaggtccccgctcggtggcccggggtggggtcccccgcttcgcagactcctatccacagttaggcccacgggggcaaggacccagactgctgccagcggcggggaggggtgacccgcgtggacgcggctctcaaaggacaccagcgccacctgaacaagaccygtggcgcgcacgaggcaggagagctgggcgctcggcgtgaggcccgggtgggggtcgcgagcggacagccccgggccgcaggcgggtcccccgttgcagtgaggacagcggtcgggcgccgggggtcctgggcctcgggcagggccaagtctgcgcgtgcgaagaccccacggacggagccgcccaagcaccgcaaaccccgctttccgggacccactgtgggaggcccgcagcgctgcccctcgccgggggcgtcctgcgcggccgggggcctcggacagcatccgcgtctcgcgtgggaggcgcctgtctgcgcagccgcgggccgggaccccgcaggtacaacgccgcgcgtgcggcgtccggagaagtctggcccggctgcggtcaaaccgagcccacgtggaccagttccccacggctggttcgcgagcggcctccgcgcacaggccccgccccttagcaggccccgccccgcccgatcacagggcccgcccccagccccgctcatcgacggggcacggctgcgacccttagtaggccccgccccgccagcccccagatccgcccaccagcagcgccccgccccgccccgcggccccgcctgcgcagtggggcaggcgcagtcggaagcagtgtaccgggccgtggagcggcggctcctgtacccccggcgcggacctaaaggggctcgagccgctcgggccgggaatggggcggcgccgagcccggggcccgcgcctggctgggcgnnnnnnnnnnnnnnnnnnnnnnnnnnnnnnnnnnnnnnnnnnnnnnnnnnnnnnnnnnnnnnnnnnnnnnnnnnnnnnnnnnnnnnnnnnnnnnnnnnnnnnnnnnnnnnnnnnnnnnnncgcgcctggct

SEQ ID NO: 95628 - DNA, 30705 bp, Homo sapiens
  misc_feature (1)...(30705): n = A,T,C or G
caactgcctagatacaagcagagaagacaaaggcctgattttgcctgttcttttaccaggaaaaaataacgggtgcctcacggcgggttttcacaatctcgaggctgccatcaccccttaggccgcacaccctgagacccagcagggtctcaaccagcgactccccagtcagcaaccggccagcgtgcgtcacgtcacgcagacacggcctctgctccactcagggcccgtttcagccacctggaagccgcagttcaccgccacctccaaggacacagcccaccttttccaggctgcgccgggacctccactgaccaggccttcttcagaggcgcgggcccacgtgcatggagagcaccctcctactgacacgcagtccagtatcttttcgttctttttgggttctggtggcaacatattcctcgtttccaaattttacgtccaaataaaaaccagccaggcgtggtggctcaygcctgtaatcccagcactttgggaggctgaggtgggaggatcacttgaggtcaggagttctaaaccagcccgggcaagacagagggacccttagcccggacaacagagagggaccctatctacaatcaatcaatcaatcaataattagccaggcatgtgctgcctgcagtcccaggtactcaggagactgaggtgggaggcctgcttgagcctgagaggtcgaggctgtagtgagccgtgatcgcgccactgcactccagcctaggggacagagcaagaccccgtctaaaaacaaaatgcattaaaatctgcaggcactctcgttagtgctctcagagactccactgtagaggcattggcagcctcttcttagccggctggcgtctctcagccactcctgacagccgtaagctgcccagcggcttctgatgcaagaaccagcaagaacctggccttgtgccgtccactctttttttttctttttgagacggagtctcactctgttgcccaggctggagtgcagtggcgcgatctcagcttgctgcaagctcggtgcacttcccgggttcacgccattctcctgcctcagcctcccaagtagctgggactacaggcacccaccaccacacccggctaattttttgtatttttagtagagacgagttttcaccgtgttagccaggatggtctctatctcctgacctcatgatccgcccgtctcggcctcccaaagtgctggtattacaggcatgagccagcgcgcctggcccagtgccgtccactcttaaaaccacaagtgactggctgaccccaggctctcctgggacagaggctgtcacagaccctgagcctctggcctcatccccagctgcctgtatgcactgggtcacaggaccagcaccccacaagctcagcttggcctcagagaggcctctctaggcaggatggaggcaaagctgccccttgctgtcttccatctgtgggagggggcggcttcccctgtcctcggtggcttgccggatgccaagtgtgggaggaggtcacctcccgtaaacccctgggctgcctggcaagccctgtgggaccctctgagcgaagagaaatgggtgcgtgcgtgagggtacggtgctgctggccacactgctggggagcccggtggacggctgctgctccacccctgcccggacgcccccagtgaaaggcggacctggaagcaatgtgccaggcgtggtctcagccctgagggcctccgccgaccagtggcttcttccccacgtttattataagccactgggccattgcccaaaaggtgtcccctgcagggtagagacctgtgtgaatctcttgcctcacagagccccaaaatctaaatcggaatcgcacacgtctctacacacagcaaggccttcctcctggcctgtcgtggccgggtccgtgtgtctccccacacctcactgaaataaaccctggggacacattttagaacaatctttcaatctctcctgaggccgttacagcctcctctgtgtcaaacccccctccgtctcccctgtataggaacactgggattacactcagggcccactcggataactagaatcatctctacgtcttggatgcttcacggaaccatgcctgcaggcgctcgccatgtgaggcgacaggcgcgggcctggacaggacggagggcgtcttcaggaggctctcctcccctctcacttcacttttcccatacagcacctgtgccactcttgctgtaaatcctaattccccagaaatatgtgaaaccctgtaacatgattgttttatgcggttacgattcattaggtttatacacaatataccgtttctgttgcttttgttggggttcagaaaatgtcacccagagtgaaggccttggaagccaggccttctcctgcctcctgtctctggcccctcattgtcccaggcaggtcgtagaaacctaagccccttttccccaaagccagccataaacctaaaagtatgactctaataacttttctctgtctttctgtgtaaaaactggccataaaggaattctctggcctgccttgtttgactgtatgtggtcagacccctattccggggcgttgtgcccccacccagcaggarggagagctgcagagagaggcctccaggaaccgaagcagatgggcctcgctgggctcccccaggagtctgttagcctgtcaggtcttaacctttcgtccaatcctatttccagattcacagaacctgagtataaaaatgtggtttcccctgcgcctttaggtctttgctctgaaagctgctgtgtcacataaaactacaatccaagaaatctgtgtacccttttagtgaaacttcagaaaggcaggggaggttttcccttccccccgcactcttcacttcttcctctgcacctctgagctgggatttgggacatcattctttctacttgaagaacaccatttaattttgtcttttctttttgaaacagggtctcactctgttgcccaggctggagtgcagtgacgtgatcttggttcactgcagcctctgcctcccaggttaaagcaattctcctgcctcagcctcctgagtagctgggattacagacgcatgccaccacgcccggctaatttttgtatttttggtagagacagggtttcaccatgttggccaggctggtctcgaactcctgacctcaggtgatctgcccgcctcagcctcccaaagtgctgggattacaggcatgagccaccttgctcagcctagttggatttaatttgctgttaaaccaattcgttatcagctttactgagatatgatttacatacaataaaatgaagcaagttcaagtgtatcattcaataaatttttactaagtttcatgaggttttaatatttttttcaatgttttcattttgaaaaatttcaaactcacagaaaagttgcaataacagtatatagttttcacccaggttcaccaactgttaatattttgctacctttgcttttatctcagtctctgtatgtaatctaaatttattgttttgctttaatttccagagcaactttggttacaaatctattgattcttcacctctaaacccttcagcatggatcacaaatgaacaaaaaatctccattcacaaccgtgatgcaatcattgagtcgtttaataattctggagtttgacccagcgcggtggctcatgcctataatcccagcactttgggaggccgagacaggtggatcattcgaggtcaggaggtcgagaccagcctggccaggatggtaaaacgctgtctctactgaaaatacaaaaattggctgggcgtggtggctcatgcctgtaatcccagctactcaggaggctgaggcagaggttgcaatgagctgagatcgcaccactgcactccagcctggacaacagagtgagacttcgtttaaaaaaacaaaaaacaaaaacaaaaaaaattctggagtttatcattggtagaattttgttgcacaatgtacaaggcatattccaaattgtgaatgtccccatcatgcactttgtaataatttttcctgacccggatccattccagcaccgtgcagtgaggacttctgtctgtttttgttttgttttaccttcctccagggaaggtgtacttttctgtccacaggtgtcccggtgagcggctcaccttaattctctcagggcttgaggtgatttaaggctggcttcagtccccacaaagacaattctgttgctggtttacctttgcttttaggggatagaactttggggtcccaagaaaaacccaaagtctttaccaggccccccgcctgagcctcgacttctgtcctgtggccacagtgtgaggaacgaacgcagcagmgtgtcgccatgtcttgtgtggctgggatacgctgcaggggtgtggagtcgccgccccaaagcgggccccgccccctcccggcttgtccctgcagagccccgaggcctcagaggctcctcagagctcccagtgccctggacggttccgttcagcgctctccagttctgatggttgctctcaggaggcggctggtctgaaacaattcagtttccattgctgtgtcctgcaccacggtgtgggactggtggtttcttactgtttttctcagttctctgacgctttgaggaattgtttttaaagcgagttatccatcattttagttgttttctctggggtcgttggactgagggtcttaccccgctgttcctggagacagttctgtacttgcatggtttctctcgcctttccctccctttcttactttttagtttcttaatgaatttttttgtattatgtttttcctccttgctaatttggaatatatacacactatttcacttttaaatggctaatcacttttaatgcaatttcaacataagaagacctaatgttaagcaatattttaacccctctccccaaaataaaaagacccagaacactgtaactctaattatccttctcccaacttagagaggattattgtccagtattttcgttttgttagtagactgttctttttttcttttctttttttagagatggggtctcattttgtcaaccaggctggaatgtagtggtgtgatcatggcccgtctcagccttgaactcctaagctcaagcaatctcccacctcaatttcgtgggtagctgggcctcacaggcatataccatcgcatctggctaaattttttttttgtacagatggggtcttggtacatctcccaggccgatttcaaactccaggcctcaagtgatcctcccgtgttggcctgcaattccaaagtgctgggattgcaggtgtgagccaccgcaccaagcctgttctttccattattatttttatacaatgtttgcttggattcacacatgcatacatggactacacatgtactacagttgtcccatggtatcctcggggtattggttccaggaccctcccagataccaaaatttgcaggtgctcaagtacttgatataaaatggcacagtatttgcacattacctacgcacatcctactgtgtagtttaaatcaagattacttatagtccctaaaacaatgtaaatgctctgtaaatagctgttatactgtattgttttaaaatatgtattatttcgtattgctttggctttaaaacaatattttcagtctgcttggttgaatccatggatctgaagccaagtgtaaggagggcccagtgtgctcttctggggtaattctccttcctgctaaagcgcacgctttactcaggaggctggggtgagaaaatcgctgaagccccggagatggaggttgcagtgagctgagatcgcgccactgcacctcagcctgggcgacaaagcaagactctgtctcaaaaacacacaaaaacagagaaaaacaagacagtaatggctcaactcacatagcaccaacgggcgaagcgttcttctgagcgctttccgagtcatcggtcctcagagcagcccctgaggcccgcaaggaagcggggctccaagccctgccgtgctcccggctccccgaggctccccgaggccacccaacccctcccacccggccatcgccccctcaccaaggccccgccccgcggcggcggtcacatggggtgcgcgcccagactccgacccggaggcggaaccggcagtgcagcccgaagccccgcagtccccgagcacgcgtggccatrcgtcccctgcgcccccgcgcmgcgctgctggcgctcctggcctcgctcctggccgcrcccccggtggccccggccgaggccccgcacctggtgcaggtggacgcggcccgcgcgctgtggcccctgcggcgcttctggaggagcacagrcttctggtgagcgctccgcggcctccgggaccccctggccgcacggggagagctcgggcgccccctgactgcgcactgtgagagcttcagagaccggagctccctcctctggggccctggctctcccgggcccgccccccgccgtgtttgtgggtgggtcctccacctgagtgggcgccggggcgtgagcctgggccgccccctgcagcccaggccgatgcccgggatcctgctctttgaggtaaaccaggagtctcccctgggagtggacggccctgcagcgggacctggcctgcctgtcccattccttccacctagagctgaggtacccgccttcctggcagggccagggccagggctggcgttggcccctcgtcttactgctgctgccgttccccatgaagatgggacctccccacattcctggccctaagggtcattttattagtcactgaacgcacgggcagcgcctggatcctgcgcccgggcagtcctgggcttgaacgtgtgtgtcagccgcgctgccagccatgctgaggctcgggactgagccgcccctttgttgtccccagmcccccgctgccacacagcyaggctgaccagtacgtcctcagctgggacyagcagctcaacctcvcctatgtgggcgycgtccctcmccgcggcatcaagcaggtccggacccactggctgctggagcttgtcaccaccaggtgggcggcgggcagggtctgggcgtcccagagccccttacagaggcacagatgggaggggagggctgggggctgctcggaagaccccttgttcccccacctcccgccgaagcaccctgttggggagagcgtgtccttgctggctgtgctggggtgagggctgtgtgctggagggagcccctgcatggggcacggtgggcttcctgcaggtctccctgcaggctcagggttggctgcgccgcacctggctcctggtgcacccgtgagcatccctgtgtgtgtctgctggccaggctgggtagggccactgcacctgagggctgagctgaggtctcatcggtcacagcaccctgggccctgacgctggtgcaggtggccaccctgtgagggggaggcacgaggtgtgaggggcacttgggtgtgtggggccttctggaaacacagagaccctcgtgcacttggccagagccgctggctcctaccagcagggtgggcaccgggcaggcctgggcatagggagtcctcttggcaccttggaggctgcatgatggcgggggacccttgttcaaataagatgtcaaccctgagcgtcaggtcaggcccatccctyctgagctgagggacggtgcattggggcccagccagcactgtgggccagcctgtctcggaggcagaggttcttgatttctgagtgtttgggtcctgcgtgtgatcagagggcctcctttcccagttggggttccccggtttccccagggcagctgtggcacaagagtgcagctcttgggtggctcctccctgggaagggtctcagcagtggcttgcagacgtctgctgtgggtccccaggagggagcagaggctgctgggcaggcctggccctgctacagatgggcatcggtggcctccagctccctgtggcgggctcgtgctgtctgcacggcatcgtgcacactgaggaacagctgctcctcctcagccgtgtccccggggccctccccgaggaagcctcctctgctcagaatgtctctcacaggcgggctgcagcaggctagcagcaggctgatgcccagggccccgtagtctcggcgcaggtcctgcagcgtgctcacaccrgctgcgtctaggaacagcagcggggcgcagtcgatgaccactgtgtggaagccggccgctgcgggcaccagcgcagccctggtgctaaccgggcccaggtcctcgccctgggcagggcctccctcaccgacccccgtctctgagcccccctccttcctcctsgcagccatgcaccctgcgtccagccccgtgaggctrtagagtgacygcaggaagaagtccttgttggcatagtacagcggccccccaaagcggaacacccgcacgccgggctcagggacgaggccctcgaactctgtggcatcctcgtagaaggccgtgtccccgatgcgggccagcagggcggtgcgtgggcgttgggtgcggccggccaggctgagcagcgagaggatgacgccagccagcagcccggcctctgtgctgaccagcatacaggtggccgcggtgcctgcccagaccagcgcgtcagccgggctcatccgccacagccgcgggaggtcccacaccttgcgcagggccccccgcaggctgaccacgatgacgcaggccagcacgcttcgctgtaggtcgtggaacagcggtgccagcgccagcagcaccagcagcaccacggtggcgctgaccacgctggacagctgtgtccggcagccagtggctgtcttcaccaggctcttggccagggcggcgctggtggcgaagcagtggaggaaggcgggtagcacgttgcagcagcccacagccagcagctcctggttggcacgcacagagtagcygtgactgcgggcgaacatctccgccagcgagatggagaaggcggcagccacgagggccagggccacggcatccaaagccacacgctgcatcagcctgggctctgggacctgagggggcatgaaacccgtggggatgtcgccagccacgctcgagccaaagcgcttgtggagctgcccgaagtgygacacgagtgtggccaccacgatgaccagcagctccgtgggcagcggcaccctcaggcggtgtcggtagcggtctgagagctccttcgcggctagcagcaccgccaggcacaccgtgctggtgaccacgtcgcacacgttggcctgcccggcgccgcgcagcaggctcagccatgtgaggaccaccatgccgggcccctggtgccgcgggatccgcacgcccagcaggtgtttgagctgcgaggtcaggatggtcacggaggcccccatggcaaagccatcgagcagtggctgtgagaggtaggcggacacgaagcccagccggaggacgcccatgaggacctgtggacggagtgcggtcaggccagcaggcgcctggcgggagccacctgcccctcaccagcacctggcatggcccgaggggtggtggtcacggcacaggacctgacaattctgtgttgcggccccgtgtgttccaaaccagactcctcacacgggcctgagttctggttccacgcgtgctcatgcccgcagacaactgtgacatccacgtgagcatcacacgtgcacacagctggccatagacacgtctaacccttgtcacgtgcagcagcccgttttatttcagaattaagacctctggtatcagaaggcaaccccttcctgctgcttcctacacatggtgcccactgccccccatgcagatgtggagccaacgggggccaaggtggacaggccaaggcaggagaccttcgggggtggggaggccatcccccactccacctaggacagaaggcctgggaggccacatggcctcagtccagcaccactgagccacagccacacctggcctgctggtccccaccaaggccatggcccaccggactggctccccgtgcccctcccctcctgcatccacagcctctccgcgtcggtgcctcgccctgggatgccccggcacgccccagctctgcccaagccttgctgtcttgggccagcacctcctctgccaaccctgkgcttgcccccagccttgccctcgtggatggccaaaacctaagsgggggtgccctgggcccctccctgtgcccaagcagggctcctcacctggtaaagcccggtcatcagcgtgagggcggtggcgacacgratggcgtagcagtcacgcccgcagtccagcatggcagccgagccgttgagggtgctgctgttggctccgggctgcaggccgtcctgggaggggtcaaagccggccagctggagctcccggtccaccacctgccccaccatgaggcaaagcaggctgaagatgcccacggagacatgccgtgaggtgcccatgaggaagtagatgaggttggcgaagaaggacgtatagaggctgtagatgggctgcagcccggccagcaatgagtaggcgatggcctgcggcaccaggatgatgccgatgaccagcccagacatgacgtcgcctgccaggtactcccgcgggcggtactgacgcagccagcgygtggcggggagcaggtcctgcaccagcgcccggacgcacagcacactgcaygagcagctgcaccacagcctggccttcagcatctcacgcagacccyggggtgctgggcgctgccgtcggaccggcaccggccctctgccctgctgcagaggctcaggggactcgtccatcctgttgcgtcaggtcccgtggccgacctgcggccgagaagagggcatggtcacaggagcccccggatccagggccaaacgacaaggtccccggcagcaacgggccccttggggcggacccctcgcccacccagggccggggattggtgctgggccttctcctggcagcgcgggccccagccccctgcccggtatggatggacgctgggccctgctggatccagaatccatcgtgrggtgagatgggattacgacaccaagcccatgccatggggtgtgctgaggccagcagtgctgaggggcggcgtggcggcaccctgtccaggctcagctccggcctattggctctgcggttcctggctgaraaccaccctgtagcctcctgaagctcacctccccaacggggcaggaacaggctgggctgccaccacgcacatgtgcctaccgtcagaatgtcacagtcactggacacaggtgcaggcaagcctgagtccagctgctccgtgtccacctccctggctccccaggttggcaaacggtcctgctgtccaccccatgcccacaccagagccctccctcccccatccaaaccatcgcctgctctcctggagacacctccacccacccctctgtcacctgccctgtgggtcctggggctggcggaagtctcaggaagaggcctcctatgtccctgccaagctttgtgggtactgggaccccaagtctgctgggggagcagcactcagacactagcctagcccatccgcctggacttgggacagaattctgagaatatgcctggacgggggccccatcagggccagctgggaggggaggagggtgactggcgtctgtctcccctgcccagacagttctgggacgtgaggcgccctttttcccaggctgcaccagctcactgtggaacggccatgacacactgtcccgaggcagcaccgagagggcccagcccgctgcacacagtcaccctgggccggcagagccggaagggcacctgacctttcccttgatctcggaaaacaccgtggcgttagggaggcggtgcttagaggcctgactggtcccacgtgaggcctcgggtctgtcctgtttgcagactccaatgtactttcactttaaacattcttctcagcgacgttaggcaaagactttgctcccaggacaccaggtgcccaggacaccctggagcctgggctgagcctgctgtttgcacgctggcccagggtgtgcgagctccagtctcctggcgggtgtgttggggcagtgagcccagcctggtaggttgacacatgcaggctgggcacagcacccctggggcacagagcgggggtcctggccctcaggcaacattgcaagagttgtgtccccttccctggaagaccccaccacactgggtccctggatgccctgaagcccaccccaagcccctggggtccaggtgtgtggaatggggacagtagggccacctgccttgagcctgagggtgcccctaagaaaccacgagtccagggcatttctggcctcggctcccacgcccccctctgctgcagctgagatctgggcccaggatggttcttacctgagggagtcctcacaggcgcggagggccctgggatgacgaggggctggcaagaccaccgaggaccgcagggccctctggctcccgcgagcagcggggagagtgggggtggtggcgccaayctgcaggcagtggtctgtgccctggactctgtagttcaattatttacctacagattgctgagtcaygggtttctccagccatgttacctgatcggctgatccgggagttgaactgtaatcaggggcttgtagkagttagagctgtgtgggcctctgaggagctcccagcctcccaggagcsgctgcagctgtggctctgcggccctgccggsggggcttagggaccagcgggaggcgggggctcaggggctgagcacaggtaaaccttcagctctggggtctggggtcgagtgcagcagccttcaaacccaggcggggctgagggaggcttggtctccgtgtcsagtcgccggacaccctcctggtcctgcaaggagccagcctggtccaagctggagcagggcagaggctgacagccggctcagcccaaggctgccggtgcgtgcatatgcstgtgtgctcrcgtaagccctgtgtgtggtgctcaccgcccrgggcgaggactgccggggtcaaggtgccgtgactggccaggagtcctggtctgactggacccagcaccgacccacagcgcctggtcaccctcacrgctcctctgccctcccctctaccacagaccaggaccggcagtgcctgcctcatagggctggggtgaagataaatgatttttttaagtgaactaaattaggcccacacgtgaaaataagggtaagctgctttttaaaaggaattattagccaggcacgatggttcactcctgtaattccaacactttgggaggcctagacaggaggatcgcttaaggccagcagttcaagaccagcctggtcaacatagtgagacgccccccaccttttctttttttttttttgaggcggagtcttgctctgtcacccaggccggaatgcagtggtgtgatctcggctcactggaagctctgcctcctgggttcacgccattctcctgcctcagcctcctgagtagctgggactacaggcgcccgccaccgcgcccggctaatttttttttttttgagacggagtttcgctctgttgcccaggctggagtacagtggcatgatctcggctcactgcaagctctgtctcccgggttcaagtgattctcctgcctcagcctcccgagtagctgggactacaggcacccgccaccacgcccggctaattttttgtatttttagtagagacggggtttcaccatgttagccaggatggtcttgatctcctgacctcgtgatccacccacctcggcctcccaaagtgctgggattacaggcttgagccactgcacccggccgccccctgccccccaacctttaaaaaattaaaagtaaaaaattagctgggtgtggtggtgtgtgcctgtatcccagctactcaagcggctcaggtgggagcatggcttgagcccaggagtttgaggctgccatgaggtatgattaggccactgcaccctatcctaggccacagagcaagagcccgtctcaaaaacaaacgctgtcattggcccagcactttgggaagctaaggtaggaggattgcttgagccctggaggtccaggctgcagtgaggtatgtttgtagcgcttcactccagcctacaagtcttttttttttttttttgagatggagtctcgctctgttgcccaggctggagtgcagtggcacaatctcggctcactgcagcctctgcctcccgggttcaagcgattctcctgcctcagccgcctgagtagttgggactacaggcgtgtgccaccacgcccggctaatttttgtatttttagtagagayrgggtttcactatgttggtcargctagtcttgaactcctgaccttgtgatccacccgcctcggcctcccaaagtgctgggattacaggcgtgagccaccgtgcccggccagttctgtctcaaaaaaaaaaaaaaaattcctygggagcctcaggtccccccgactttgacagtgagtactgggtgggagcctgcacggggcacctgtggccggagggtgagtgtaacgaggggctgcagccctcagtgctctcccatcccaagggaggccaggaggctgcggtgggtccctcgggtggggctggaaggccaacccggccctggcaccttgggcagcctgactctgtccggggaacagaagccacaggctctacttctcctgtccatgtgggattgaagccgagggtctcgcagaaccagctgatgtgccggggctccatttccccaagacgaggacactgacattgatggggcacagccccggagggaggagaccctggacactcaccccaccaaaggtacctcctygtggaagccgtctgccaagcgctgctagttccccacagccctgggtgagcccagggaagactgggctgcagtgcccccatttggaggtgaaatgggagtggaatgtagttgggatggccagagagtaggagacatcctaagtgtgagatgtggacagggctgaaygctccagggtctcgtaccccagagtgtgagatgcgggcagggctgaacgctctggggtctcgtacccctgagtgtgagattcgggcagagctgaacaggctccagggtctcatacccccatagcctccacctgggatgccctctccaagtctgatttctcctcgaagcccctgccctgtcctccagagtctgagcccttgcttccaccccagcccaacctgggccccagtggtccctgggaagcagctgtttgctcagcagttgggagctgtgctgtaagaagcggttggccagtgggtggggtaaggcagtcacgcagggcctcaggtccctccctgggacagataagggcccctctgggtgcagccaccagcagggttgttggagaactggggagacccagggggctggggttgttccctcaaggtctccctaaaggaggcagggaggacctgggtgctacagcaggggtggggcacctggtgcagacgcctgcatgcagggtggggtgggcagtgccacctggggccacagaaaaacctggagtgggaggtggcccttcccccctcaggaaaggtggtggaggtttccagaggctggcttatggggacctgtggtgaggttttaggcaggtgagcgtagttcaggaacagcctcagccgcactgcaggggcctggcctcaggtcttctgcaggcattgggccttatgcccttttagtccccacctaggctgggtgtctaaagtaggtgaggtcatcactgcaggatccttggggcctgacctgccccctcccacgtgtctctgcctcagtttctctgagcattgaggcagtggctggtgctgtcctgtggccaggcccagaggctgagtgcccagggggtccaggggccttgctggccagagagagtgggtagcccattctaccccgagcctgtgcacgcgcagggctgccaacacctccttccttccccgcttggcccacgcaggacagggggcgtgggggccccagcaactgggacctgcctgaatccgcctccctcctgaacccccctcccgcctgaacccctggccagtcttgtgtcacacgcttacttccttagttttgtctttaaatcagccgttttacattggagtccatttactgggaaaggagaccttgcatccttgcctcccacccgtgggaagaagcccggccgacagggctttgagaccggacccgagtttattcccagagaccctcccgcgggtgggcgagctccgaggtctggagaagaggaggccccggcccgcaccctctagcacctgtgtccccttcgtcccggccacagatgcaggttctcccaagaggcgggtctgtacccgccccgcgcccccagcccagcgggcccggcctccgcccctgccccgcactcccacccccaccctcaggagagcgcggccctgctccccaccccgcgcggtctccccccaccgcctgcgaacccccatgcacgcgcggccccgccccgcgcactcaccaggcccggcagccgcgcggtcttagcggctcacgcgctcgggcccaggggcggggacgtggggacccgggcggccgctcagccgcggccgcgcggtgaatgagcccgttgtgcggccgccgcggccccagcgacaccccgcgcggggtctacaagggctgacgcgcccccgcggcttccgttcccgggctgggcggtggctcgtctgcgtctccggccctgggggtgggctgcgcgctccatctcgccggcccagtcccctccccagcgtcggtctctcaaggcccctcccaatgggggccaggcggagggtgggccctcgggcctgtggactgaccccggggttcctgggcctgggggcggggatccctgtcccgggctcccctcgctgcgaggctggccctgccagatgacactcagaggcgccttgggtgtcaggccagggacatctctgatgctggggctccccccgctagggtcaggggctgccgggctatcgccttggggttctgcagagaaaacctgaagcccagctgggtcttcactttcctccaggtcaccgtgccccgctactccaactccgtgggactttggaatgcaccttctgggcatttaattcttatccaagtgcctcttaagttatacttctttgctaccagtgtgtcctttggatggaggggaggagaggtggtaggggccgggtggggtggaccccagggactcctgctgctcctgctggacacccagcccggggtacaggagcaggtggggaccagcagaggcggggcggagcaggagcccacacccaaaggctgtagactcctgccaaggctctgccttgatcttgtacaccatgggaggaccagaagggaggcgttgaggtgtccagacctttgctgtggagctgggggtgctgtggcatggggagactgacagacggggagctgtatagggccagattccggtccatggtggtaaccccatcccccaccactgcagatgcrgcacaaagccagctgccacaggaggtgcactgccccacgggcagctgtgctcacctgcgtggcgtccgcaggaagccctcagaccctggccagcctggtctctgcttctcactccaggctcaaggctggctgctattccattcaccccattccctttccctcaggccagaagcatcactcacaactccagacccttgcacaccaatctcctcactcagttcaccctcagatgtccaactccacrtggccaaaaccgagaccagtctcactccaagctcatccacccgcctagctgcccaagctgaaatccacagttgccctgtacgaccccccgaccccccacctcaccccccagctcacctcaaacctcatcagtccctctgctcacagcctgcacagccaccacccagtctgggcaccatacctctctgggcaacccccatgrcccccagccagtcttccagctcccaccctgactccagtgagctgccagagggatccttgaaaaatgctctggaagccaaggcgggcggatcacgaggtcaggaaatggaaaccatcctggctaacatggtgaaacyccgtctctactaaaaatacaaaaaaattagccgggcgtggtggcgggcgcctgtagtcccagctactcaggaggctgaggcaggagaatggtgtgaacccgggagggggagcttgcagtgagccgagatcgcgccactgcaccccaggctgggcaacagagtgagactctgtctcaaaaaaaaaaaaaagaaaaaagaaaaatgccctggcactgctcagctcagaaccttgaaagggatccttgtttcgctctgggtcagggtcccatcctcaaagcagtcacttccagagccccatggagcctcatatcccatgatatccacccttattctgtctcaggcccaccagctgcctccctgctgcctgattgtcatgtgtgcattcctgttccagagcctttgcactggcgatgccatctgctgcctggatgtcttcctgctggctggtcccgttgcatggtagccttaggtgtctcctcagagaggtccctcgctgaccatcaggctcctcactccctgtcgtatccccttcaccaaagattcccattccctgacgacgcctgtcccctcrgaatgcaggcctcgtgggaattcagcccatcygcaagtgcagtggcagggcggcccccttcycccttgasgacgcctgtcccctygkaatgcaggcctcgtgggaattcagcccatctgcaagtgcagtggcagggcggcccccttctcccttgaggacgcctgtcccctcgtaatgcaggcctcgtgggaattcagcccatctgcaagtgcagtggcagggcggcccccttctcccttgaggacgcctgtcccctcggaatgcaggcctcgtgggaattcagccccatctgcaagtgcagtggcagggcggcccccttctcccttgacgacgcctgtcccctcggaatgcaggcctcrtgggaattcagccccatcggcaagtgcagtggcagggcggcccccttcacccttgacgacgcctgtcccctcggaatgcaggcctcatgggaattcagcccatctgcaagtgcagtggcagggtggcccccttctccctttcctgtgcactcatgttgcctcttggggtgtgggaggggaaatggggcactcctgggcctccaggaggtgcagagaaccagggtgaggtgtccaccaggtcctgcctggctcctgacccctggcccctgctgctcgcgactggcctgcctcgtgccactgagcctcagagccattccgaayccccaccccaagttttccatctcttgatggtgtagggttggggggtctccatgtacagatactctagttcataccaggccttcatagggttattttccaaggggaagggcccctcgggaagccgggatcggagtcctgtgtggcaccttgcaggctcccacatgctccgttgtggccacggttccagcctggagcatggagytgtgtgggcaccctgcttcctgacgctgaccgtccttctgcagggggtccactggacrgggcctgagctacaacttcacccacctggacgggtacytggaccttctcagggagaaccagctcctcccaggtgagctgtgggctctgccctcccagcccgcctgcacccccttgccctgcccaccctctccctcacccagcccctctgagtccttggatgtccattcagggctggccttggtgccggagcacaggcctggcagagcatgggtgtggtgtgtggtgggcggtggggcagccctcctgtgttccagggtttgagctgatgggcagcgcctcgggccacttcactgactttgaggacaagcagcaggtgtttgagtggaaggacttggtctccagcctggmcaggagatacatcggtgggcgagcgcaggccctggggccctggccggggcgggggtactcctgggcaggttgcacccctatcacgcaggctgctgcctggtcaggagatacattggtgggcaggcgcaggcccttgtggggggatgggggtgacaagggataggttggtggtcggcgcaggccctggggccccaggctggggggtactcctgggcttggtgggtgggcgaaggccctgggcccctggggtggggggtactcctgggcaggctgcacccctatcacccaggccgcacccctatcacccaggccgccgcccaggtcttggacccccttgagccagsgcttcctgatgtggggcgggaggctggcctgcatggagatggggttcatcttgagtcagacgcccttcatcaccttgcaccctccctccgtgggagtcactgaggcgagattcacctgtgctggggggacagcaaggctcctctgcaggtaggtamggactggcgcatgtttccaagtggaacttcgagacgtggaaygagccagaccaccacgactttgacaacgtctccatgaccatgcaaggtgtgcaccgcttcctggggtcctgcccggctgaaagggggcagaggaaggcaggagcagaggctaagccsctcatccccagggcaggtgtagacgcagtgctccccyggcccagrcttcctgaactactacgatgcctgctcggagggtctgcgcgccgccagccccgccctgcggcygggaggccccggcgactccttccacaccccaccgcgatccccgctgagctggggcctcctgcgccrctgccacgacggtaccaacttcttcactggggaggcgggcgtgcggctggactacatctccctccacaggaaggtgcgccctgcccctccgtccgccccggtgttctgcgccctcagccgctgtgccccgggccgcgctgaccctggtggtgctgaggcggccccgcccgcagggtgcgcgcagctccatctccatcctggagcaggagaaggtcgtcgcgcagcagatccggcagctcttccccaagttcgcggacacccccatttacaacgacgagrcggacccgctggtgggctggtccctgccayagccgtggagggcsgacgtgacctacgyggccatggtggtgaaggtgggccggcccaacgccctgcgcgccccccggccaccttcctcccgrgacgggacaggcgascggtggccgcgccacccggtcccagctgccctggacacccgcaggtcatcscgcagcatcagaacctgctactggccaacaccacctccgccttcccctavgcgctcckgagcaacdacaatgccttcctgagctaccacccgcaccccttcrcgcagcgcaygctcmccgcgcgcttccaggtcaacaacacccgcccgccgcacgtgcrgctgttgcrcaagccggtgctcacggccatggggctgctggcgctgctgggtgagccggggccgctggggtgggccggccagggccctccaggctggggagcggctcctgcgaaggccccgctgcggggagcgcacttcctccagccgcgcgcttcccggggtcggcctccgcgtggcggggcctggggactccttcaccaaggggagggggagcgagtggtgggaggcccggccctgggtcggggggcggctgggcaacgaccccacgcggcgacggcccccccccgccccgcagatgaggagyagctctrggcckaagtgtcgcaggccgggaccgtcctggacagcaaccacacggtgggcgtcctggccagcgcccaccgcccccagggcccggccgacgcctggcgcgccgcggtgctgatctacgcgagcgacgacacccgcgcccaccccaaccgcagcgtcgcggtgaccctgcggctgcgcggggtgccccccggcccgggtaagccggggttccagggaggtctctggccccgctggggctctggagggggcggcccggggagccgaggcctgagtgtcaggccccgcaagcctggtctacgtcacgcgctacctggacaacgggctctgcagccccgaaggcgagtggcggcsccygggccsgcccgtcttccccacggcagagcagttccggcgcaygcgcgcggctgaggtaggtgggccgcggaggggcgaggggccgggccgggccggggtcccgggggggtggggtccggggcgggggctccgaggcggtgtgggtgggaggtggagcggtgggccgggggcgttcgccctgaggtcgggccgagcgtccccagcycccctggagaaccctgaggaccggccactgcgcccaggacccggtggccgcggcgccccgccccttacccgccggcggccgcctgaccctgcgccccgcgctgcggctgcbgtcgcttttgctggtgcacgtgtgtgcgcgccccgagaagccgcccgggcaggcaagtggcagtcccctaacccgcgccgcggcccggactccccttccccgacgccatcacagcccttccctcccccaggtcacgcggctccgcgccctgcccctgacccaagggcagctggttctggtctggtcggatgaacacgtgggctccaagtgcgtgagtggggccgcccctccctctgcctggtcctaggcaggtccctgggtcccgaccccttcacccakgckgtcactcgggccacttgccgtggcccatcggctccctccctcgccgccctgcgtccctgcccttcaccccacacactgtgggccacgcgccaggccctgccagtggggtgtgggttctcctaggggacatgagatggacattcgggctccagccctctcctgcctgggcaggaagagtgcccaggggctggggaggtgccgccgaggggcttgagggaatgaggctgtgggtccacgcggccgtgccctgcctgctcccacctttgaggactgtcttgaccccagccttgttcttggcctgacctccccaggtgcctgtggacatacgagatccagttctctcaggacggtaaggcgtacaccccggtcagcaggaagccatcgaccttcaacctctttgtgttcagcccaggtgcgcccaccacccgctgccctggactcggccaccccattcttgggcctcagggcagtactgggtgggggcctcgagaagcctggggtcagggggctttcgggtgggggcaggttccggttggcacacatgtccccttgtctccagacacaggtgctgtctctggctcctaccgagttcgarccctggactacygggccygaccaggccccttctyggaccctgtgccgtacctggaggtccctgtgccaagagggcccccatccccgggcaatccakgagcctgtgctgagccccagtgggttgcacctccaccggcagtcagcgagctggggctgcmctgtgcccatgctgccctcccatcaccccctttgcaatatatttttatattttattattttcttttatatcttggtaccaacgccccctttaaagcggctttgcacaggtcagtctcgggttgaggctctgtggcttggccctgggcacattccagggcagcctccaagggtaaaccccggtggctgatgaggacccagctggagcgaggcctctttccccctcgctcccactcagaccacccccaagcctggactggaagtgtgttgagcccctgggtcaggctggcgagccagctcggccctgcccacccaggggtttccgagatcacccctggtgaggcggcgtgccagtcccttgctttcttacttgttctgcagagcggggagctgaggctgcatgagggaagactcccgtaccccagcacggtggagggtgggatggggtcacgcctgtgcgacccaggaggtggccagcagaaggaaacagtagtgtccaccatggtctgcgtctccccaccacggattgtcttggctccggatttgagacatggcagggccagatgaggacaacttgatgacagtttacagagatggaggcagggtgccaggaagccacgggggagcccccagggcactcagcagtccaggcagggctgggcgtcctggcaaggagcagggaccttctgcccaggggtgtggccagcctgtgggtgctgtgtgcaggaccccaggaaccaaggccgcagtctcttccctcgctccagcatcctcccaaggccacccttggctgcactcagccagagagctggggcacagggaccccacaggtttccctggaggctgtcaggggctccggtgggggcggggggtgagcccgctgggttcactgcacctcccaaagcccatgtgccctgcctgccccaaccaaagtgggcctccaaggtgctggggtgggacagagacccacgagggaccctcccctcactcctggacctgggtgttgtggcttttggcaaaaatagccacatacactccaagtttccccctcagctgggattcctggtgtgagcctggtcaccagggtggtaggacagaccctcctctggaggcaaagtgacggtcagcagggggttctgaggccccacagcgctggcaccagtcttggctgaatggcaaagctgcatctgtctccttccccatgagcttccgttgccgtctccttccctggcggccatcagcttactgacgtgtcctcaccagcttactgaggcgtccccaccctccggtcttgctcctggggtcactttggccttcgctgtgaatgggtcaggcttgaggccatgccaagagccagggaagccagcactggccgtcagctcacacacagcctctgagatggagtctcgctctgtcacccaggctggagtgcagtggcgtgatctcggctcactggaagctccgcctcccaggttcacgccattctcctgcctcagcctcctgagtagctgggaatacaggcgcccaccaccacacccggtaatttttttttgtacttttagtagagacggggtttcactgtgttagccaggatggtctcaatctcctgacctcgtgatccgcccgcctcggcctcccagagtgctgggattacaggcgtgagccaccgtgcccagcctcttttttctttttgagacagaatctcactctgtcacccaggctagagtacagtggcgcgatctcggctcgctgcaacctctgcctcccaggttcaagcgattcttctgcctcagccccccgagtagctgggactacaggcgcccaccaccacgcccagctaatttttgtatttttagtagagatggggtttcactacattgtccaggctggtctcgaactcctgacctcatgatctatccgcctcagcctcccaaagtgctgggattacaggcgtgagacactgcaccccgcctactatacatttttaacttgtgactaacttcaggtgatatcatataacctcatacgtagtcaaagaaccttacaacattacatttccatttttctctttcagccattgtgctattgttgttacatattttgatttctcatatgatataaaccccacaatacattatttttacgttaatcagatgattatcaaggcaagtggatcacctgaggtcaggagttcaagaccagcctggccaatgtggtgaaaccccgcctctactaaaaattcaaaacttagccaggtgtgctggagcatgcctgtaatcccagctacttgggaggctgaagcaggagaatcgcttgaacctgggaggcggcggttgcagtgagtcgagatcctgccactgcagtccagtctgggcgacagagtgagactctgactcaaaaaagaaaaacactctttatactcactcatttagttgccgtttctggtgttcctcatttctttgtgtagattcagttttccattgggtatgaccttccttctgcttgagggacagcttagacactcctgcaggtgattctttcgctctgctcgatctaaaaacagctttattatttcccaacctctgtctcctctcctttggggactccaattatacccatgtttcaccacctgaaggtgaaccacagttcactgatgctctttccatttttctagtcatttttctccgtttcatttggacagtttgtattgctatgttttcaagttcactgatcctttttttgagacggagtcttgctctgtcacccaggctggagtgcagtggtgtgatctgggctcactgcaaccttcgcctcttgggttcaagtgattctgctgtctcagcctcctgagtagctgggactacaggaacacgccaccacacccagctaagttttctatttttagtagagatggggtttcaccatgttggccaggctggtcttgaactcctgacctcaggtgatccacctgccttggtctcccaaagtgctgggattataggtgtgagccacggcgcccagccacactgatcctttcttttgcagtgttccattaatcccatctcgtgtattatttctctgacactacttttcatccccagaagtacgatttgaggcttttttccccgtctttacttaacatattgtctttcctttcctccagcatcttgaacatatggaacatggtcacagcataagcatgtgtgtgctgtcctctacttgccctgtcacctccagcatcttgaacatatggaacatggtcacagcataagcatgtgtgtgctgtcctctacttgccctgtcacctccagcatcttgaacatatggaacatggtcacagcataagcatgtgtgtgctgtcctctacttgccctgtcacctccagcatcttgaacatatggaacatggtcacagcataagcatgtgtgtgctctcctctacttgccctgtcacctttgtcatttccaggtcagttactacaacctccacctcccggattcaagcgattctcctgcctcagccttctgagtaactggggctacaggttgcctgccaccatgcctggctagtttttttatttttagtagagatggggtttcaccatgttgtccaggctggttgtgaacttctggtctgaagtgattcgccctcctcggcctcccagagtgctgggattacaggcgtgagccactgtgcccggccccaggtcaattttgattgatttttcccatctctccatatgggtcataatgtcctgcctcttttcatgcctgtttttttgttttttgtttttcccggatattcaatattttgtattctaccttgtttggtgctggatatttttgtaaacctatacatatctttgcatttgtttctcgaatgtgattaagttacttggaaactgtgtggtccttttttttcaggcagggtctcactgtgtcgcacgggctggagtgtagtggtgtgatcttggctctctgcagtctcggccccctgggctcaagtgattctcccacctcagcctccccaatagctggggccacaggcacgcatcaccacattggcgactttttggatttttgtagagatggggtttcaccgtgttgctcaggctagtctcgacctcctgggctcaactggtctgcctgccttggcttcccaaagttctgggattacaggtgtgagcccccacatctggctctgggtcttgttattcagtggtgtttggtgggacctgaactgtatttagtctcgtgttgatgcttccctactacggggtgagaacttcttcctgctctaacgatgcttccccactctggctgctgagcacaggcactattcccagccctgcatgggctctgatcctgggtgggtctttccctggccttgagtgttttcttcacgctcctgcactgatctgtgcttagctgaagcctccaggcagaccctctgtgggtgtctgggcttctcggtgcagccccctcctctccagcactctggagcacctgtgaactccagcccctgcctggccacctctgtcttcccagttgagggagacgccggtggctgcctgggttttctctgcaccggcctgggcagtgggcgggacwgtcctcgctgccgggtcgcttcccctctctccagcaccacggtcctcggtttcgtgagcccagtgccttacgtgctgttttcacacctatttttttggttgctgcagctgagagtgtgtaagtcactgttactgcatctccattctctgccaagcctcctccacccgcctgtccttgtcagtccctacacctgctgttcctgagatgccgcctctgtgaggcctgcccggctctcccccagtcctgcctcttctgccccggggcaggtgctgtcgcgggcaagcgaggatccgtgctagcgaacctgcgcgcctggggctcaccggggctgggtaggtggctacaagaacctgtcttcccgcggtcaccccatggggttggctgaggatggggcctgagaccccgagggtggctgaccgccccgtttcagttttaaggggcaggacgtgcttgcgccggcccctcggctccgcgctgcctgacccgaacggcgtgggagcggggagggcccagtccctgttccgggggtgggcgaggggcggggggctgcctgaggacggggcctgggcggccgcgggctgggacgtggcgggcggggcggggcggggcggggcggggcggggcgaggagacgaggaaaaacgcctcgggagctgccgcgccgcggccgcgccaccgccagagggcagcgcgttgcggccggggaggcccgtatacctgtcggcggnnnnnnnnnnnnnnnnnnnnnnnnnnnnnnnnnnnnnnnnnnnnnnnnnnnnnnnnnnnnnnnnnnnnnnnnnnnnnnnnnnnnnnnnnnnnnnnnnnnnnnnnnnnnnnnnnnnnnnnnnnnnnnnnnnnnnnnnnnnnnnnnnnnnnnnnnnnnnnnnnnnnnnnnnnnnnnnnnnnnnnnnnnnnnnnnnnnnnnnnnnnnnnnnnnnnnnnnnnnnnnnnnnnnnnnnnnnnnnnnnnnnnnnnnnnnnnnnnnnnnnnnnnnnnnnnnnnnnnnnnnnnnnnnnnnnnnnnnnnnnnnnnnnnnnnnnnnnnnnnnnnnnnnnnnnnnnnnnnnnnnnnnnnnnnnnnnnnnnnnnnnnnnnnnnnnnnnnnnnnnnnnnnnnnnnnnnnnnnnnnnnnnnnnnnnnnnnnnnnnnnnnnnnnnnnnnnnnnnnnnnnnnnnnnnnnnnnnnnnnnnnnnnnnnnnnnnnnnnnnnnnnnnnnnnnnnnnnnnnnnnnnnnnnnnnnnnnnnnnnnnnnnnnnnnnnnnnnnnnnnnnnnnnnnnnnnnnnnnnnnnnnnnnnnnnnnnnnnnnnnnnnnnnnnnnnnnnnnnnnnnnnnnnnnnnnnnnnnnnnnnnnnnnnnnnnnnnnnnnnnnnnnnnnnnnnnnnnnnnnnnnnnnnnnnnnnnnnnnnnnnnnnnnnnnnnnnnnnnnnnnnnnnnnnnnnnnnnnnnnnnnnnnnnnnnnnnnnnnnnnnnnnnnnnnnnnnnnnnnnnnnnnnnnnnnnnnnnnnnnnnnnnnnnnnnnnnnnnnnnnnnnnnnnnnnnnnnnnnnnnnnnnnnnnnnnnnnnnnnnnnnnnnnnnnnnnnnnnnnnnnnnnnnnnnnnnnnnnnnnnnnnnnnnnnnnnnnnnnnnnnnnnnnnnnnnnnnnnnnnnnnnnnnnnnnnnnnnnnnnnnnnnnnnnnnnnnnnnnnnnnnnnnnnnnnnnnnnnnnnnnnnnnnnnnnnnnnnnnnnnnnnnnnnnnnnnnnnnnnnnnnnnnnnnnnnnnnnnnnnnnnnnnnnnnnnnnnnnnnnnnnnnnnnnnnnnnnnnnnnnnnnnnnnnnnnnnnnnnnnnnnnnnnnnnnnnnnnnnnnnnnnnnnnnnnnnnnnnnnnnnnnnnnnnnnnnnnnnnnnnnnnnnnnnnnnnnnnnnnnnnnnnnnnnnnnnnnnnnnnnnnnnnnnnnnnnnnnnnnnnnnnnnnnnnnnnnnnnnnnnnnnnnnnnnnnnnnnnnnnnnnnnnnnnnnnnnnnnnnnnnnnnnnnnnnnnnnnnnnnnnnnnnnnnnnnnnnnnnnnnnnnnnnnnnnnnnnnnnnnnnnnnnnnnnnnnnnnnnnnnnnnnnnnnnnnnnnnnnnnnnnnnnnnnnnnnnnnnnnnnnnnnnnnnnnnnnnnnnnnnnnnnnnnnnnnnnnnnnnnnnnnnnnnnnnnnnnnnnnnnnnnnnnnnnnnnnnnnnnnnnnnnnnnnnnnnnnnnnnnnnnnnnnnnnnnnnnnnnnnnnnnnnnnnnnnnnnnnnnnnnnnnnnnnnnnnnnnnnnnnnnnnnnnnnnnnnnnnnnnnnnnnnnnnnnnnnnnnnnnnnnnnnnnnnnnnnnnnnnnnnnnnnnnnnnnnnnnnnnnnnnnnnnnnnnnnnnnnnnnnnnnnnnnnnnnnnnnnnnnnnnnnnnnnnnnnnnnnnnnnnnnnnnnnnnnnnnnnnnnnnnnnnnnnnnnnnnnnnnnnnnnnnnnnnnnnnnnnnnnnnnnnnnnnnnnnnnnnnnnnnnnnnnnnnnnnnnnnnnnnnnnnnnnnnnnnnnnnnnnnnnnnnnnnnnnnnnnnnnnnnnnnnnnnnnnnnnnnnnnnnnnnnnnnnnnnnnnnnnn

SEQ ID NO: 95629 - DNA, 106177 bp, Homo sapiens
  misc_feature (1)...(106177): n = A,T,C or G
tggagaaaccccatctctagtaaaaatacaaagttagctgggcatcgtggcacatgcctgtaatcccagctattcggaaggctgaggcaggagaatcgcttgaacccaggaggcagaggttgcggtgagccaagattgcgccattgcactccagcctgggcaacaagagtgagactccatctcaacaacaacaacaaagaaaaaaaaagagaaagaaggaaagaaagaaagaaagaaagaaagaaagggagagaaagacccaagaactggcattattttgcaagtagcacaacaaagaacccactctcaaccaccaacttcaggttttaaaaaggtagaatgagcatgaataaaattgctgccgtgagttgggtaacctcattattcagctagagcagtaactagcaagtcagtggtaactaggaaggaagattgatgtcttcgtgatgctccactcatttccctgagaattgatctttggggcaatttgagtttagaggtatgtgggattctatttcctctggtaaacttaaaaaaaacaaacaaacaaacaaaaaaaaaaccaccttgatattccacattagtacatgaacacctatgacagtggaggtaagaatactcccggagttagggacactcaatcttaaaactactcatctaactttctggtcacacggaagaggccagtttgccccagctaggtctctgtgcacccctagattatcctgccaccccggccagggaggtgtacacagggacaggagggtgtgcacgcagggacaggacaggtgtgcttgcaggcgacaggacgagtgtgcccgcaggaataggagggtgtgcacacagggacaggaagggggtgcaagcagggacacgaggggtgtgcaagtggggacaggacgggtgtgcaaacgggcgacaggatgggtgcgcacgcaggtacaggaggatgtgcccatagggacaggaggatgtgcgagcagggacgggagagtgtgcccgaaggtacaggagggtgtgcgtgcagggacaagaggatgtgtgctcagggacacgagggtgtgcacgcagggaaggagggtgtgtatgcagagggataggacggtgtgtatgcggggacaggaaggttgtgcgtgcagggacaggagggtgtgcacgcacacagggacaggacggtgtgcccgcggggacaggacggtgtgcatgcagggataggagggtgtgtccacagtgatagggcggtgtgaagcctactcctggccatgggcctctgcccctatcttctgccttctgttctgtcccaagaaaagcctgacactctaaagaggtcgccgattttgatcacaagtttgaaagactcataaggcatctaacattttaagctgtacaaacaaaattaaaactaaacacttcggaaaacaaaaagcacacaagaaatttggctttttgcatctgcactgcccatgcatttgctccagccagggcagtgccaggcagccttctgcagggagccaccaagtgcccacccccgggcaggtccacctggctgcccctgttgcgtagttctgggaggctggccttgcagccacctgagaggcctctgctcggaaagcaggaggcacctgacaatgccacgctgattggatgtgagcagacagaaggaagtatcttaaaagtcacactgctctgccagcgatcacatttttgcttaggttgatgactgctgggctggttgtcctggggcaggaaaggactgggctgtaaatggacagtgggaccagtcaggtcatgccctctgtctggctggaccccctttctcactccaccattcagggaggcctattatgagccactatctgaagaagcctgtggatgaaaacctagtaaattggctgtgattctttgtcctccagcagcatccacatagcaaggagaggacactggcccatggcatctttgaccagatccccaagcttcgcagtaactgagcaggcatcagcaggggaaggtttgccagctctggagatcagccccctgaatggtgacaggtttcacttcccatcatggaaatggggctggagcctcctgcctcttgtggcctctgcagtagcagggaagcccagccagaagccagcagggatgggggccttggtcaccaggggtatagggagctccagctttgggcaactaggagctgaggagaggcctcactccagagcctgcacctgaaaactatgctccatccttaaatttggctactttttcacagctataagtagacttccatacacaatacagatattacacgtggtttctgtagcttctctctcctaactgctctgtgctggcactcaccccgcagagcactggctgcctccccagtcccacggcaggaggtactcatctttcccaccaggctgtggctctgctcccagctgctcagggtcagcagctaccagcctgatgccacaattccagcatgtgggagtccgatcaccttttcccaagacttggagccggactggctcccagccagcccagcagacagatggaaacacactccaccagcatatggaactcatttcatatcatgtgtgaaaacacacacacacatagcctcatcatttaaaagtatgaccttcacatcaattaaggcgattacggggtatatttgaaatgaaatgctatcatactcaaaattaccagattaatgaaataatcaacaggaaaattatctatgccagaaaaactatgactgattttccgaaataggattaaattgttcatatgtattaatcaaaaataagatctgctttgcagtcgaaaccacacaaccagtttccaaaaaaaaaaaaagaaaagaaaaaagaaatgtatgggatgtggcatcagggtctctacacacacagaaagttagctttagaaagaggctggattcagtcaactagctagcagaatacaactgttcaaactcaacatttgtccgaccaaatgaaaccatttccccccacactgacttgtgcgtagacatcctctaattccaatttgatgaatattctccaataacatagcaattaatttaataaaggaactcaccaattttaaattgcaataaatttaccaaacattttcactatttatggagagctttacagtaagaaagtatcaacaaaagcaggcacatccgtgtacaaagtgttgctgttgggtgttctcacttcttctttctgaattaccagctgctctgcgtctctgtctgctcttcctccgtgggaagtcgccgtcctggggcgctcgctctgtccccctcgcctcggaccaccaggcagagcagccccagggtttggacttgccaagaaaagtgcagtcgggctagccaagcccaaacatttattgtaaacttgaaaatggaatccagatatgaacgacacaaataagaagagaaacctcccagatacagaaatggtcacatcaggggccccctcctgtggtcacggagcccgcagagggggccaggccggaggctgcaaagccacgtggaagaggcggcgcccctgaggcctggccctggaccccgccccgctgcccgtcctcccttgnnnnnnnnnnnnnnnnnnnnnnnnnnnnnnnnnnnnnnnnnnnnnnnnnnnnnnnnnnnnnnnnnnnnnnnnnnnnnnnnnnnnnnnnnnnnnnnnnnnnnnnnnnnnnnnnnnnnnnnnnnnnnnnnnnnnnnnnnnnnnnnnnnnnnnnnnnnnnnnnnnnnnnnnnnnnnnnnnnnnnnnnnnnnnnnnnnnnnnnnnnnnnnnnnnnnnnnnnnnnnnnnnnnnnnnnnnnnnnnnnnnnnnnnnnnnnnnnnnnnnnnnnnnnnnnnnnnnnnnnnnnnnnnnnnnnnnnnnnnnnnnnnnnnnnnnnnnnnnnnnnnnnnnnnnnnnnnnnnnnnnnnnnnnnnnnnnnnnnnnnnnnnnnnnnnnnnnnnnnnnnnnnnnnnnnnnnnnnnnnnnnnnnnnnnnnnnnnnnnnnnnnnnnnnnnnnnnnnnnnnnnnnnnnnnnnnnnnnnnnnnnnnnnnnnnnnnnnnnnnnnnnnnnnnnnnnnnnnnnnnnnnnnnnnnnnnnnnnnnnnnnnnnnnnnnnnnnnnnnnnnnnnnnnnnnnnnnnnnnnnnnnnnnnnnnnnnnnnnnnnnnnnnnnnnnnnnnnnnnnnnnnnnnnnnnnnnnnnnnnnnnnnnnnnnnnnnnnnnnnnnnnnnnnnnnnnnnnnnnnnnnnnnnnnnnnnnnnnnnnnnnnnnnnnnnnnnnnnnnnnnnnnnnnnnnnnnnnnnnnnnnnnnnnnnnnnnnnnnnnnnnnnnnnnnnnnnnnnnnnnnnnnnnnnnnnnnnnnnnnnnnnnnnnnnnnnnnnnnnnnnnnnnnnnnnnnnnnnnnnnnnnnnnnnnnnnnnnnnnnnnnnnnnnnnnnnnnnnnnnnnnnnnnnnnnnnnnnnnnnnnnnnnnnnnnnnnnnnnnnnnnnnnnnnnnnnnnnnnnnnnnnnnnnnnnnnnnnnnnnnnnnnnnnnnnnnnnnnnnnnnnnnnnnnnnnnnnnnnnnnnnnnnnnnnnnnnnnnnnnnnnnnnnnnnnnnnnnnnnnnnnnnnnnnnnnnnnnnnnnnnnnnnnnnnnnnnnnnnnnnnnnnnnnnnnnnnnnnnnnnnnnnnnnnnnnnnnnnnnnnnnnnnnnnnnnnnnnnnnnnnnnnnnnnnnnnnnnnnnnnnnnnnnnnnnnnnnnnnnnnnnnnnnnnnnnnnnnnnnnnnnnnnnnnnnnnnnnnnnnnnnnnnnnnnnnnnnnnnnnnnnnnnnnnnnnnnnnnnnnnnnnnnnnnnnnnnnnnnnnnnnnnnnnnnnnnnnnnnnnnnnnnnnnnnnnnnnnnnnnnnnnnnnnnnnnnnnnnnnnnnnnnnnnnnnnnnnnnnnnnnnnnnnnnnnnnnnnnnnnnnnnnnnnnnnnnnnnnnnnnnnnnnnnnnnnnnnnnnnnnnnnnnnnnnnnnnnnnnnnnnnnnnnnnnnnnnnnnnnnnnnnnnnnnnnnnnnnnnnnnnnnnnnnnnnnnnnnnnnnnnnnnnnnnnnnnnnnnnnnnnnnnnnnnnnnnnnnnnnnnnnnnnnnnnnnnnnnnnnnnnnnnnnnnnnnnnnnnnnnnnnnnnnnnnnnnnnnnnnnnnnnnnnnnnnnnnnnnnnnnnnnnnnnnnnnnnnnnnnnnnnnnnnnnnnnnnnnnnnnnnnnnnnnnnnnnnnnnnnnnnnnnnnnnnnnnnnnnnnnnnnnnnnnnnnnnntcccccccaaccccccaccccgcccgcggccccgcgcgcctcgccctggcgccgcccttccccgcccccggcagcccccgccacccccgggacgcccctcagcttcctcctcccggagcgggggcccctggccgcgtctctccgccttccctccctatccgcgcccctatccggcgcgggccgctgcggaaacgcagctctccacccccagctggctctcccggaccccctgggccccaccctcagcgctccccaccgctcggcgcccctgcgtctgcgctcccctctctcccctctctatccactgggtctgggccgcacttcccgcccacccgcctgccagcggccgggaagcctgtggaagttatggggatgcagggagagggggagaggggagcttgtgtgctaggggtgagtgggtatgggggagagcctgggtaaggagaaggggaaagggggagcctgggaaaggagggaggaaaggaggagagcccgggtgctggggttggggggaaaggagcccggggagggagggggaggggccgggagctggggggggtgggaaggagcccggggagnnnnnnnnnnnnnnnnnnnnagctgggggtaagggaggagtgagcctgggtgctgtggggggagggggttgttcaagggatggggacgatcagggtctctgggaagtgctgacgtgtgcgcgtgtgcggtgtgttgcttgtgggtgcgtgtgtggtgtgtgcatgtgtgtgcgcgcgcgtgtgtgcggggtgtgccgtgagcgtgtgcccgcggttcgggggatgagtaggggcgctgacttttaggaccagccatttgagtcaagctggagacgacgtcttagaacctaggatgagtctcgtttggttttagtctgcaaagctcgtctgcatcagacaggaattttccccagacgcgggtgcacgtgaattaattcatcagaaggcggttcacggcctgagtgagggggacgagggcggcgaattcctccgcctcattcctaccctgacgattcgaggtgggtgagaggaaggcgtggggcggctgggtgcgtggggtgggggaaggtcacctcttcggcctctctgggccctccagcctcttcctgagaggagctcgcctcggccccttggttggggggatgggagcgtctccggaaggccctcggccgagcagctgggcctgcacccctggtcccttccagttcgtttctgctgcggcggcaagaggctggggagccgatgactcaccctgccggctaattgcagcgttaaataactttgcgccggattcggtggctgcagcagggaacgcgctccgggcgccgggggaggtggagggacgccctgagaacgcacctccgtccctgtcaccagccttagcaagttctggcctgtggagccgtcatccagagcgcacagcttcatgcccttgaagggcgcagtgtgtcccgtggtgcccggtgggcccggacagagaccccagaggctctgtctgaaggaagctgcacccacagactccatccaggcagcgcgggcgcggkcctgtcgcctacctttctcggaagccatctgcccatgtgaatctatgtgaaggcccttcatgcgctcctggacatctgcgtgggatttacttcaactgctatcgctgcgaggaggacgagcatgtttcactgtatttttagcagagagtgcagattttagaacctcgcgaacggtcctgtatctcctgcacgatgactctccagaacaggaatagtgacccttcctttgcatttatggtgcataggttttcaaaggacagtgtgtaaatcagcttgtgtaataattgtggcacccacgcgcgcaagcagacttaccatgagctgacttccactgattatttcagtttccagggaaacgaggtttgcagccccctccagtgagggcggagcggcctctccattcccaatgcagcaaggctgctgcagccacgatgattaggctttggaggaggaagtgaacggatggggcctcatcctcctgcctccctaaagggtgagggtggaaggatggggctgtgccctcttagggcagggaaaaacagcttggaggggtttctgccatcagagatcccataggaggcaggtcagtcctgcagaatttctccccagtctggcctccagcctccctggcccctttctagaggcctccatcccactggcggcttgctcctgccaccgggcctctgcacagtcacctcctgcagcctggggtgtgtcgcctctccacgtcctcaccggcgtctgcctttgcatttcccagatgctcgcttcaccccactgagatgtaactcagttttgtgggatcccactgccctccaggtgccgctccgagtgctctacacagattttcattcagtccttgcggcacacgaaggtaggcggccccactgccctcacagaggcttcccatgcaggagccagtgactggcggagcgccgctcacactcaggctccgcgaactgcctccctgccctcccctgccccggacagacggtcctccataagaggcaggatttccctgtggtccaaaggtgtgtgtccctgccacattgggagttcagctcactgcggtcctgtccagcttgcccccgtctcccatccacatcaggatctggctttgccccagctatgtggaatgagtgcatgaacaaatgaatgggtgggttgctccatcttgtgacaggacagcaaagtcagctggttctgctcctacggcgctcagggtcaggtgagacaggccggcccgcaggcagacaggccctcatctctgtattgggggtggggaaggggctctggcagggcgcatgccccagcagcaggaacgtcaagagcagaggccctggaggagacagcccggagctggcgcacagtaaagtcttcagataggaggggcagagtgagggtgccaccgtcgggcagcaggtgcccacccagaagggtctttgagccttgcggggaagttcagactttaccctgaggataaaggaggtcctggacccgcaggaggatgccctggtgggtctagaaggagccctgccactggggagctggtggggtttccgccctcacggtgcaatcacagggttgcctgcttatctcccccgcccttttcccatcacttcctgagactctgcagatggtcagcagtgttcctgagtggatgacattgggtgggcagagagaggggagggcagtctgtggtcccagtcatgtagagcttccttgtacagtctgtggtcccagtcatgtagagcttccttgtacagtctgttgagctcacataccctcaatggcccttcactcacagggatggcctctgcacttcagctggtttctgacacctaaaaacagaagtggaaaagggagcagacgcagccacattttgaaagctgattcggttgctttctggcagaatccctgcccccaagcacctgccaggcccacccatgaagcctcttcccacgccttaactctgccccatgaggggacctcaagcagttgcagtctagtcaggtgatttgcagagctcagggctcagggaggggcacccacctcagaaaaaagcgccgtgctcatgagaaatgacttctacaggttgttggggaaagaggagttattttaaagatcacagagcccgtgatgtgccaggcgcacccacacagggcatatagtccccgcagctgcctctgtgctggggccacgtcaccgtcctgtcctaaagacaagcaatgtgaagcccagagatggtatcttaaaacaatcgtgtggtttttttctgattacaacagcaattgtgttaatccaacaatatttttcctatcaactgtaaaccttattttaatatttacatatttattagcatttaaaattcaatctcctagaatattgacttcaattagtttggctgattctaattttttttttctaatttgtttatcacttaactttttaagtactttttttttttagacagagtcttgctctgtcacccaggctggagtgcagtggtgcaatctcggctcactgcaacctctgcctcctgggctcaagcgattctcctgcctcaacctcccgagtagctgggactacaggctcacaccaccatgcccagctaatttttatatttttagtagagatggggtttcaccatgttgtccaggctggtctcgaactcctgacctcaagtgatcccccacctcagcctcccaaagtgctgggattacaggtgtgagccaccgtgcctggcctgtttttagtacttttatcctttatctttttaactacgtaagtactcaacattttaaattattaatcttcaccatgttatttccaagaacaatcacgattgatctttcagttacacagccacggtgtgtgcctctctgtgtaactctgcacagctggtgatttaytgaaagaacttactctcataaaaccacagccagcgagttctcagagacacaataatgcaccttaattatgagtttaaaagctcttgtcttgtgaaatgtaatcgatccacagaaaaatcataaagtatacatgtaatagcttaatgacttataaatgaagatctgtatacttcccactcgaaaaacggaatattgcaggatttgagtacacaacccgtacctttccaacgacagcctccctcccaccagagcttctgctgagttcacttgaaatcacttccttgcatttatttatacttttattaccttgaggtgcatccctaaccattctagttcgattttgcctggtgtttgaactttatattaatggaatcataggacataattcttatatctctggtttctttcattcaactttgtgtctgcgaaatgtatccatgttgcatgcaacgggggctcattcatcgctggttactgattcactgcatgagtatgacacagtttattaaccatttcactgctgatgaacatttgatcatttctagtttgggaatattattaataatttttgaaccttcttatttgtgtgccctgatgtacatggacatgcattttaggggtgtatacttagggaaattgccggttcatgagtaacacctatcttcaggtattactttttgtgcccttttatgctgaactacaatttacgtgcaataccaatcattcatattaagtgtacaactcagtgagtttagacaactggacaccttgttgtgagtcaccaccaccgagatgatccagcactgtcccaactccccccaagttctcctttgcaggcaccctctccctccattctgggcacaggcaaccatgamccactatctgtcaccgtagctttagtataaaatttcacatacatggactcagggagcatagagtctttcctgtctggcttctttccgctggcaaaatgcttggagacttttccacgttgctgcatgaatcaatggatcatttgttttcgtggctgagcagaattccaccaacatttgtttactcatccatgaaatgatggacatttggtgtttttccattgagattgttatgaataatgctgctattgtcattcaaggacaagtcttctgtgaacatctgttttcacttctcttgggtacatccttagaagtggtattgctggactgtatcaaaagttaatatttaactttcaggaaacttacaaactgttttccagagtggctgtaccattttgcattcccagaccgaagtgtgaaagctccagatgccccacgccctcaccagcccacggtgttgtcagccttaatagtgctgaccattctggtgggtttgcagtgtatctcattgtgttttaatttgcattaccttgacaactaatggcgttgagactttcatatatctttagtaaagagtccttccaaatcctctgccgattttttaaaaattgggttgtcttcttgtaattgagttgtaagaattctttatacgttctgaacatgttatttattggataaatgtttcgcaagtattttctcccagtctttgacctactttttcatcttcttatcaagagcttttaaaaagcaaaactttacattttgatgacatccaattattacttttttcttttatgttttttgtgtattatttaggaaataattgtctgaaccaagattacaaatattttcttgtctttcagaagttttgtggttttagctcctaagtgtacatctgtgatccattttgaattaatttttgtatatggtatgatgtaatggtcaaggtttttatttttgcatatggatatacagttgttccagtaccatttcttgaaaataattaccagtaccattaagttaccttggtacttttattgaaaatcaattgactctcagttctgacccatcgacttatatgtctgtttttttttgtttttttttttttttttgagatggagtctcactctgttgcccaggctggagtgcagtggtgctgtctgggctcactgcaacctctgctcccaggttcaagcgattctcctaccccagcctcctgagtagctggaattacaggcatgtgccaccacacccagctaatttttgtatttttagtagagacggagtttcaccatgttggttaggctggtcttgaactcctgacctcgtgattcacctgcctcggcctcccaaagtgctgggattacaggcgtgagccaccgtgcctggccatgtctgttcttatgctaacatcacagtatctggattattgtagctccataatgaatgctggaatcaggtaatgtgagtcctccaacatttttactctttttcaaaataatttgactattttaggtcctttgcatgtccatacagattttagactcagcttgtcaatttctacccaaaaatgtctgattgagattgtattgaacctatatcttaatttggggataattagtatgttagcaatattgaatcttctaacctacatttacttagtcttcattaatttatctcatcaatattttgtagttttcagtgcacaggctttgcacacattttgttaaatttccctataaggatttcatatttttatatttttcattttgtaaatgttaatttaaaggaataagacaccctcttttttttctttctttttttctggtttttttgtttgtttgtttgttttgtttttatagagacaaggtcccactattttgcccaggctggtctcgaactcctgggctcaagcagtcctcccacctcagcctctcaaagtgctgggattacaggcaggagccaccacacctggccagataccctcattagatttttgtgtctattctgatttctttaaagtaacatttactttaataaatgttactatataaacatatagcattaatataaaattgtttgttactggtacatataaatacaattaactttttagattgccctcttaccctgtgaccttgttaaattcactaattctagcagccgcttttgtgtatttggtaagattttctacatagacaatcatgccacaggtaaatagaacccattttactgcttcctttccaagctgcatgctttttttttttcttgctttattgcattggctaggtcctcatgcataatagtgaatagaagtaatgagagtaaacacccttgccttgtttcttgtcttagtgggaaaccatttggtctttcacccttaagtataatgtaagctgtagtttttttgtagatgccttttatcaggttgaaatctatttctgttttgagtgtttttatcatgaaccgttgatgaatcttgtcaaatgcttttttcctcgtcttttgagattatcatatggtttttctttttcagcctgttaatatgatgaattacactgattcagtttcaaatgtccaaccaagcttgcactccagagatgaagcccacttgatcacatggattattcttttaatatatgatggatacgacttggctgttcttttgttgaggatttttgtgtttatgttaatgaggatattatttgtagttttcttttcttgtaatgtttttgtctttgttcagtgtcagagtaatgccaacttcataaagtgagctgggaagtactccctcattttctgttttctgtgaaagaattgtatagaattgatgttatttcttccttaagtgttgagtagaattcacttgcaaagccatctgaggttgacatcttctttgggaatgactttagctataaattcaatttatttaacagatatagggctattaaggttatttaatttttttcttgaatgagctttagtgtcctgtgtttttcaaggaatttttccattttayttaagtttttagatttgttggcataaagttatcccaatatttccttagaagttgtgacttttactgcatataaaacatacctcaataaagctahtacatacatatatatatatgaatcatttctggccaggtacagtggctcatgcctgtaatcccagcactttgggaggcagaggcaggtggatcacctgagatcaggtgttccagaccagcctggccaacatgggaaacctgtctctactaaaaatacaaaaattagccaggtgtggtggcatgcccctgtaatcccagctacttaggaggctgagacagaagaatcgcttgaatccgggaggtggagtttgcagtgagctgagattgcaccactgcactccagcctgggcaacagactgagactccatctcaaaaaaaaaaaaaaaaaatccctttttatctaaaggatctgtagtgaagtcccctctttcatttctgatattggtaatttgtggggtttttttgtttttgtttttgtttttgagatggaatctcgctctgtcacccaggctggagtgcaatggtgcaatctcagctcactgcaacctccgcctcccgggttcaagtgattctcctgcctcagcctcccaagtagctgggactacaggtgcccaccaccatgcctggctaatttttgtatttttagtagagacggggtttcaccatgttggccaggatgatcttgatctcttgaccttgtgatctgcccgcctcaacctcccaaagtgttgggattacaggcgtgagccacagggcccggcctcgtgtgttctcttttttcttaatytggttagagatttatcagtgttattgatcatctcaaaaaactagtttttggtttcatcattatcttcatattttgttttctattcattgatttctgtactcttgcttattatttcctttttctgcttactttggctttcgttgcctttctttctctagttctcatttgagacctttctttttttcttatataatttttaatgctataaattttgctttaaacatttccttaattatattccacaattttccttatgttatgtttttattattattctggtaaaaatatttcctagtgatatttgtgatttcttctttgactcattggtgtttagaagtgagttaacttctagagacatttggggtcctttctagattagttgttgcagattcctaatttatgactgttgtggtctggaaacactctgcaagatattgatcttttgaaatctgttgagacaagcacgtggcctgtcctgacgaatgtttcacatacagttggagagagtgtgcgttctgaagttgttgctgattattttctctaagtgtcaattcagtttagttcgtmgtgtcatttgaatctcctgtayacctttttctttttgtctacttgttgtattactgagaacagcatgttaaaatctccagctattattgtagattttctatttttccctttggttttactagtttttgttcatatattttggcattctgttatcagatgtgtatatgtttgtaattgttgtctcttcctattgtattgagcaggaactatcctttttgtcttataatactcattctattgaagaatattttgtgtgctattaatacagctactacaggccatgtgcagtgtggctcgtgcctgtaatcccagccctttgagaagccaaggcaggaggattgcttgaggccaggagtttgagaccagcctgggcaacacagtgagactcccatctctaaaaaaaaaaaacatgtttaggacatcagccaagcataatgacatatgcctgtgggtcctacagaggaagcccaagcaggaggcagctgaagcaggaggatctacataggaggctgaagtggatagcttgaatctaagagtcggaggttacagtgaactctgatcacaccactgcactccagactgaacaacaacagaacaacgccctgtcttaaaacacacatgcagagccaggcacagtggctcatgcctgtaatcccagcactttgggaggctgaggtgggcagatcacaaggtcaggagtttgagaccatcctggctaacacggtgaaaccccgtctctactaaaaatagaaaaattagccggacgtggtggcgggtgtctgtaatctgagctactcaggaggctgaggcaagagaatggcgtgaacccgggaggtggagcttgcagtgagctgagatcatgccattgcactccagctgggcgacagagcaagactctgtctaaaaaaaaaaaaaaaagcacatgcacactcacacgcacattcagctatgatggctttcttatgctagctgtttgcgtggtatattattttccatccttaaattttaatttccacctctttctgtctcttgaagacaacataaggttggttcttgctttcttaagtcagtctgaccatttgtgccttttgcttgggatacttcatttatgtttgatgcaattatttaaatggttatagttacatgatattctctatctgtctcatctgtgttttgttcctcagtttattctttcttgccttcttattcattcattaatgttatattttctttggacatatttttcttcattcattggtggaagtaaatttccatatcattattttatccattaaggccaagctgcactgtgtttgttcaaatttacattcccacctaggtccctttctcagttacctttttcaatcttttaacttttgttttttttttttaattttatgtttctctatagttttctggttatatccattctatctccttctatatattcttattttataagtggtgggcaacaagcatgcccacagacatgacgcgaagcagaaagctgaccgtgagagtgacgagaggaggcctatccctgctgccttgccctggagctgctcctctggtagcttgaatccatttctttcacatccagtcttcatccctcagcaacccaactggagccactcaagacccatgagccagatggacgaccatcgttattctggggcaggcagcagcttccaagaagatggccttgcaattccaggtcacgactgcgtgctgccttcggaggaacgactcaccacaaatccagattctgctgtgcgtggccgtcaaatgtgaggccatctggggacgtgtcacggggactggggtggacataagtcacctttctagctacctgttggataacctttctatatttgatgacaagtagtacctgacttccggacctggagtttgaagctcagtttccagctgccctgaaacatgcttgggagactgacttggaagacagaacggcaaggaagcggcgtctcagcgtcacttcccgcggggaggggcagcgtttggcgtcttctgaggctgacttctcagcagaggatccctgtgcctgaggccgcggtgcccagaggtgccaggtggggcgggggatatggtaactgggaaacatagccccgagcccagctactgcccctcttagctaggtggcgaggattcagtagtttgcaggactatgcctgacactgtgcctgggcgtggtctgggcagtctcttcacatcatccgcgaaggcannnnnnnnnnnnnnnnnnnncatctgggctttttcctgtctgtcagcggatgactccttcctccgtcgtccctccacgcgtgcggccatcttttcagcaaaggcatctgggctttttcccgtcggtcagcgggtgagtccttcctccgttgtccctccacgcgtgcggccatcttttcagcaaaggcatctgggctttttcccgtcggtcagcgggtgactccttcctccgttgtccctccatgctgcggccatcttttcagcaaaggcatctgggctttttcctgtcggtcagcgggtgactccttcctccgtcgtccctccatgcgtgcggccatcttttcaggaaaggcatctgtgctttttcctgttggtcagcgggtgactccttcctccgtcgtcccaccatgcgtgcggccatcttttgttgcgtgcctacactgtcgatgtcaggctggggacacacaggaccgaccgagcatggtgagatctagaatttatgcctcattcagttaatgttctttagatatttgttcaacatttatttggtaagaagtgggtaaaagtttccactgataaagaccttacactttctcagtaacctatgtaccagctgtcctttcgctcacatctttgagcttttctccctgtattagtcagggttctctagagggacagagctcataggataaatgtatatgaaggggagtttattaggagacttgactcacacgatcacaggtgaagtcccacagtaggccgaatgcaagctgaggagccaggaagccagtccaagtccccaaacctcaaatgtagggaagctgacaacacagccgtgtctgtggccaaaggcccaggagccccgggcaaaccactggtgttaagtccaagagtcccagagctgaagagcttggagtctgatgtttgagggcaggaagcatccagcacgggagaaagatggaggctgaggccgtaagactcagccggtccagtccttccacgttcccctgcctgcttttattctggccgtgctggcagctgattagacggtgcccaccaggattgagggtgagtctgcctttcccagcccactgactcaaatgttaatctccgttggcaacgtcctcacagacacacccaggatcaatattttgcatccttcaatccaatcaagttgacactcaatattaaccatcacactccccagctcaaaaaagcagagaaagaacacaactcgactttctcaggagtgtttgtgagcagaacttgcttaggattgcaggggtacggtggtttctaggtccacagcacctccggagaaatttccattatctttcctcctgccacgcctcccttccagcctcaggaagacgggcctcccacctctcaaccccactgttmagtcttcccagctcctcctttctggatttccctcaggtctcctcccgtcccctccgtaatgcagggcagctcagctctgtcctcccagctcctgtcttcaagcttgagcagctccctccagcatctccaggtcatcagacaccaccttagaaagttgtggggatatttttaaaatggatttttcttttgtaagttcaagtttaagggagtcggattactcgctagtttttctatttctgcgtaacaaattatcaccattttagtaacttaaaacaacacaaaggcattttctccactttcttctttttcttttttcttttttttttgtttttgtttgagacggcgtctcactctgtcaccaggctggagtgcagtggcaccatctcggctcactgcaacctccacctcccaggttcaagtgattctcctgcctcagcctcccgagtagctgggattacaggcacccaccaccatgcccagctaatttttgtatttctggtggagacagggtttcaccatgttggctaggctggtgtcaaactcctgacctcaggtgatccacctgtctcggcctcccagagtgctgggattccaggcatgagccaccatgcccggccctctctccactttctatggggtcagttgggtcctctgccccttgcacctccaggccaaaattaaggcgtcgcccagagctgtgatctcatctgaggcacaagggtctcttccagggttgttctggttgttgatttgtcaacgatcagttgtagggccgaggccctcaccccttccagaagtcaccacccttcccaggtggcccacatgggccagtctgcatccttccactcctgcttctgctcgctcctctcagggctcacctgatgaggtcaggcccaccagaggagcccaggagccagtgtgtgctggagtcgacgtgcattggctcccggagtggaaagctgcactgccaggagctttgctgttagatacagacattgctgaaaagtaaatgatacgcacttacaatgaaataaagcttacttaaaacataggtaataaatactcgaagccattactttctaattattttactacattttacatcgcctgcattcctgagatcactgacatcagctgtatctgtaggggtaaaagctgtaatgggctaccacggtctcttcctagcaccatgctcagtgactttttgtgtgtggctccaagttggccatgaggggggcatttacaccacagaaattggcaaatgctacaaatgcggctgggttgttgctttattgactgtctagatttaatgaagttatgggaaaatatgagtaatgtagattaaatttaaacgtgtgttgtggctgtaaccattacattgtgaatactaccaaaaatcagggaaatgttcttccagtattagaaagtgactcaggagaggcactcatgtcattgatgaagtgacgttccaatgtctttgtgatttcaattaccttttacttattaacataaatgaaagtatgaaccacgttcaactcagaactgcactgttcattaataatgtgaggaagctctcagctgggtcagatgataatcaggcatttatacaaagcctgtttttgtgacaccattattggtgatacaattataaaaatggagagtggcccaggtggcagtggctcacggctgtaatnnnnnnnnnnnnnnnnnnnnnnnnnnnnnnnnnnnnnnnnnnnnnnnnnnnnnnnnnnnnnnnnnnnnnnnnnnnnnnnnnnnnnnnnnnnnnnnnnnnnnnnnnnnnnnnnnnnnnnnnnnnnnnnnnnnnnnnnnnnnnnnnnnnnnnnnnnnnnnnnnnnnnnnnnnnnnnnnnnnnnnnnnnnnnnnnnnnnnnnnnnnnnnnnnnnnnnnnnnnnnnnnnnnnnnnnnnnnnnnnnnnnnnnnnnnnnnnnnnnnnnnnnnnnnnnnnnnnnnnnnnnnnnnnnnnnnnnnnnnnnnnnnnnnnnnnnnnnnnnnnnnnnnnnnnnnnnnnnnnnnnnnnnnnnnnnnnnnnnnnnnnnnnnnnnnnnnnnnnnnnnnnnnnnnnnnnnnnnnnnnnnnnnnnnnnnnnnnnnnnnnnnnnnnnnnnnnnnnnnnnnnnnnnnnnnnnnnnnnnnnnnnnnnnnnnnnnnnnnnnnnnnnnnnnnnnnnnnnnnnnnnnnnnnnnnnnnnnnnnnnnnnnnnnnnnnnnnnnnnnnnnnnnnnnnnnnnnnnnnnnnnnnnnnnnnnnnnnnnnnnnnnnnnnnnnnnnnnnnnnnnnnnnnnnnnnnnnnnnnnnnnnnnnnnnnnnnnnnnnnnnnnnnnnnnnnnnnnnnnnnnnnnnnnnnnnnnnnnnnnnnnnnnnnnnnnnnnnnnnnnnnnnnnnnnnnnnnnnnnnnnnnnnnnnnnnnnnnnnnnnnnnnnnnnnnnnnnnnnnnnnnnnnnnnnnnnnnnnnnnnnnnnnnnnnnnnnnnnnnnnnnnnnnnnnnnnnnnnnnnnnnnnnnnnnnnnnnnnnnnnnnnnnnnnnnnnnnnnnnnnnnnnnnnnnnnnnnnnnnnnnnnnnnnnnnnnnnnnnnnnnnnnnnnnnnnnnnnnnnnnnnnnnnnnnnnnnnnnnnnnnnnnnnnnnnnnnnnnnnnnnnnnnnnnnnnnnnnnnnnnnnnnnnnnnnnnnnnnnnnnnnnnnnnacttatgttttttaagtgtgacgatggtaaaaacagacagagaaaagattcctggaggtgggggggtcagccccccgcccatccagccgccccgtccgggaggtgaggggtgcctctgcccggccgcccctgctgggaagtgaggagcccctctacccggccaccaccctgtctgggaagtgtgcccagcggctcattgagaacgggccatgatgacagtggcggttttgtggaatagaaaagggggaaaggtggggaaaagattgagaaatcggatggttgccgtgtctgtgtagaaagaggtagacatgggagacttttcattttgttctgtactaagaaaaattcttctgccttgggatcctgttgatctgtgaccttgcccccaaccctgtgctctctgaaacaagtgctgtgtccactcagggttaaatggattaagggcrgtgcaagatgtgctttgttaaacagatgcttgaaggcagcatgctcgttaagagtcatcaccactccctaatctcaagtacccagggacacaaacactgcagaaggccgcagggtcctctgcctagggaagccagagacctttgttcacttgtttatctgctgaccttccccccactattgtcctatgaccctgccaaatccccctctgcgagaaacacccaagaatgatcaataaaaaaaaagaaaaaagaaaagaatcctggtgcccttcactcatgcacttgcttattgacttgttactgtcaggcagccaggggttgctctaggccttggggtacagcagtttgcaaaatgacagggctcctgctcactggaggagcgtggcgggagagatggagatgaatcacatcttcacaaaaatacacagttgcagactgttaagtccagctgctgaaacatacaggagcacatggcaggggatgctgttgcatgggggctgggtggcgtccccttcgcacatgtgtccctaagcctcagcccttgattctgtcccttctgtctacactcactcccttggtgacctcatctagtttctttctttctttccttctttctttcttccttcctttctttctttttctttccttccttccttctttyttccttccttccttccttccttccttcctttcctctttctttctttcattctttcaacatttgaaggttatttttttttctttagcttttaagttcaagggtacctgtgcaggatgtgcaggtttgtttcatgggtaaatgtgtgccatggtggcttgctacacaaaccatcccatcccctaggtaagaagcccggcatccattagctattcctcctgatgctctccctcgccctacctgccaccaccctccaacaggccccagtgtgtattgttgccccccaccccgtgtccatgcattttcatcattcagctcccacttgtaagtgagaatacgtggtatttggttttctgttcctacattagtttgctgaggataatggcttccaactccatccaggtccctgcaaaaggacatgatctcattccttttgatggctgcataatattccatagtataaatgtaccacattttctttatccagtctatcgtcagtggtcatttaggttgatttcatgtctttgctattgtgaatagtgctgcaatgaacatatgtgtgtatgtatctttataatagaatgatttatattctttcttttttttttttgagacggagtctcactctgtcaccaggctggagtgcagtggcacgatctctgctcactgcaacctccacctcctgggttgaagcaattctcctggcttagcctcctgagtagcagggactacaggtgcttgccaccgtgcccagctaatttttgtatttttaggagagacagggtttcaccatgttgtccaggatggtcttgatctcttgaccttgtgatccacccacttcagcctctcgaagtgctgggattacaggygcgagccaccgcgcccggccagagtgatttatattcttttgagtatacacccattaatggggttgctgggtcgaatggtatttctgcctctacgtctttgtggaattgccacactgtcttccacaatggttaaactaatttacactcccaccaacagtgtaaaagcattcctttttctcctcaatcttgccagcatctcttgttttttgactttttaataacagtcagactggtgtgagatggtatctcactgtggttttgatttgcatttctctagtgatcagtcatgttcagctttttttcataggtttattggccacatgtgtgtcttcttttgaaaagtgtctgttcatgttatttgcccactttttaatggagttgtttttttctcataaatttaagttccttgtagactctggatattagatctttgtcagttggatagattgcaaaaattgtctcccattctgtaagttgtctgttcactctgatgctagtttcttttgctgtgcagaagctctttagtttaatttgatcccatttgtcaatttttccttttgctgctattgctgttggcattttggtcataaaatctttgcccgtgactatgtcctgaatggtattgcctgaattttcttctagggtttttatagttttgggttttataatacatttaagtctttaatccatcttgagttaatttttgtataaggtataaagaaggggtccagtttcaattttctgcatatggctagccaactctcctagtacaatttattaaatagggaatcctctccccatcgcttgtttttgtcaggtttgtcaaagatcaaatggttgtagatgtgtggtcttatttctgagttttctattctgttccattggtctgtgtgtctgttcttctaccagtatcatgctgttttggttactgtagccttgtagtatagtttgaagttgggtagcatgatgcctccagctttgttctttttgcttaggattgtcttggctatttgggttcttttttggttccatgtgaactttaaaatagttttttttttttttctaattttgygaagaatgtccatggtggttagatgggaatagcattggatctataaattactttgggcagtatggccattttcatgatattgattcttcctatccatgagcatggaatgtttttccatttatttgtgtcatctctgatttctttgagcagtggcttgtagctctccttgaagaggtccttcacttcccttgttagctgtattttttttgtggcagttgtgaatgggagttcattcatgatttggttctctgcttgcctgttgttggtatataggaatgctagagatttttgcacattgattttgtatcctgagactttgctgaagttgtttatcagtttaagagggtttggggctgagacaataggtttttctagatatagaattatgtcatmtgcaaacaaagataatttgacttcctttcttcctgtttgaatacgctttatttctttttcttgcctgattgccctggtcagaacttccagtactatgttgatattgaacaggagcggtgagagaggacatacttgtcttgtgctgtttttcaaggggaatgcttcctgcttttgcrcattcagtgtgatattggctgtgagtttgtcatatatggcttttattattctgaagtatgttccttcaatacctagtttattgagagtttttaacatgaagggatgttgaattttatcatggccttttctgcatctattgagataaatacgtggtttttgtctttggttctgtttatgtgatgaatcagttattgatttgtgtatgttgacccagccttgcatctctgaggtgaagccaacttgattttggtggataagccttttgatgtgctgctggatttgtttgccagtattttattgaggatttttgcatcaatgtttgtgaaggatattggcctcaagttttctttttttcttgtatctctgccaggtttgggtatcaggatgatgctggcctcacataatgagttaggaaggagtccctccttttcaattttttttgaatagattcagtagaatagtaccagctcttctttgaacctctggtagaattcagttgtgaatctggtcctgggccttttttgcttggtaggctgtttattattgcctcaattttagaactcgttattggtctatgtagggattcaatttcttcctggttcagtcttgggagggtatacgtgtccaggaatgtatccatttcttctagattttctagtttatgtgcatagaggtatttctagtattatttgataggtgtttgtatttctgtggggtcagtggtgatatcctcattatttctgattgtgtttatttgattcttctctcttctcttctttattagtctagctagtggtctatctattatattaattttttcaaaaaaccagctcctggattcgttgattttcttgaagggttttgggcatctctatcttcttcagttcagctctgatcttggttatttcttgtcttctgctagctttgggtggggcttgtttgctcttggttctctagttcttttagttgagatgttaggttgttaacttgagatttttctagcttttcagtgtgggcatttagtgctataaatttccctaacactattttagctgtgtctcagagattctggtacattgtctcttgttctcactagtttcaaagaacttcttgatttctgccttaatttcattattaagagtcattcaggagcaggttgttcagtttccatgtagttcagtggttttgagtgaatttcttaatcttgagttctaatttgattgcactgtggtctgagagactattatgatttcagttcttttccatctgatgagttgtgttttgcttccaattatgtgatcaattttaaagtaagtgccatgtggcaatgagacgaatgtgtattctgttattttggggtggataattctgtaggtatctatcagatccacttgatccagagctgagtttaggtcctgaatatctttgttaattttctgtcaatgatctgtctaatattgtcagtggggtgttaaagtcttccactattattgtgtgagaatctaaggctctttgtagatctctaagaacttcctttatgaatctaggtgctcctgtatttgatgcatatatatttaggatagttagttcttgttgaaatgaaccctttaccattgtgtaatgcccttctttgtcttttttgctttttgttggtttaaagtctgttttgtcgaaaactaggactgcaacctctgtttttttctgttttccatttgcttggtaaatttttatccatccttttattttgagcctacatgtatctttgcatgtgaggtgggtctctttattttattattattatttatttwttttttttagatggagtctcactccgtcacccaggctggagtgcagtggcatgatctcagctcactgcaagctctgcttcccggttcatgccattctcctgccttagcctcctgagtagctgggactacaggcacctgccaccacgcccggctaattttttgtatttttttctgatgggtcttggctctttgtccagcttgctactctgtgtcttttaattggggcatttagcccatttacatttaaggttaatattgttttgtgtggatttgatcctgtcatcatgatgctagatggttattttgcagacttgcttatgtggttgcctcatagtgtcactggtctgtgtatttcagtgtgtctttatagtggctggtaacagtttttcctttccacatttagtgcttccttcaggagctcttgcaaggtaggcctggtggtgacgaattctctcagcatttgctcgtctgaaaaagatcttatttctcctttgcttatgacactgggtttggctggatatgaaattctgggttggaaattcttttctttaagaatgttgaatattggcccccaatctcttctggcttgtagggtttccagtgagaggcccactgttagtctgatgagtttccctctgtaggtggcctggcctttctctctggctgctcttaacactttttctttcatttcaacctcggagaatctgatgattatttgtcttggggttgatcttctcatacagtatcttactggggttctctgcatttcctgaatttgaatgttggcctgtcttgccaggttggggaagttctcctggatgatatcctaaagtatgttttccaatttggttccattctctccatttctttcaggtaccccactcagctgtaggtttggtctctttacataatcccgcatttcccagaggtttttttcattgcttttcattcttgtttttttctgttcttgtctgcctatcttacttcagaaatatagtcttcaggctctaagattctttcttctacctggcctrttctgctatgggtacccgtggttgcattgagaagttctcaggttgttttcagctccatcaggtcagttgtgtttctctctaaaccgggtattctggctgtcagctcctgtactgtcttatcgtgattcttagcttctttgcgttgggttacaaacgctcctttagctcagcgaagtttgttattacccaccttctgaagcctgcttctgtcagttcagccatctcagccttagcccagttctgtacccttgctgtagaggtgttgcagtcatttggaggagaagaggcacgctgagttttcagcatttttgcattgatttttcctcatctttgtgggcttatctaccttcaatctttgaggttgctaacctttgaatggggtttttgtggggacttttttgctgacgttgttgttattttgtttgttttcttgtaacagtcaggccactctaccataagatggctgcagtttgctggggtccactccagaccctagttgccttggtttttcccatacctggaggtatctgagaaacagcaaagatgacagccacctccttcctctggaagctctgtcctcggggggtactgacctgttgccagcctgaacacacgtgcaggaggtggctgtagacacctgttgggggatctcagctagtcaggagaaatgggatcagggacctgcttaaagaagcagtcctggctgggcgcagtggctcacgcctgtaatcccagcagtttgggaggccgaggctggcggatcacgaggtcaggagatcgagaccatcctggctaacacagtgaaacctcgcctctactaaaaatacaaaaatttagccaggtgtggtggcgggtgcctgtagtcccagctactcgggaggctgaggcaggagaatggtgtgaacccgggaggcggagcttgcagtgagccgagatcgcgccacgtcacctccagcctgggcgacagaacaagactccatctcaaaaaaaaagaagcagtcctgctgctttttcatagagcaggtgcgctgcgttttgttgcgggggggagggggtggtccttcctcatccagaccatttgtattctccaaagctggcaggctggaatgactaagtcaaccaaactgcagagatggtggctgcccctccccacaggagctccatcccaaggagagatcagagctctatccatagaaccctggctggagtggctgaagcccctgcagggaggacccacgcagtgaggggaagcggatgggatcacaattaaagaagcactttggccacgatctggcaaggcagctgtgctgcctgtgggggaccccttctcatctggaccattcgtattctccaaagtctgcaggctggaacggctgagtctacccaattgcagagatggcagccacccctgccctgggaactcggacccttctcaggcagagtccagcctgttgctgttggctggctgggattccaagccagtgggtcttaacttgtgatgtgccatggaagtgaggactgcggaatgattctgcttggctccgtggagtcagccctcttcccaggaatctggaaggatggatttcccaccttgccagggatcctggggccggagtatgtaaaacgcctgggtctctgtgtgtggctgagtggctgctctgctgaaagttccacaaagctctgtgtatcgggcccaaggcactggtggtggggcctcatcaagggatctcctgatccacagttgcaaagatccatgggagaagcatgatttcccagcagggtccacaatcactcaccacttccttggctggcagtggaggttcctttggctccgtgccactgctgagtgggccattgaccctccyaccacttcttttcattctccatgggtcgagttgtttgcctagttagtcccaatatgagaacctggatatttcagtcgaaggtgctgaattcactcaccccttttcattcttctctgtaagcgcctcagaccgcagctgtttctaatcagccgtcttggattcacctgaaggttattttaaagtcatctagtttcatggctttaagaaacacctgtattttggctactcccaaattcatatttcagctcagatctttccctgggcctccagataagacagagctgcgtgtccaacatctccctcagggtatccaacaggcacccacccataacatggaaactcaagtgtctgttctgctcacacagatcagacccaccctgttgtcccctgtttggggactggaaaccccaactttgctctggccagaaatctcggggacatcctctatgcccctcacccacagccaggcagcaaattctgtggcctccaacctcgacgtgcattggagcctgacggacccctgcatttctgacctgggtgctgaaggagccacccctcatcttmagtctattccaaaggagcagccacaattagccttcaaaattttaagtcaagtacatcatcctgtgctcaaaatggctttgggctcattcggagtaaaagctgaagtcactaaaagagactgagtcactgtgtgagcttgtctctttccacccccagtcctgcgtcagcctccgcctctgacagccacagggctgcccctccccctcttcatgtctttacccaaacatcgcgcagggaggccttctctgactcaaagtgcacccccagggcccccagtctcttttctcagctctatttttcccataaaggaatcactcttgtgttgtagaagtcacttgtgtgcgatgtttatccttcccataagctctggaagacagttttgtctcttttgttcactgatgattccaggaggaagaacagtgtctagcacaaggcaggtgctccatgagtatttgtggaatgaactaaacagtttaagtaattagaatccatgaatggaacccttaagctatttgctaggatgggctgtggtgaaacacccttcattacccaaatcctcagcacacctgctactcaccagtgtcgctgacgggagtgaggggcagggcctggtgtccaggccgggggtgctggattttgttctgctcacacagatcagacccaccctgtttccccctgtttggggactggaaaccccaaccttgccctggccagaaacctcagggacatcttctgtgtactgggagactcccagaaagtactgggagactgctaggatgtcttgatcaggaaaatgacgggaccaggtcggtcgtttcagaaaaatctcactggccacagcatggaagaaggatggggtggacaaggctgaggcttgggccattcttgccccttggtctccacacgcgcctctgccttgcttctgctgagacctgggcactggcagccgccctgctgggcggatcaaggcagcgaaagcatttgttctccaaaatgctgatgggagatggcttgccccagccaccttggttgtgaaagaggaatttcaaaagcagttgccgaggatcccactaggcttcaagaacacgtggcctctctcaaattcaaggcgccaaagtgggggcagactgaagggacgtgagggagccccacaggacagacgggggcaagcggcccggccactggggctgcctctgcccagtcacctccctcctccggccttcgttctgctcctttctacccaaggtcggccactcccctgccctataaaaacccaccyatgtccccgtcaagggcagcaggcaccccaggctgctaagacgtgcactctgagcgccttcccagcccagggactgtccccaaggtccagctgcccaggggccctgagcagccactcccacttcttgtcatcacaaccgcttaaggacctgcagatgagggcatcctatcccaccccagccctgggggccatgttcaggccaggagaagccaccaaacactgccaccatcttcctggctccagaggctctgtgccaacaccaggcccccttgggcccacctagcccacagaccttggaggcaggtgcacgagcaggtgcatccatcccatggactctgatgggctgtcaggaaggacgcaggtagagcccaggtcctgcccagcaggtgcagttccaaggctgcctctgggtggcgtgcttggaccagtcaggtgccctgtgttcacctaacaccgcagaaccggcttccagctgccagggcgatgcaagcctgtagaagcacagatgcggtcattcctcagccctacccaggccttgagagtggagggtcaggggcctctgcacaaaggctttgatcccccaaatacacacagacccccactttccttgttagttttctaacacttccatagcaagctaccacagactaggtagcttcagcagcagaaatgtgtcctctgaccattctgaaggctgagagtctgggatgaagacgttgacgggtgtggtctccgcagaagtctctctccttggtctgcagacagctgctctcttgctgcctcttcacatggtcttccctccacgcgggctcacccaggggactctgtgtgacctggtctcctcgtcttataggaatgccagccatgttgaattagagccccacattcatgcctcatttctacttaatcacctctttatttttaaaatttatttatttatttattttattttttttgagactgagtctcattctgttgcccaggctgcagtgcagtggcatgatctcagctcactgcaacctccaccttccgggttcaagcgattcttctgcctcagcctcccgagtagctgggattacaggtgcacgctatcacgcccaactgattttttgtattttagtagagacagggtttcaccatgttggctggtcttgaactcctgagctcaggcaatccgcctgcctcggcctcccaaagtgctgggattacaggcgcgagccaccgtacccggcctcccaaagtgctgcgattacaggtgcgggccaccgtacccggcctaaattacctctttaaaggtcttaccttcaaataacgatcacgtcatgaggtactgggggctgggatttcaacatatgaattttgtgggacacaatttcaatccataacactgacgtaaggttcttgcactgtatgtgaagtggtataatatgtaaatgtgacaattcgtagagaaagaaatgtcttttcaaccagtgatgctggaactattgaatatgcatgtgcaaaaagaaaaagagagcctcgatctatacccggaccacatataaaaataactcaaaatgtactgcagacgtaaatgtcacacctaagactacacagttgctagaagtaaacctaagcgaacatttactgtgattcttgagtggacaaagattttttagctgtgatttcaaaagcatcatctataaaaacaataaaccagcctttatcagcattaaaagcatctgctcttgggaagacactgttaacagaataaaaaggcaattcatagactggaagaaagtattttaaaatcacatatctgataaaggatttatgtctggaatatataaagaacaaaatgcattacagcaccccccaccacacgcttgtctgtggttccactttgtgtggtttcagttaccagcagtaaactgtggtcggaaaatattacatgcaacaagatattttgagagagagagacagagcccacattcacgtaacttttattacagtttactgttataattgttctattttattattatttttagtctcttattttgcctagtttgtacattaaactttatcataggtatatatttataggaaaaaatgtagtatgtataaagttcagagttcagtactatccatggtttcaagcattcattggggggtcttggaatgtatacccagcagataaggagaaactgctgtcataagtaaacaaacaatccaatttgttttgaggtttgggtttttttgtttagagacagggtatcattctcttgccaaggctggagtgcagtgacaccaccatagcccagtgaagccgtaacattccaggctcaagcaattcacccacttctgcttcccaagtagctggaactacaggtgtacaccatcgcacccagctaatttttttttttttttgcagagatggggtctcactatgttgcccaagctggtctcaaactcctgggttcaaatgatccaccctccttggcctcccaaagtgctgggattacaggcatgaaccaccatgtgcagccacaacccaattttaaataaggacatagattttaaaggatgtgggccactttgttttattgtgttcacctttttttttttttttttttttttttgagacggagtctcgctctgtcgcccaggctggagtgcagtggcgctatctcagctcactgcaagctccgcctcccgggttcacgccattcttctgcctcagcctcccgrgtagctgggactacaggcacccgccaccacgcccgcctaattttttgtacttttagtagagacggggtttcaccgtgttagccagggtggtctcaatctcctgacctcgtgagctgccygtctcggcctcccaaagtgctgggattacaggtgtgagccaccgcacccggcctattgggttcactttcctgcactttgcaaataccgcatgtttgactgttgaaggtctgtggccgccccgnnnnnnnnnnnnnnnnnnnnnnnnnnnnnnnnnnnnnnnnnnnnnnnnnnnnnnnnnnnnnnnnnnnnnnnnnnnnnnnnnnnnnnnnnnnnnnnnnnnnnnnnnnnnnnnnnnnnnnnnnnnnnnnnnnnnnnnnnnnnnnnnnnnnnnnnnnnnnnnnnnnnnnnnnnnnnnnnnnnnnnnnnnnnnnnnnnnnnnnnnatgaaccacgcatataagaaagtgaacttaattgataagtgctgtgtgtgttctgactgctccatggaccagccattcctccctctctccctttccttgggcctcgctattccctgagaaacagcaatttgaaattaggccaaccaataaccctacagtgacctctaagtcctcaagtgaatggtcaatcacaagctagacatgattagactcagtgagaaaggcatgttgaaagccgagacaggtggaaatctaggctcgtgcaccaagcactgagtcaacctgtgaatgcaaaaaagaagttcttgaaggagattaaaagtgctaccccgtggaacacgtgaataaggaagcgaaacagccaaatcactgagagggagaaagttttaatggcctagatggaatgatcaaaccacccacaacattcccttaagccaggggtccccaacccccaggccacacagcaggaggtgagtggcaggagagtcagatcagcagcagcattagattctcagaaccgtgcaaaccctactgtgaactgcgcgtgcgagggatcgaggttgcgcactccttgtgaggatctaactatcgcctgatgatctgaggtggaacagcttcatcccaaaccttccccccgacgcctagtctgtggaaaaattgtcttccacaaaaccggcccttggtgccaagaaggctggagccaaagccttaagccaaagcctaatccagagcaaggccccgactcttaaatcctgtggaggctgagagaggtgaggaagctgcagaagaaaaagtctgaagcaaacagagatgggtttgtgaggtttaaggaaagaaatcatctccataacgtgaaagttcaagggaggcagcaggtactgatggagaagctgcagtaagttacccggaacatccagctgagatcatggatgaaggtggccacgctacacagaccttttatgtagacaacatagttttctgttggaagaagatgccatctgagacttttatagctggagagaagccagtgcctggcgtcgaagcttcatargacaggctgagcctcttgtgaggggctaatgcagctggtggcctcagattgaagccagtgttcattcaccattcagaaaatcctagagcccttaagaattataccacatgcactctgcctgctctagaaatggagcaacaaggcctggatggcagcacatgtgctcccgatggtttacggaatccattaagcccactattgagagctactgctcgggaaaaacaagattcttttcataatattactatgagtctgggcatgatggttcacgcttgtaatcccagaactttgggaaactgaggcaggaggatcacttgagcctaggaatttgagaccagcctgagcaacataaggagaccctatctttataaaaaattttaaaattagccaggtatggtagcttatgcctgtgggctcagctactcaggaggctgaggtgggaggatcacttgagccagggaggtcaaagctgcagtcagccaggatcacaccactgcactccagccttggtgacagtgacaccctgtctgaaaatacatacgtatattcgttgacaatgcacctagttcccagagctctaacagagacatacacagagtcatgctgctttcgtggctgctaaaacaacatccattctgcagcccttggatcaaggagttgtgtcgacttccaagtcttactatttaagaaacacatttctggccgggcatgatggcttacgcctgtaatcctagcactttggaagtccaaggcgggtggatcacctgaggtcaggagttcaagaccagcctgaccaacatggtgtgaaaccctgtctctactaaaaatacaaaaattagccaagcatggtggcaggtgcctgtgatcccagctactcaagaggctgaggcaggagaatcacttgaacccggaaggcagaggtttcagtgagcaccactgcactccaacctgggcgacagagcaagactttgtcaaaaaaaaaaaaaaacatttctaaggctatagcaaccatagacagtgattcctatgatggatctggctaaagttcactgaaaaccttctggaaaggattcaccattctagatgacattaagaacactgacaattcatgggaggacataaaaatatcaacgtgaacaggatttgggagaagctgatctcaagcctcaaggatgactttgagaacctgaagacttcagtggaggaagtcactgcagatgtggtggaaacagcaagagaactagaattagaagtggaccctgaggatgggactgaattgctgcaatctcatgataaatttttttttttttttgagatcaagtcttgctctgtcgcccaggctagagtgcagtggcgcaaccatggttcactgcaacctctaccyataggttcaagtgagtcttgtgactcagccacacaagtagcttggattacgggcgcccaccactacacctggctaatttttgtatttttagtagagacggggtttcgccatgttttccaggctggtctcaaactcctgacctcaggtgatccgcctgcctcagcctcccaaagtgctgggattacaggcgtgggccactgcaccaggcccattgcttattttttactttagaacatgtgttgtcatttaaacgtagccaacagtaaacccatgcagacatcagaaaggctgttgatccccttgggtttgcagaacagggctctgagagtgggggccacaggcagagtcttctaaaccctccacagtctggagtctgcaagcgagtgctgaggtctggcttgtttctctgtgaggcagacgctgctcgggagatcctgcaggaagggtcttcccctcctgaggcagacgctgctgaggggggtgaggctcctgcaggaagggcctttccctcccgagtcatgcacagcttttcttcagggttaagcatcgcctctttttttccaaaagaagaaaaataaagcattgtggtaaaatacataaacataaaatgtaccatcttaaccattttaagtatgcaattcagaggtattaaatatgttcatgatggctgcacatcatgaatatatttaatatgtaaaaggtttaatatgtaaaaggatgtaaaaggtttcatctccagaaccttttagtcttcccaaactgaaactcgccaccattaaacattcacttccccctctcccgtccccaccccggcacccaccattccaccttctgtctctgggaatgtgacttgtgactgctccagggacctcttacgtggaattacacagtacttgcccttttgtgtaggcttattttactcagcacagtgtcctcaaggttcatccgtgctgtggtgagtctcggaatctccctcctttttaaggctgaataacatcccatcgtatgaatgggccacattttctcacccactcatcccttgacagaggcttgggtcgctttcatgttttagctgttgtgaatagtgctgctatgaacacggtgtacaaatgtgtctttgagacctgtagggcggtttatggtacagaattgcgtctgcttttctgcagctgtaaacaaagagggaatttttttcacttcttactttgtcaagatttatttcaccagaaattgggagagctggcaggttttttttcaaagggatagtgtcttgctctgtagcccaggctggacatgaactcctgggctgcagtgatcctcctacctcagctcctgagcagctgggaccacaggcacacaccacacacccagctaactggcaggttttaaggccaggtgtaggaattccattaattaattctaagagggaaaaaagaccagagtgggaagttcaaaactgacagagcataaaaaagccagaaatatgttattgacccatggaagattgacacatggaagattgacccatggaagattgacacgtggtagatgattgacacatggaagatgattgacacatggaagattgacacaaggaagatgattgacacatggaagactgacacaaggaagatgattgacacatggaagactgacatggtagatgattgacacatggaagatgattgacacatggaagatgattgacacatggaagatgggatgtgccctgttttgcaggtacagcacacaggtcctggtgagaccgctgaggagggagtgtggcgcggaggagccctgccccttcaggctcaggtgggggcgtgagggtggagcctgaggtagagtcagtgaagagcaagaggaaggtgcggaagggggtcaggggaacacagagcccctgagcttagcagtgagggttgtgggagggcgtctgagcacctttgtgtcagggggaggcgacctacccagagagagctgttgatgctgcaaaaccctcaaagtggtgacagggtagtagtgtaagccaggagggatgggagacagggagacacgggatgaaggtctcattgcaagtgctgtgcatcaatgtcatccgtgcagctgaaaacccggctccctcgctgatggaaaaaattaaaattaaagcttcactgatcatcctaatgccatctcaatggactccttcgccttccccagattttcagttacatcatctaaataacaacaacttcatctctccctccctggaatttaggctccagattcctgtttcctgtcttccaaagtaacattagggacagtgttatggcggttgtctcagactggcatcgcaggacatctgtgaagatggcacawtccctcccttctttgcctcgtgcctctgcaatgagactctgctgctctgttatcaagaggtgaagacttttctctgtcccttgaatccaggctgggctgtgacttaccttgacccacagagagtggcagaggagccaggagggaccaccccaggraaggcctccaggctgctcagcttctgctcctgccttgcagaaccttccctgaaggctgtgaggcagccaggtctagccctctggagtagcagcagctgcgtggagcagctgaggcctcctggaccaaccagtcaggggcgggcgccagctgccagcctcatgagaggcattgccacatccagcccaggacagctgccagatggccaagctgcacagtaaccatagagaactgcccagctgagcccagcccaaaagcctgacccacagaatcatgagcaaagaaaattgtttaacccactaaatttgggagcagtttgctatgcagcaaaagatagctgatactccaggactgcctagaaaacagcctggggcaagggttaagcgtgagtcatttactaagaaaatacaattccaggcagtagtgattcagggaagaattggcagcaaagccaggaacagcgttagtgtctgacacctggctgtgacaagctgcaaagagatgcagcaggttgctcagcacgagtgctcttggccacttgcagggcggcatttcacccccgtctggaagtggcagaaaagaacagccaagagggagacggtgccctcccagcccctgtgacaggtcagcaccaggtggcaccacatggacccaggtgggccaggcagaggcggctgaggcagagaccaggaacctgggggacagtggccctaggaccatctaaggggagagactacacaagcaaaacctgtgcaccgttggaaagtgaggaaagcatcacgccttcacctgcacacagaggctgggtgtgaagtgtcaggggagcaggtgctggtctttctcagtcacgccttcacctgcacacagaggctgggtgtgaagtgttgggggagcaggtgctggtctttctcggtcacgccttcacctgcacacagaggctgggtgtgaagtgtcaggggagcaggtgctggtctttctcagtcacgccttcacctgcacagaggctgggtgtgaagtgtcgggggagcaggtgctggtctttctctggaatgctatttccattcaagagctttatgctgggctgggcacagtggctcatgcctgtaatcccagcactttgggaggccaaggcgggcagagcacttgaggacaggagttcaagaccagcctgggcaatatggtgaaacgaaaccttgtttctactaaaaatacaaaaattatctgagtgtgatggcccacacctgtagtcccagctaacactaatgcatagtattagtttctttattcccaagtgcatccgtgttagataagctgccgatttttttctccaagagcccctcccaggctgtgtctttgccctctgtggctgggggaaggctccttcctgggttctgggctctgtcttaatcatgccggtgcctccctccagggttaactctctggggaagccacctgggtcctgcctcactctgatgaggtggcattaaaatgccagagcataggaagcctggctccgttgtggtctagcagcgagcactgcagctagaatgaggcagatgtagctcctgggacaaggtggcaccggcagccgcctggagagcaaccggttgagggaaggtcctggcaggggctgtggctcaggcattggggaggcgtggggtggagggtggctgggcattgccaggtggtggatgccagtggaagagcaacaggaaactgagggcatatgccaaccgtgagagcccaaggggcccctgaagagaggcactcgtctcctctgaggaagggcggccaggccgagtggccagcgccagccccagttgtgagtgacaacgccccagagcgtttaactgctcagcgaaggcagggccggggtgaagggactcctggctgcatcagccaccctgccatggagaagcttctggactgagaggtaccggatggtcggttgctggaggcacagctgaagccccccttggagtcagccctgtgtgatgggggccaggaacccgggggacagtgcaccaccttccaggtacacgaaacccagggcaccgtgtgacatctgacgccaccaggaagaccagcaggagcctggaaccaagaggcagaagtgggggtgctctctactccccttcccgccagtgacccttggggcctggtgcttcctgaccctgaaatactggctggcaaggctgggggtcctcatctcctaagggggcacgctgttaacaggggccacaactcaggtccttgctgccgggaactgggactctggtgtccagggttgaggcgggagaggagtggctgtcttggtggagaagctggctccgagcagcggaggatgtggggcagctgcacacaggcaggaagggacctcgtggggccaggccaacctcagggtgcccttgccctgcatcactgtgcttgggcaggtgcagccacccccaacccagtaagagtgtgatcattaggggttcagtctcctcacatagccagggaagcccgcaagacctacagaagtgatagtcaagggagaggaggtgaaaagcgaggatggaggaagaagggagcccctgtcacagcccagtgagaagcgatgatggaggccagctgcagggctggaggctgtggtgtgccccactaactgtgcaaagtcttctctcggggacaggccccagaaaccatgaggagctcctcccccaacatgggtggagaagtcggactgtgtggcccgaggcatggactggccaccatggtgcctgctcagacctcccctctagagacccacactgaggagtggggccacggcctccaggcatccccaccactcgctcagcagaattggagttgtctcgttctgctcaggctgccctaacaaaataccacaccaacccggtctctgaaacagcagacacttctcatagttctggaggctgggagtccaaaatcagggtgccagcacagtcaggttctggtgagggctctcttcctggcttgcagacagccaccttctcgctgtatcctcacgtggcctttctgtgatacatgtgtggtggagaatctcatcctctttttagaaagccaccagtggtgttgaattaggaccccacccttgtgatctcattgcacctcaattacctcctaaaagccttttctgcaaacagtcacatttgaggtcaaggcacaataaataaacttttggggagacaattcagtcatatctgactgagcgtgttaaagtctccaaccatgatcatggattcatagctttctccttgcagtttttgcctcacacggtttgattcatatcccttaaggattgttatgtcttcttgaacaactcgacccctttatcattatgaaatgctttctcttcatccctggtagctttctttgctctgaagtctgccttgtctgaaattaaaatagctactcctgctttctttccatcagtgtaaacacagtgtctctttttctactcatttacttttagtctatatgtatctaactgtaaagtgtgtttcttgtagacaatatatagttgggtatcattttttatccactctgattttaaaatctctgttttttttgttttgttttgttttgtttttcagagtctcactctgttgccaggccgaagtgcagtggtgccatctcggctcactgcaacctccgcctcctgggttcaaacgattctcctcctgggttcaaaatgtcttctgcctcagccccccgagtagctgggactacatgtgcatgccaccatgtttttttttttaagtagagacgaggtttcaccatgttgtccaggatggtcttgatctcttgaccttgtggtctgcctgcctcagcctcccaaagtgctgggattacaggtgtgagccacctcgccctgccaaaaatccctgtttttttaattgttgtatttagaccattgatgttcaaagtaattattcatataatgggattaacatctgccattttgttaccactttctatttttttgcccttgttcttttttcctgtttttttttcccactctttttctgccttttatgattctaattgagcatcttatatgctcagwtccatttctctcctttcttagaatatgttagtgattgcactagaatttgcaatatcatccccaattaatccaagtctactttcaaacactccactgcttcacaggtaacatgagttccttacagcaacaacataatcttagctccttcttcgtgtcctttgcatgatttatgccatttgtttccatcatgtctaagcatatgtaagcatatatgtacataagacacacacaagatacataaggagccatatataattaaatacattgttgttattatttagagctgttatctgttagatcagctaagaataagaatattaaaaattttattttacctcactgttccttctttggtgttcctcctttctttacgtggatttgagtttctgatctatattgctttcctctctttaaaaagcttcaagatttttgcaaggcaagtctactgacgacaaattccctcaatttttgttttcctgaaaaagtctttatttctccttcacttttgaaggataatttcatggggtgcacaattttagcttggtgggtttttttctctcaacactttaaatatctcactccgctctcttcctgctgtgtggtgctgtggttcagatgtcccctccaaaagtcctgttgaaatttaattgccattgagacaatactgagagatgggacccttgagaggcgattagctcctgagggcttcaccctcgtgagcagattagtgccattaactcaggagtgtgtgcgttgtcttgggagtgggctcctgataaaaggatgagttcaggctgattttttctctgtctcccctgcttgcgtccctgctctgcccctcaccatagactgaccctggccagatgccagcaccaagctcctggacttcccatctcccagaactgtgagccaaataaacttcctgataatttaccccatctgtggcattctgttacagtggtagaaaatggactcagacacatggttcctgagagaaggtggatgtcattcttatcttggttccgctacaggcaaggtgttggtgttgggaggttttttctggcttctttcaaaatttgttcatgtttgattttacatagtttaaatatgagatgcctaggtgtcattttgtttacttgtttgttttctttgggggcagtgttttttgttttgttttgttttgttttggcatttatcctgcttggtgttctctgagcttcctggatctgtggtttggtgtctgacattaatttggaggatccctcagtcattattgtttcagtttttttgttgtccctttcttccttccttccttcctttcttctgcttctggtattatttgtgttacaccttttatgggtgtcctacagcttttgtatattctgttcttttwtttttttttttttttttagtgattgttctctttgcctttcacttttggaaatttctattgagctatcctcaagctcagaggctttttcctcagctgtgtccagtctcctaatgagcctatcaaaggcagtcttcatttctgttgccgtgttttctatctttatgtttctttttggttccttcctagactttccatctgtctgcttacattgtccatctgttcctgtgtgctgtctactttacccactagagctcttggcatcttaatcattgctgttttaaattcctggtctgataattccaacataactgccttgtctggttttaatggttgttttggctcctcaaattctggtatgggtttttttttttttttttttttttttttttttgccttttagtatgtcttgtaatattttcttgatagccagacatgatgtacagagtataaagacctgccgtaaagatgcctttagtgatgtggttgtaagatgtggggggaggggaagcattctaraaccttctaaccaggcctcagtctttagtgaaactgtgcattgggctgtgagcttcacaagggtttctcagccgcccacccctcactttcttagatgagacaggatggctcgagggggcggaagttggatatttctcttcccctggcaggttatagtctagctgaacagtttctcctgagggcagctcttgttaaggacagaatgttctggtgtgtttcaaaatgattccattttccatcctcctacctgcagaatgagatttttctgatattcactgtgagaatgtggtagaactcctggggtaaaactcacatacgtgcggtgtccaccatgactgggtccccctgccgtggtgtcccccatgactgggtccccccgccatgatgtccgccacgactgggtccccccgtggtgtcccccatgactgggtgcccccgtggtgtccccatgactgggtccccccgtggtgtcccccaggactgggtccccccatggtgtcccccatgactggatccccccgtggtgtctgccatgactgggtccccggaggagtttggagttgcccacactgagcctccagggatctatcagctacagttcgggtttccccgccctggaacaggctcctgaggtggtttccacggatgcgtctctgctccggcaaaccatggccccgtcattgacaggccagcgcccgtcagcccctcaagtcttgggtgtaccaggtacctacgtcttcaccgctgttttgggtgtgggaagaattgttgattttcagtctgctcagctgacttgttgttagggtggagcagcggctcctgagctcctcacatgaggtaccagaggctggaagtccagtttgggcaatggcaggtgtagactcagaatgttccacgcgcaggggctcccccgaaaggcgttctttccccagggctcctccgagcctggctagtacggtctcgaactgcagtctgaggctggtcctgcccagccacctaccttccctctccttccacaggtgccacaaccacacccccacctggggttccccacctgcccctccttcatctcccttctacccctcgcagggagcccccatcccataaatccacttcctattctgccttggcatctgcaggacaagtcccaggtggccttggaatgaacaagcccctcccttctcacgcgtacttctcgagaatacctgaagaatgtgccaggaatgcaaccacctggtctagggaaggaccggccggacagccctggctctgctcctgtgcctcctagggcaggatgtcccacacactgtagccctatgagtcacccctggctatggaacccagagcagagtgcacctttgggatctctcagctgtggtgtgaagcgggacacacatagacaaggctccattcgttctgggcagctttcccgagcctcggggacccgctcaccatggatcctaagcttctgctgttccctgctgcctgcctgtgagtaataaagttgctttcataactggttgtgtgtgtgttctgtctccctggactcttgcacgtgggttgatgctggttcatggtattgggagttctctagagtcctcccctgaagctgagtccagggcatgctggagtccagggcgtcagtcaggtgtccaggttgagtccagggcatgctgtcttagtccagctgtgttgctgtaaagcatcacctggggctggctcatttgtaaagaaagaggtttctctggcttacggttctgaaggctgtacaggaagtctggcaccagggtctgcttctggtgacagcttcaggagcttccactcgtgggggaggtgaaggggacccatcatgccagggtgggagaagaggggggtgggggccaggctctaacaacctgagctcacaggaggtgagagggagaactcagcccgacaagaggggtaccagggatcacatttcaacatgaggcttggaggggaccaacgtccaaacaaatcaacagtgaacctgcttcccagtgtctgcttcctggggagtgccaactgacaccagccccagggtctgaatctcttggtcctctggagctgtggggtgaatcagtgcttctcacgggggagcttcctgtggcttttttttttttttttttttgagacagagtctcactctgttgcccaggctggagtgcagtggtgtgatctcagctcactgcaacctccgcttcccggttcaagcaactcttgtgcctgagccatcgaagtagctgggattacaggcacccaccaccacacccaaccaattgttgtatttttaatagagacgggatttcaccacattggccaggatggtctcgaactcttgwcctcaggtgatccacccaccttggcttcccaaagtgctgggattacaggcacgcaccaccacacccaaccaatttctgtgtttttagtagagacggggttttaccatgttggccaggctggtctcgatctcctgacctcaggtgatccgcccgcctcagcctcccaaagtgctgggattacaggcgcgcaccaccacacccaaccaatttctgtatttttagtagagatggggtttcaccatgttggccaggctggcctgtggcctttttggtgggcctcccctggccttttaaatcaggcagccatagctctcatctgctggtaatcctcttctgttcaactgtttctttataatttcattcctttctaccagttcagtgattgtttctccagagagttgccattctttttttttttttttttttctttggggggacggagtcttgctctgttgcccaggctggagtgcagtggcacgatcccagctcactgcaagctctgcctcctgggttcacaccattctcctgccccagcctcccgagcagccaggactacaggcacctgccaccatgcccggctaattttttctattttttagtagagacggggtttcactgtgttaaccaggatggtctcaatctccgaacctcatgatccgcccgccttggcctcccaaagcgctgggattacaggcgtgagccaccgcacccagcccagagagttgccattctaacattcatacccatgacatctacattttaaatattttattgatgatcactatgggataataaaggagaaaataatttttaaaaagactctgcaaaattacattagttctcctaatcatgagatgcttgcttcagagtttcaggatccacccaacatgggaagtcaaagcctctytgggatactacggggctaaggtgcacagtcgctcaggttgtgcacaacacaagggcaccccattcacatgaaaacatcttcattattttgaaaatctgcagagcactgtgtagacacattagggattaccttacatgaggctatactaatttatgatagcaattatttatgtsttgttatggaaaactgggagacaaaaatgaattactgttttgagatcttacgaagcttggaagacagattggccctggggaggcagcggtggccgcagtttgcagggaagattgctgccgaggaggaatctgtgcacacgacaggctccaacgatctgcacagggccacatggggctttggctgaggactaagcttcgcacgcactgcacaaaaccccaagagctgagcaaaagtggccacctgggagccccctgaaagctgcaccaggacaaggcccgtctgaccaggtcaagtgcagagccccgaggaacctgggttggtgatggagacctcagaaagtcccggccactagaaaagaagcatttacatgattgaaaaaaacgtttgcagaaaagaggtgaaatgacagaacgagggaaagactcagcagaatgtagcccagagacatcgcgatggagacatgagctcactttctgtctcctcatcaaccaagaaccccataaacaagggcagaatgctccctgcgtccagcactgagaccgagacccaagatgcaccaagagattgagaaactgagatccacagatgcacaaagacccacagacgcacaaagaccctcagacacacaaagcaaaacgcgttctgatgccccgtgtcagacgcgtcctgaaggatgagcgatggtttctgcccgctgagaagtatccatctggagctgagatttaagcccctccactcaacggcagcaggagtctctccccacgctggtgtgacccacatgcagggcacccacacatgtgaggggcgcccgctgcgaggaggtggtgcctgcgccccctccaagctgcacctcaacctgtcccaccctaaagtgagacggactggatcccccaccggccagggctgcttcgcatcacaccggttccccctgctctctgtgccatcgtcccctccatgtggcttcccaaaccacggacacctggcatctccatcagccttggccctgggcacagtgagtgttttccatgcatttgtgggatttttaaaataaacttctgttgccctcgttagattataggccttgtgagaacagggaccaagtcttttatggatgaggggcgggtgtccggagtttcaacatggcacttccagggctacaaggaggtgaatggatgaagagctcctgttgagtggagacagaggagccctgaggcctctttatgaaaaagcaaaaataagcaccatggagcaggtggtggtcgtgccactggtgggagtgggatcatcctgctaggcaccaaccatccccaaccaacagaggaacacaggctctgcctcctgctccgcatctcctcattacacacagaaacgtcctcggctcgaggacaaaagcccatctgtattctgatctgagcaggastgggtgccgccctcacatctggagggagcctgagactacccgacaggagccacaggtaccacacggtgaggacccccttccagacacccccctgcccagctcctgtggaccctcccccaacctttgccaggggggaccgtggtcctctgtggcgtgtcgtctgcacccgtcttcatcgggggcactagcacctgccacacactcaacagcatcacttcccactggaaaaacaatgccacaagattcttcttggcgagaacaaaccagaaaatgggacctgaagaagccgagagcctcgcctgtggtcagacagcagctgagcatgggcagaggacagagcccaggccgagggccgcggccgcccccacccacaaagacccctgtcctgtcctgggtggaattcccacaccagctcaggaggagccccacctcctcacccttccttgtcctcattccagggaaatggtctggaagagcaccagctccccacggagctgactgtttctctgcttgcaaatttcatgagatttctgattctgagctcgaatcttctctccactttcacctcttgccattcctcatgaccggtccatttcaacatcagggccaattgttccttgtacaattgcatcttttccacagtttagtacaagaaactaggattctcttcatgtaaaagctatttgatgacaaacaccttgttctaagtgactgccaggaagtgcttgctaattttaaattctacattatgatgaggcaaagttagtaggagccaagggacagagcactcccatatctcctcagacactcgccaggtgcatctgtggagaagccgcccagtgagtccttgcatctcacaggtgcttctcacaggtgcgtctcacaggtgcacctcacaggtgcatctcacatgtgcatctcacaggtgcatctcacaggtgcgtctcacagctatgtctcacaggtgtgcctcataggtgcgtctcacgtgtgtctcacgtgtgtctcacaggtgcgtctcaggtgcgtctcacgtgtgtctcacaggtgcatctcacaggtgcatgtcacaggtgtgtctcacaggtgcatgtcacaggtgcgtctcacatgtgtgtctcacaggtgcatctcacgtgtttctcacaggtgcgtctcaggtgcatgtcacaggtgtgtctcacaggtgcatgtcacaggtgcgtctcacatgtgtgtctcacaggtgcgtctcacgtgtgtctcacaggtgcgtctcacaggtgtgtctcaggtgcatgtcacaggtgagcctcacaggtgcgtctcacaggtgcgtctcacaggtgtgtctcacaggtgtgtctcacaggtgcatctcacaggtgcatgtcacaggtgcatctcacaggtaagccttacaggtgcgtctcacagctgtgtctcacaggtgtgtctcacaggtgtgcctcacaggtgtgtctttttgactgtgtcaagtccaacccaatcagggtcccccagcatcatcagtaggtatgtagggaagtgagatggggaaaagatagaaccaatagtgtgccatggagcagttacctctgggcccctgcaggtaagggagctgcggtgttcacacacaactcccatggtcatggctcagggttccccagaggctgtggactccttgccgccctgaacctactcacctacaatcacgacgggctcctggggcaggacaaagccacaggtgaggaacgcggtgctgcgggtggaagctgctgtcacagtcgtgttagggtgagtggactatggccgcagactgtgggctcctcccagccaaccctcactcccgctagcgccccaaatcttcagtccagcaccccttccccgtcccacccactctccacactgagccctcccagccaaccctcactcccgctagcaccacaaatcctcagcccagcaccccttccctgtcccacctgctctccacactgagcccagccactccacgctcccttgggcaggtggcaaggcagagcctgaggtcagctgccayccccagccccaccccagggccctcatgcccccagcaaggcctctccagctctgcggtcccactcaagatgcgcttagctcatttcacacgcaggtgagtgtctcagttctgcgggcacggaggcccctgtgggagggaggttggcaggcccctcgctgacggaggggagcaaggggcaaagtgggggtgtccagaagggggttgtgaggaactgggggacgggaaagagcccggagaggaaaaaggaggtggggaggggctgcgtgtgcatagacctcagggtggggcaaccgaggacctgaaggctggtttccggccgccatcctcacatccaggcgcaatgtgagctcatccctgggagttgggaaatgcacccggcaggctctggaggctgttctgggactgaatgcaagccaggccgaccctccccccggccccaaaccnnnnnnnnnnnnnnnnnnnnnnnnnnncagccactcttctcccgcctcaaccttggacaccagagtcccagttcccggcagcaaggacctgagttgtggcccctgttaacagcgtgcccccttaggagatgaggacccccagccttgccagccagtatttcagggtcaggaagcaccaggccccaagggtcattgccgccacccacatcccccactcccccgtccccagtgagaattcactatttttaggaaaaaggggaagcctctcagcagatccttgaaaggaagtgactttgtgactaagtggaggcaggaacatcatggcacaagggcacacgtcgcacacccagctgggcccactgtggacggcgcagatgctgcctcagagcagcctccgagacaggcagctgcagcggtgcagcccagggccctcgcagaagcttccccggggcctggcctcgtgctgagagaactctgcgctcctgagggcacctggctgtcatgcacacgtgctcacacgaacacacacacctacacgtgcgcacactcacactccgtgcacacacgtatgtgcacactcatgcacgcgtgcacacacgtctaccagctgagtgcagtaaaagaaccacatgaaaaccttgcatcctggttaaaagtatggtgacaacatggacagataaactggaaaagatgggaagaaaccttaagcccaggatctggcagcacaaaggtgcctggaaagcgacaatcagcgtttttatattcagggaaatcaggaacactgccacccgcccgccaggccggcgcccatgccagacccagccaaggtgcttctggccacatcacccctgctggcctgcagggagctggcccaggagccgagaggcctatgggagcaggcaaggcttgctgaggtgacagcggagaggagaggtcgggctttgttgccaggcagccccccaacattcaggtcctttttccaccgaaagccatgtggcctcagagcggcgtcaccccgaagcttgtcccagccggggcctgacagcaggtaaaggctgactagcaactctgcatccctcagagtgtgggggaaggtggatgtggtcccacctccacatccagggtccccttgctggcctctgggcatttgggtcctggtgtgattacccagccccctctccctgcacaggggtgaactgcatctcctggaggcagggccagtgccccaccacctccccagcacacccgagcccaggtctgggctcccaggagggcctggggccacctgtgggaccaacccaaaccctcaggcagctccaccagcagaaagcgtcatgctgtgtgtgggataacctcctcaggggattagttctcagggcctggtccgctagaagccaaatgcctgtgcccagccacccgtgacgcctgcaacaggcaggagatcccccaacagttactcccagccttcattccacagggtctggttttcctggaaggtgggaagtcccagggtctgaggagagggagcgcaggcccccatttgtaggagtgagtcagctgacccgcccccggggttcctaatctcactaagaaagactttgctgatgacagggtttcctgggagtccatgcgtgcctggagcagcagcgtctccagggacaggcagccaccatgagcctcagtgaggagcaggcccggagctttctggaccagaaccccgattttgcccgccagtactttgggaagaaactgagccctgagaatgtggccgcggcctgcgaggacgggtgcccgccggactgcgacagcctccgggacctctgccaggtggaggagagcacggcgctgctggagctggtgcaggatatgcaggagagcatcaacatggagygcgtggtcttcaaggtcctgcggcgcctctgcaccctcctgcaggccgaccgctgcagcctcttcatgtaccgccagcgcaacggcgtggccgagctggccaccaggcttttcagcgtgcagccggacagcgtcctggaggactgcctggtgccccccgactccgagatcgtcttcccactggacatcggggtcgtgggccacgtggctcagaccaaaaagatggtgaacgtcgaggacgtggccgaggtgggtctgtgcggagcctcagggaggcggctgtgtgcatctcttgcacctgtcccaggtgtctaagggtcagctcggatcctcaggcctccagggaggcctcttgtcagggcacaggctagttctgtgctgaggagcaagtacctagagccccctcccggcactgtgccctggccgcctgcctctccgactcggcttctggctcaagctgacatcgcatggccactgagttggttagacctgagtctaggagcctcggctgaagcagactcaggctcaaaccggggtgcccctgattctgcatccacatcccatggtggggaccatgtagtccctgtgaggacccctggcttccaggaagactgaccagatgggggcttcagggctctctgggctgggagggaggccctgccttgggatttgggaagaagaggtcacagtcgaaggtggtgcagacgcccacagggagggagagccaggggaaccccaaacttccactgtggcagaagcagctttatcccatgggagcccacgccagccgccaggggagaacaaacctggtagccactgagcacaggggtccagggtgggactggggagggacaagagacagaatcgagacaggctcactggagtcactgaaggagggaagggcagggcctgttcatgcaaagcctgggctagggcagacgcttcccgaggacagaggcggtcctggcgggactggagaacaagmggggtgtgaggtgcctgccagactgggtgagggcagcggccagcagagacctggaaaggccctgaggagctgcccggcaagggggctctgaggaagaaggggaggggggaagccccttctccctgtcctgcacccgtcccagcttcctctccccttttctgtccccacagctaaggaggctgcaagaggcccaggcagcctccgctcttgctggatgagccttgggaattacccaccaggcygccagcccaggggcaggtgtggtccctccttcccaggcagctggggagtggcaatcctggtttgttttcgtttgtgggttttttttttttttgagacagagtcttgctctgtcaccaggctggagtacagtggcatgatgtcagctcactgcaacctccgtctcccacgttcaagcgattctcctgccttggcctcctgagtagctaggactagaggtkcccgccaccacacccggctaatttttgtatttttaatagagacagagtttcgtcatgttggtcaggctgttctcgaactcctgacctcaggtgatcaacctgcctcagatttccaaagtgctgggataacaggcgtgagccaccgcaccaggccggaagtggcaatcctcttatcccaatggcagtaagcaagcagcaaggcagtgacctagattcagtaatccccgggttaccttcatctccacctccctcctaagaagtggggcacccacaaatcaatcgtgcatcaggagcatgagttaccaggaagccaggaaacttcacagcagtggggcctggggtggacaccagctgctcctccctccccccgttccctcctccctcctcccctcactctcctgccaccctcctccctccttttctgccatcctccccstctcccttccttcctcctgcacacaatccccaagacaacttctcatccccaccctgtcccaaatmtgggctgtgtctttcttgcccccaggagtttgtcccccgctgccaccaccccttcacccctttgtccccacccggctgatggtgtctcttccctgctctgcgggtccccctcaaactgctgggctgtcctaggtccgtccctcggcctggcctgttccccagggctgttctaggtcctgccacccccacccccagtgccatggccgcacctgccccaggactgacctccgaggcctctcccctgcccagtgtagctggtgccattccaaggggctgggcatggtgtctgtccctccattctgtggagtcttagttatctcagactaagggaacagaaacttgagtctgaattgccaccaaaaaaagcaaatcttcatgaagtgcaaatcctcatgaagtgcaaagcctcatgaagtgcatctcagcaccctaagcactgccaagtggcttctgggttcatgtctcagtttacagaaggggggactgaggcagagcacacctcagtctggcccactgcaccctctttggagggcgtgagccgcaccggccagttcaggagagcagctcgtggctgtggtggaagagtccctcagacggggcgtgggtggccagcacgcaacacccgggccacccggagtctcaccctcctgcccgggccacccggagtctcgccctcctgagccttgtctccctgtttacattggggaactaatgtctgcctctcaagggtgctgcagcggctaaaccagcctgctcctgagcacagcgggccctgagtctgcagggcaggcaggccccgggtaacccgctcctccctgagctgcaagcgtccatcctcctggagctgagggtgccagcccagggtgaaggctgcagtagcctggcctgtgggccctcctgtccccaggggtctgtcccaggagccaccatggagggaggggctgcccagggctcacactctcgggcctacagggagcccaggcggtgccaggccacgtgggaccagcttctgggaggtgcagggcttcagctgatggctccaagtccctgtctgctcccagaaccccacgactacacatgttgtgtgtcacggcagccccttggggagacacagcgaatcccagggcctgcacaaggggggccctgccgggactcaggactgagcacaaccttcctggagcctggcccaggcctgggcatggattgtgaaccctaaaaccttgggctcaggaaccacaggtcccagaaggcggacaccaggcccccctccatccctcccaacatgtcagaagccaatgggccagccgggtgagaggccctgcccagctacccagtgttcatggctcctagacaagcctcttggcaggaaggaagcacaggtcgggtgcagagagggaggagcgagtgggcctgtgaggtggcatggccttccccatcccccgctgtgcaccccgggcagggacgccgcccacacctgaagagggggaagccaccagcccccccatcacccctttgtggctcctcagacctgcaagagttcacagcgagggcagctgggatggacgatcctggtgggctggtggggctcggccacggccaccaagtggcggggcaggactcacaccccagctctgactgtgcagcggtttctgagcccagccccagccgaacagccacggaccccgcagtgctgtgcatgcagcctcagcctccaccaccttccagctcctctccctgggaccgtcatgggaacccatcccaaaggcccgtcccgggaccctggtgggtcccctgccccctgccccaaaacacctcatcacggggtcctgcacgtcgccagcagtcaagacccttcgactcagtcctatggtggtctctacaaggctggacagagcaggggcgttgagaacacgggctgggtgggaatccggagatagagggaggagggtggcaggaccggccgtcagccatgctgagcacagacggcagaggaggtgtggggcttgggcagttggaggtgctttggagaagccacagtgggtgtgaaggccccagagcgaggcccagctgctcggctatgtgagcacacacagcccccwggcctgctagaggcagagcaaatgcagggggttcccaggagcctgagagtccacagctgccacctgctcccagacaaggctcctggcatgtctgaccaggagcctctggggaagtaggraagcccagactggacagtggagaggaagagaccagcaggcaaggaccccccggccaggcatcactacaggggacacagaacccagagggcaccagagaggagagacggggggccagcaggggccacgtgttaatcttcaccgacagacacacgatggtgtggctgcatttcacaatgggtggggcagctggcagtcggacagggaggccgagggatccatccctgtggccgaggggagtttgcagggctgtcatctcaggaagtgaaggctgggctggggtcgggctgctgggccacgaggggcagcgggagggagccgctgaggctggaagctgcaccagccaggctgggaccagggtggctgtggcccggctggtaccgagtgcccatccatgcaagggcagcagagtgaccagacgctggggaaaggagagcaggtgtcagtgagagagtggccggatgtttccgcgtgggactctttgcagtctcgatggcagacttacaaaaaagtaaacattcccctgtggtgttagggaagctgaggagggcagagggcagagtgcaagccagggtttggagcagatgttcctggggagcccctgggctgggccagctgctcgcagaagcctgacaaggtacagggaaggaggaacgaggggcaacctcactcaaaaccagctgctcagaggagcatagcttctggcagaacctccgcggtggccaagccccaattccggctgcctgctctggacctctaaggagctgttcctctcggtcctaagggtgtgggggctggtgagacacaaagaggctgcagtcacaaagcctcagcgtgaaggtctcagtgctgggaccaagggtgtatctggcacaggcctggaaggaccagggagtgaatggggccagtggtgaaggagagaagctgtcggcataaggatggtaacggcagcccacctcagctgggacagctgaaatggagccaggtgcctgctgagaccagtgacgcagccaggaaggcaggggacccaggagcagctgtgaaggagaaaagacggcagacgaacgggctgagagagcattttacagagtcctgagtgcrcttaaatcccaggatggggagagactatgaagaagagaaggtgacaaatagggtgaggttcttgggtggagggtaggccacaagagagaggcaggaaggctctgtggctgttcccatactttctttgtgaaacaagagctgtgaaaacgtgtggggcagagagaagtgacagagtcaggtctgagatccaggaagaaactggtagagacaaagctggcaagagaagtgaggctgaacattsatcaaccatagcctgtgtgactatggggcaccatctgagggtcactttgtgtggatctgtgtggctccatctaagagtcacattgtgtggatcctgtggcactgtctgagggttacattgtgtggatccctgtggcgctgtctgaaggtcatgttatgtggatctgtgtgacaccgtctgagggttacattgtgtggatccttgtggcactgtctgagggttatgttgcgtggatctgtgtggcaccatctgagggtcacattgtatggatttgtgtttgggaccatctaagggtcatgaggatcacgttgcgtggrtccatgtggctccatctgagggtcacgttgtgtggatttatgtgtgggaccatcaaagggtcatgagggtcacattgtgtgggtccatgtggcaccatctgagggtcacattgtggggatttgtgtgtgggaccatcaaagggtcatgagggtcaygttgtgtgggtccatgtggcaccatctgagggtcacgttgtgtggatctgtgtgacaccatctgctatctcagggtcacattgcatggattcatgtgtcaccatctgagggtcatcctgtgtggaactgtgtggcaccatctgctatctcagggtcacattgcatggattcatgtggcaccatctgagggtcatgttgtgtggatctgcatggcaccatctgaggtcatcctgtgtggatctrtgtgrcaccatctgctatctcagggtcacattgcatggattcatgtggcaccatctgagggtcatgttgtgctctttccagaatcwctggtatatgtccaggtgtcaygctgtgatctgtgtggcaccatctgagtgtcacgttatgtgaatccatgtggtatcagctgagagwcatgctgtgtggatccgtgtggcactgtctgggggtcacgttgtgtggatttgtgtgtggcaccatctaagggtcatcttgtgtgatgccatctgaggatcacatgtggatccatgaggcaccgtctgaggatcatgttgtgtggatccatgtggtgccgtctgagggttatgagggtcacattgtggggatctgtgtggtgccatctcagggtcacgttgtgtggatctgcgtggcagcatctctggatcacgttttgtggatccatgtggcaccatctctggatcatgttgtgtggatctgcatggtgccgtctgggggtcacatggtggggatctgtgtggtgctgtctcagggtcacgttgtgtggatccgtgtggcaccatctctggatcacctgtggatctgcgtggtgctgtctgggggtcacattgtggggatctgtgtggtgctgtctcagggtcacgttgtgtgggtccgtgtggcaccatctctggatcacgttgtgtggatccatgtggcaccatctctggatcacgttgtgtggatctgcatggtgcckagggtcacattgtgtggatctgtgtggtgccgtctgagggtcatgttgtgctctttccataatcactggtatatgtccaggtgtcatgctgtgaagatcagcaaccagggaaggaccccaggtgagggtgtcagtgaggttggcaagggatgggtaaaaggatgggctccaggtagaaagggagggaaacagtaacagagactctgaattcakcagggagcacacatggtggccactgtagcactgacggctggtggaggagacactgtccaaactgccacaggcacaacaggcaccacgacaagcaggcaggagtgtgctgtgcttggcctcaggggacacaggtgcagagatgagccctcgggggacgcaggtgcagagatgagccctcaggggttgcaggtggtgagatgagccctccctcagggcccatccctgtttcagatccaataaagggatgctggctccactgcccacgctgccacccctgccagggctcactcacccgtcttcctgctccaccatcttttaaatgctggttttccttcaatgccagcccacatggctatgggcagcagctgtatctccaagaatcaggaaatgaggagcaggaagggtgggtgccatttaggagcacgctagcacctcggccagcccccagcaggcttcctctgacctctcaaccttgctgcaggggaagggggtggaggggagttgcgaggagtctgccctctgctgctgcagggccaccgtccctagaaacagcaggagatgtgaggcgcatcccaggagctcccrttcagctggcgcagtggctgagggcagagcctgttatttttgccccattgactggtgaggagaaggccacagaaccaccctgtgcccrctgcaggtcgcacaggtgggaagtcctgaccccagcagggctgacyccggagccgtccacctgggtcactgccccagggcaccctggcctcatgtaaacaaatgtcagaaccaggaagtaagaggagggtctggggtcacatccaactctctgaaggacagaatcccagtcaccggggggtgtctggtctcagtaaccctcrctgtgtctgagctgaggcagagctcagctgacctgttccttgaggggccggaacctaagagccaagagaggaggggctgctctaaatctggtgggagtgagggtaggagtgagggkgggtgggtaccccctgggagccagaggcaggcaaagttctcatcayggtgggccccagaccccagggggcagacccctgggagtgtgtgcctgggaggccagaggggtggaggacagaccccaggagtgaaaggactcccaccccggcctgccagctgcacctgccctggttaaagtgtccgacgaacaagcccccaattagaatgggcccatcccacaccctaccaatggctgtctctcagggaagagtgtaggagtgtcctgcagggggctgaaggcaggagagggtggcgggcaccaggaggcttcagggacaaggcgagcaggcaggctcaacaggcatccaggaagcccgacgtggccggagggcggcaggtgcgkgaggtgccaggcagggcggggccccccatgaggcctgtccaagtctgctggactgagcactggggggcaccagcatcctccgcacaggggtgcatggagccaggctggagcyacagggacaggcccagctttcaccgcccggtggccacatcccagtgcccagcagggcccctgggcacctcacacctggagggcagcagcccccacagagcttgacgacaaccccagtggtgcgggctccaggcccacggtgcgacagcctctttagcctctttcctctcttgcggcagtgccctcacttcagctcatttgctgacgagctcactgactacaagacaaagaatatgctggccacacccatcatgaatggcaaagacgtcgtggcggtgatcatggcagtgaacaagctcaacggcccattcttcaccagcgaagacgaagatgtgagtgtggggggcacctgggcagccgcgcgtctgcctccctgcctgcctgcccgcccgcctgttctgtgctgcgcatccacctctttacctgcctgcccgcctgcccgtgtgttctctgctgcgtgtctgcctccttacctgcctgcccgcgtgttctgtgctgcgtgtctgcctccttacctgcctgcccgcgtgttctgtgctgcgcgtccacctccttacctgcctgcccgcctgcccgtgtgttctctgctgcgtgtctgcctccttacctgcctgcccgcgtgttctgtgctgcgtgtctgcctccttacctgcctgcccgcgtgttctgtgctgcgcgtccacctccttacctgcctgcccgcctgcccgcgtgttctgtgctgcgtgtccacctccttacctgcctgcccgcctgcctgcgtgttctgtgctgcgcgtctgcctccctgcctgcctccctgcccgcctgcccgcgtgttctgtgctgtgcgtccacctccttacctgcctgcctgcctgcccgcgtgttctgtgccacgcgtctgcctccctgcctgcctgcccgtgtgttctgtgctgtgcgtccacctccttacctgcctgcctgcctgccygcgtgttctgtgccacgcgtctgcctccctgcctgcctgcccgcgtgttctgtgctgcgcgtctgctgggctgctgggctccacgtgctcatctgcacatcgctgtgctcctgtgtgtctgtgcacacctgtctgtgtgtaagagagagagatagcttgcgtgcccaccctgtgcacctgagcttgtgtgtgccaatccatgtctgcctgtggggcacagcttcctggcgtgtctgggcaccctcaggcgagcatgtttctcctgcaaaatacccacgggggcacatgtctgaaaactggaattttaattcctcttgttgcaattcctgtttcaggtgttcttgaagtacctgaattttgccacgttgtacctgaagatctatcacctgagctacctccacaactgcgagacgcgccgcggccaggtacccacacgctgagcacagctctgcccacgagggccagggtccctccgcccatctcgctgcctgcacasaggcgggtggtggcaggtggtcttgtgctcacctgggtaggtcctggggtgggcattgctcaggggagaggagggctccatggcttctgtggctgtgctgagctgcaatggccagacccatctgccacctgcctgccatctggccagagtgggtgtgaggcacctgcagagggggaaaggggcacctttcctagaggctgcccccaacctccttgggagaagccagtatgagtgacgagtgagcagggagcagaggggctccctggcaggtccagccctggttgagagagggtgcaggggcaggtccggccctgactgagagagggtgtaggggcaggtccggccctggctgagagagggtaygggggcaggtctggccctggccgagacgctggggagggaggcctgaggaccttaaggagtcaggtgtgccgaggtgcgtgggaaaacgcagggggatgacctccagggcaggtggtcctcccgtctgagaccctggctcaggggagacctggatggatagtgagtgggctgggggagggaggctctatgttggggctgggaagccgtccatgcaatggcctgggggctgagccacaaaggagaactgtgaagacrgcggtcacctcctgccttctccgtgtcttgttctgcctgcggatgctgcctggccctggtcacctgctgcgagcctgctgaacgtggcgagaggctgaggtctttatctcagcatctggaggaaggctgggtttaggggcctcctcctggccccagggctgcctcaggggcagtctggaaaggcggtcagggcccctggggcatccagccatccagccagtggacacctgtgagaaaaccccccggagggaagtctcagccccaayccaagcaggcctctcacggccagggccgtgggaaccagggaccagggagagcatctgtgtaatgtatctggaattcttttgcgtgagagatttgtctcttctcctcatttactaatttattcaatcatttatttatgtcagtgtggacttatgagtattgtatgcttaggttataaytcaatatgattttatttattttcttgctcacgtgagtccagctttggccactggaagctcttttacttggcttctgtgccctttttacgtgaccccatcactgtggggttttgctttgctttgttttttgtttttttttttatgtttttggtttttgttttgttttgtttttgagacagggtccatctgggctcgctacaacctctgcccccccggttcaaacgatttcctgcctcagcctcccgagtagctgggatcacagacatgtgcctccaggcctggctaatttttgtatttctagtagagacggkgtttcaccatgttggccaggctggtctccaactyctgacctcaagtgatctgcccacctcagcctcccagagtgctgggattactggtttgaggcaccgcaccgagcctggcttggttttgaaatggatgcccctgtctcattgtgtatttcctgccctggtcttgccatcagccacttctccagggagcctggttccttctgttggaaagcagtaacaggagccgcggcctgggggccggctgtgcttgttgccggggtcactgcttccaggccctctcgtccggcacagcgagaggcagccgtgctctgccagccctcgctcgtcccctgcgtgtgcgcagagctgcaaatgttcctgcacgtgaccatcgcgctcgagctgacgtctccaaccctggtccacgacagcgcgacacattctggcttcttcytcttgctgctgtgtgaattcccatgcaacagtgggatgcctgggagctgtcctccgcacaggcacttaattgtctgataccagcgcaggggaatagccgcgtcaggaytgttcacccacaccccgtggagaacagtgttatcaagtagaatacggggttgatgaagagtttcttttgccttcagtcttactgaggccagaaggcggcttgctctgttccttcctgscagtgacgagtgagcgttcctgctgctctgcaccctcaccagcgtttggtggaactgtagtctgatgggtgtatggtagcatctcattattgctgtaatttacaatcccctaatgacagatgatgtcgcacgtctattcatttacatatttgccatctgtacatcttaatctttggtgaggtgtctgttcagatcttttgccctgtttgatggggttrtgttcttagcatttgaagagttttgtttttattttatttatttatttattggagacagggtcttactcttgtcattcaggtggagtgcaatagtgaaatcttggctcactgcaacctccgcctcccaggttcaagcgattctcctgcctcagcctccagagtagctgggattacaggygcccaccaccacgcccagctagtttttgtatttttagtagagacggggtttcaccatgttggccaggctggtctcgaactcctgacctcaaatgatcctcctgcctcggcctcctaaagtgctgtgattacaagtgtaagccactgcacccaaccagagtttttaaatatattttcaacacaagtcctttatcagatatgtttgctttgagagcttcttgctaaattggggtcccattgagggccccaatgagggtcccagtaatgaggggtcctcgttaccctagcaggtaatgaggggggctgggcctggtgtttatcctgcacctttcacaggatcttctttcattcagtgggcagcctcgtgcctaattatccagccctcaaccaggggctcactcacacaggaaacttgttcatattrgcaggtgcctgaggcttgtgtctgacccatgcccaggtcatgcctacctggccatcgctctggcacagggagcccaaccctctgttccctccagggtcccagggaaaagctggcctggggtagctsctagctcttcagatggaagcacaaattcagtccaccactgtgataggaaacacgtgcaaagatttttactacaggtcctgggcaggaaaggcaccgtgattctggagggcagttttgtttttttggggggtgtttttttttttcttgagacaaggcctcactctgctgcccaggctggagtgcggtggtgcaatcatagctcactgcagcctcaaactcctgggctcaacagatcctcctgcctcagcctcccaagcagctgggactacaggtgcaccccaccacacctgggtaattwttttttttttagagacagggtcttgytgtgttgcccaggatggcagaagggcagttctgtgatgtttttcttggggtccacagttcacaggaggcagaaatggcaagtcaggcagagcaggggctctgctagcagcaaacatgagggaatagagagcaggtcccttaagttcatgggcaaatgtctgaacagccttttctaaaggaaagggggagaagtggggagcccaggcttctgggcaggagagatgcctctaagttcttatggctgccatcggcttgagccactgaggtgcagaactggaaactgtcaagggtgactaagccctgcttctggcatgagaaagttaaacttgtattcaaaagtgatgctgaggccgggcacggtggctcatgtctgcaatcccagcacttagggaggccgaggcgggcagatcacctgaggtcaagagtttgagaccagcctgggcaacacggtgaaaccctgtctctactaaaatacaaaaaattagccagacatggtggcgcatgcctgtagtcccagctactcgggaggctgaggcaggagaatcgcttgaacccaggagctgggtctccccctcaggtcctcctccccaagacctgcagtgagccgagatcaccccactgtactccagcctgggcgacagagcgagactccatctccaaaaaaataaaaaaagtgatgctgagaccaggagcagtggctcacctctacaggcccagcactttggaaggctgaggtgggagaatcacttgaggccaggaatttgagatcagcctggtcaatatagtgagaccctatctctacaaaaaaagaagagtgatttgcaaatattttctaccaagatgtggcttgtcttttaactcactttacactgtattttgcaaaatagttttaaattttattataataaagtccaattggccaggcgtggtggctcatgtaatcccagcactttgggaggccaaggcaggccaatcacctgaggtcaggagttcaagaccagcctggccaagatggtgaaaccccatctctactaaaaaaaatatgaaaattagccaggcatggtggcgggcacctgtaatcccagttactcaggaggctgaggcaagagaatcacttgaacctgggagacagaggttgcagtgagctgagatcgcaccattgcaccccagcctggacgacagagtgagactccatcttggraaaaaaaaaatccaacttagcattttttttccctcatggattgtattttgtgttgtatctaaaaactcatcactaaacccaaggtcacctacattttctcttattgtctgctagaggttgtatagatktgtattttacgttagatgtgtgattcattttctgaaaggtgtgtaaggwctgcatctagattaattttttgtgttgttgttggcatgtggaagtccagttgatccagcaccatatgtagaaaaagcctaccttttctccgtcgtattgcttttgctcttttgtcaaagatcacctggctctgttggtgagtctattcctgagctctttattctgttccactgttgtatgtgtttattcattcatgataccagaccatcttgatcactgtaggtttagagtaagtcttgaagttgggaatgtcagcgctctagttgtctttcttctgcagtattgtgctagctattctgggtttgttgcctttccacataaaccttaagagtcagtttgtcaatatccacaaagtagcttactggtattgtaattgggactgtattaaatctgtagatcaagttgggaaaaattgccatcttagaaataatgtatcttccaattgataaacacagaatatctcttcatttatttagatctttgattccttttatcagaattttgcagtttctgcatacaaatccataattttattagatttgtacctaagtatttcattttcccatggtaatgtaagagatattgggttcttaatttcaaattccaattcttcattgctgttataaagcaaagcaatggacctttgtatgttaactttgtatcctgggcagagaagaggtgagggtgaggcggtcagcgcaggagccaggtcaggctgggcagggggtccctgagtgcctgaggcctcaccttctccttggtcatgtccagggggctcaccaagtacygtcacagccacacttttaaaaccaaggtctattgggctgtgcggcaggggcaggccacctaggcgtcccagctcctgggggacccatgaggccctgaccacagccccgcacacagccgtcagagacacacgttttttgttttttgttttttgttttctgagacagagtctcactctgtcacccaagctagagtgcagtggtgcaatctcagctcactgcaacctccacctcccgggttcaagcgactctcctgcctcagcctcccaagtagctgagactactgatgtgcatcaccatgcccacctaatttttgtatttttagtagagatggggtttcaccatgttggccaggctggtcttaaactcctgacctcaggtgatctgcccacatcagcctcccaaagtgctggaattacaggcctgagccaccataccaagccaggagttttttattgattattggtgtttttacctagacaatcatgtcatctgcaaacaaagatagttttatttcttccttctcaatctatatacattgtatttctttttcttgccttattgcactagctaggacttcaagtataatgttgaatgtgagtggtgagaggagggagatatctttgccttattcccaatcttaggagaaagcatccactttctcaccattaagaatgacatcacccagctgggcatggtggctcatgcctataatcccagcactttgggaggccaaggtgggtggatcacctgaggtcgggagtttgagatcagcctgaccaacatggagaaaaacccccatctctactaaaaatacaaaaaattagccaggcatggtggtgcatgcctataattccagctacttgggaggctgagacaggaaaatcgcttgaacctgggaggcagaggttgtggtgagccaagatcatgccattgcactccagcctgggcaacaagagtaaactccgtctgaaaaaaaacaaaactaaactaaaaaaagaatgacatcacccagcatggtggcgcatgcctataatcccagcactccggaaggctaaggcaggcagatagcttgagcccaggagcttgagaccagcctgggcaacatggcgaaacaccatctctacaaaaaatgcaaaaaagttagccaggtgtggtggtgtgtgccagcagtcccagcaactcgccactgcactccaacctggacaacagacactgtctcaaaaaaaaaaaaaaaaaaaaaaaaaaaagaatgcccttagctctagggtttttgttgaatttttaaaatccacttgaggaagttctctctatttctagtttgctaagtgtttttattcagaatgagtgttggatttttcaaatttttttctgcattgattgataacatcatgtattttttgaacaaattgtgaacgagctttgcatacctggaataaatgccacctggtcatgtagtgtaattattattttcatacattgttaaatcggtcttgccatgttttgttaagaattttggcatctataagccgggtgtggtggctcacacctataatcccagcactttgggaggttgaggcgggcggatcacgaggtcaagagattgacaccatcctggccaacatggtgaaaccccgtctctactaaaaatgcaaaaattagctgggtatggtggcagacatctgtagtcccagctactcaggaggctgaggcaggagaatcacttgaacccgggaagtggaggttgcagcgagccaagatcatgccactgcactccagccagggagacagagcgagattccatctcaaaaaaagaaaaaaaaaaagaatttttgcatctatattcatgagctacattggtctgtagtttttctttcttataatgtctttatctggttttgctattaggataattttgacctcattgaatgagataagagtgtttcctctgcttctattttttggaagggattgtagtgaattgacataacatctttcctaaatgtttggtcagattcaccagtgaaactattagggactggtgctttctttttggatgattattaattattgattcaatttctttaatactcagagaactcttcagattcttctaattctcctggtgtgagtcttggtagtttgtgtctttctagtgatcagtctatttcatctaagttaaaatcaaattttgaggcatagagttgtcataatatttattatttattttcttctgcttgctttaggcttaatttgaagttctttttctagtttcttaagctttgagtgttgatttagatctttcttcttgtttattatgtgcattcaatactataaatttccctccaagcactgctttccctgcacctgacaaattctgacaggttgtatatttttattcttatttagttcaaaatctttttttttttttttttttttgagggagtctcgctctgtagccaggctggagtgcagtggtgggatctcggctcactgcaacctccacctcccgggttcatgccattctcctgcctcagcctcccgagtagctggaactacagacacacaccaccacacccaactaatttttgcatttttagtagagacggggtttcaccatgttggccaggatggtctcgatctctcgacctcgtgatctgcccgcctcggcctcccaaagtgctgggattacaggcgtgagccaccgtgcccctagttcaaaatcttttaaaaggtctcttcagactctggcccatctgttatttggaagtgtgttgttaaatccattttaaatttttcagctatatttctgttattgatttctaatttaattgcactatggtataagaacatatttttcattatttttattttcaaaattttgttaagatgtgttttatggcctagaatgtggtttatcttgctgtatgctccacgtgaccttgagaagaatgggtattgtgctgttggtggatgaggtaaattatagatgtcaattatgtccattcgaataacagtgtttttgttttttttatttttatttttttgagacagattctttctctgttgcccaggctggagcgcagtggtgtgatctcagctcactgcaacctccacctcgtggattcaggtgattctcccgcctcagcctcccgagtagctgggactacaggcacacgccaccacgcccacctactttttatatttttagtagagacgggatttccccatgttgcccaggttggtctcgaactcccagcctcagatgatccgcccacctcggcctcccaaagtgctgggatgacaggcgtgagccaccatgcccggcccacagtgttgtttagttcagcaatgtccttactgagcctctgcctgctggatgtgctcattctgatagagggtactaagtctccaacagtagtggaggatgcgtctctccttacagctccatcagcttttgcttcatgtgtttcgaagctttgttattagatgtgtgaacatgaatgatttttatgtcttcatagagaaacaacccctttatcatgttgtcatgccccttccaccaacaattttccttgttctaaagtactctttgtctaaattaatatagctaccccagtgtctttggattattattagcatagcatatatttcttcattccttacttttaaactatgtgtgtctttatacttacagtgggttttttatagacaacatatatagggtcaggtcttagttctttttatccgctctgaaaatctgtcaagtggtgtatttaggctagtcacatttttttttttttttttttttttgagacggagtctcgctctgtcgcccaggctggagtgcagtggcgcgatctcggctcactgcaagctccacgtcccaggttcacgccattctcctgcctcagcctcccgagtagctgggactacaggcgcccgccaccacgcccggctaattttttgtatttttagtagagacggggtttcaccgtgttagccaggatggtctcgatctcctgacctcgtgatccgcccgcctcggcctcccaaagtgctgggattacaggcgtgagccaccgcgcccggccaggctagtcacatttaaagtgattattgatatagttggattaatatataccatattcttaaacattttctctgtgttgcacttactctttattattatcatcccctctttttttctgccttctctggttttaattgaacgtcttatcccacactctctcctctcttagcttatcagttatacttgtttttccaaaaaattttagcatttccccagaatttgcaataatcatttatgactactctaagccctcttccaaatagcattatactgcttcacttagagtgyggctatcttaccacaatgtacctacaacttctcacttccacccttataaaatttctgccatttattttacttatccacgtgctataatcatgtaatacactgttactattattactttgaacaaatagctattattagagaaattaagaaaaagaaaatatgttgctttcctgtcatttatttattttctgctgctcttccttttttcacgcatatgcaagtttctgatctatctcattcttcctgtttccaaggaacttctttgaacattttctgctgggcaagtccactggtaacacattcctcagtttctgtttatctgagaaagtctttatttctccttcacttcttaaggataattttactgtatacagaattataagttagcacatttttttctcaacacttccaatacttcactctcctcttgctcgcatcgtttctgatgagatgtttccaacgtctcgttccactcttggtcagatgttcccccacccccagcttccctcgaggttttcagcttggttgtctgcagtttgaatatgacgtgccttaggatcagttttttggcatttgtcttttttgacagtcactgagcatcctagacgcgcggtttggtgtctgtcaatacttttggaaaatctcagccattattacttccaacatgtcttctccttcgctctttctgctccttccggcacccgccgcccactcgcaccttctgtatttgtctctctgctccgctcgctccgctcgtggttccctctgcgtttctgtgttcgcgctcccggcccccttcctcagacacgcgcagcctccggccgggcggcggcgcactgcgtttccacctcgcatttcctgtactccagcgcgccttgtccttcccagagcgtccatctctttgcttatgttaccatctgctccggtgcgctgcctccgttttctagtagcgcctttagcatattgatcatcataattttccttttttttttttgagacattgtcttgctctgtggccctggctggagtgcagtggctcaatctcggctcactgcagccgccgcttcctgggttccagtgattctcctgcctcagcctcctgagtagctgggattacaggtgcccaccaccgcggcccggctaatttttgtatttttagtagagatgagtgtcaccatgttggccaggctggtcttgaactcctgacttcagttgaactgcccgcctcagcctcccaaagcactagaattacaggcatgcgccacctcgcctggcctgatcatagtaattttaaattcccagtctgataattcccaacttcgtgtcacatctgagtctggttctgaggcttgctttgcctttttggactgttgctttttcttgccttttagcatgacttataatttttggccaaagcagggactggggcaaatcagccttgagtgtgggatttggggtccatctggccgggagctgggctgtattgaatgaacatttgctgcagctgagggtgacagcagcttccgcgcccttgtttatggtttgtttttgcttctgtattagcttgagctgccataacaaaataccacacaccgagcacctgagacagtgggcattcgtttctgacacttctggaggctgtgaagttccagatgaaggtgctgaccaggttccatttctggcgagggctctctccctggcttgctgtgtcctcgtcccataagggcacgtctcgtaggggccccaggctygtgacctcacctaaccctaatcatcccccagggccccacctccactcaccatcgcatctcgggtgagggcttcacagatgcatggggggaggggcacgcaatctagtacacagcgggaaccacccagcaacagacctcagttttaaaagtgtggctctggccaggtgtgatggctcatgcctgtaatcccagcactttgggaggctgaggcgcgcagatcacctgaggtcaggagttcgagaccagcctggccaaaatggtgaaaccccatctctagtaaaaaatacaaaaaattagctgggcgtggtggtgcatgcctataaccccagctactcaggaggctgaggcaggaaaattgcttgaacccgggaggcagaggtagcagtgagccaagatcgcgccactgcactttagcctgggcaacaagagcaaaactccatctcgaaaaaaaaaagaaagaaagagccaagagtcaggcgtatttgcccgttctgttgtctggtcaccccagccctaaaccaggcaacaagtgaattaccaacacctaggaaactccttgtttccagcctctcagtctgcaggcatgtggagaccagctcaaggttctaacacgtgaccttgtgtctccatgtgagactttcgattttgcaccagacattgcccagtcctaggaaaagctgtttctgggtcttgccctccgaacggcatttttaggcatcctgacttgcaggaggcacaggcctgcctcacggctctttttgaaaataaaagtttgtgatgagcaaagattggcccccgcagtccgcccaacgcctgcacttcgtctgcctcctccttgagctgtggaaggaaagctggtcactgggattgaagcagcctctgggcgctcccccctccctctgtcccgggccctcacctggacaatcaggaactaccttctgtcccaggcaccctccagctggaggccyctgccattccctttctgaaaagcctctcggacactcccatcagagccaacagaggccgcaggaaagccatgggttaggccctacagagctcaggtttctctctgacctgtcacggcagctgcctgttcggcttagtggagcaattctcaccgcccagctgtctgagctgcagcaaagctgcatgaaaggcctgtgggtgcagggctgcagctctcaccttcaggccggccatgcgtcaggacccggtggctcgctgcaagggcggaggaggtgccccgactcaggtcaggcatgggaggagcgggggagccttctgtctctgcaggtctgactcctgcctcctgtgaggaagcagagccattcagaagtgagaggcggccaggaggggcgggcgtggtctgtccacaccgggcagtggcgggagcctgttgagctggccaacttcggacttagggccccaccatgatgagccagatggagctgtggggagatccacgctggcacagcagtccgtctgccgtagcgaagccccgagcacggccaacagcgacccacagtggggcggggcgggtgatcctgggtgtctgtcgcctttccttttaatacagtgttctagtttataggttacatgatttaattgacataatggccatgattgaattgtcataatggctatgtttaatggctggctctcagaatgcctgaggattcaacaaccagctctgagaagctcaccatgagatgaagccctctgccctgatgccaggacacacactagatttgtcaaggccctgggcccagggggaaacgtctccagaaacaaggctcctggggctggggcttcagtagggccgaggcccgtcctagcgaccaggcctccaagggacgctggggccacctgctgctgctttgaaagtgaaggagcgccattcttggattccccaggcactcgctggggtcccttatgctgaccacagcctgggaagactgttcactggtggacccacaaaggcctgggaagactgttcgctggtggacccacagaggcctgggaagactgttcgctggtggacccacaaaggcctggggttgggaccgcgtaggcctgagcgcttgcctcccaccacagctatggcccagggctcagggtcggggggagactctggccctactccactggctgggcagccagtggggatcccatctgccctggcccctcaggacctcctggcccctccttcccataagtaatgagagggccatgaggctgagcagctcccttccagggcatatgcgtctctgtgccttctgccccccatgtcagtggatccctcatttctgagtacacggggyggccaccgctgtcaccctggtttcaccctggagcattaaacctgaccccagtcaatgcaggagggacacaacctcagcttccatgcagcccagaagcccaggctgctcgaaccatccccggggccttgtggatgcagcaggtgtatcctgtaccggggtgctgggacgctgggcacgggctyggggcaggaggggcccccgctccctgaggaggggacaagtcyggaaaactccagggcgggcctccagccacaccttgaaaagggggtaggtcccacccagcactggatgtttggcttaacaagttcccaacattttaaagtcgagacaattcacgtaagaattagggtttctacatctcttgaaaggctgagagctcaacactgctgggtgtccggccccccctgtccccactgcccaggacaggcagaccccaggtgcgaagcctcacagcctgcttcctccacacaggcaacagcctccatcagaggcctcagggctccccttcgatctggagttggaattgagggatgctgcccaggaagatgccagggacacctgcgtgggcagagagggcccaggaaggccccaagcgtggggtcagggcaccgaggggacagagtggagggggtcccccagcccagaaccacccaggcaccaagactcccagcagtcaggacagaaacagctccgacacccacacacagggaggggggccggcaggagggctggcgtctggaggctgcggaggcagaaggctggttggggaggctgcgtagatgccgtttcagagcaggccagggtcggaggttggaagagccattccggaggcagggggtgttgacgggggcacagaggaatgccctgagcccgagccggcagcgaaaatccacccgccacacgctgaagacgcctgcatcctagtcagttgctgtgtgcaccagcaggcttttaaccggaaaattaaaaatgaaaacaaggaggacggcagaagcctcagggtggggctgctgggctgggaccaccttgaactcagtgcctcccctcactgaggtgccgatgtcaacggcagtggggctgtcacaggcaggacgggctgaggcggcgatgtcaacggcagtggggctgtcacaggcggggcaggggctgaggtggcgatgtcaacagcagtggggccgtcacaggcaggacagggctgaggcgccgatgtcaacagcagtggggccgtcacaggcggggcaggggctgaggcggcgatgtcaacggcagtggggccgtcacaggcggggcaggggctgaggcggcgatgtcaacagcagtggggccgtcacaggcggggcaggggctgacccgtggggtcagactgaatggggagtgggggccccaggggttggtgggtcctcagggggggcctcctggaaaggacttgaggccaggccttgggaggaggagggcctgggatgagggcctggaggcagaggccagagcccgtgcgaaggcgctgagttcggcaggagacagactgagtgtgsgagggacgcagagggcgcagrgggtggggccgggcctccacctgcggctctgggtgaaccagtcacgcgaggagaatgcacctggcgattccacacatctacagcgagtctcctgagccgcaggcgccggggctgtggagagccgtctccattcagcaggcgccagggctatggggagccgtctccattcagcaggctctggagctatgaagagccgtctccattcagcaggcgccaaaggctatggggagccgtctccattcacgagcgcgcgggctatgggagccgtctccattcagcaggtgccggggctgtggagagtgctagggcggtcgccatctgcacctgctgttttcccaagtcctgttctggacccactaactccagtgactgagctgacttcttcacacgggcatggggccaaagctcctgaccagtgcagggacacggggggtgggacatactcagataggggctgggaaggctgggagcttctgctgagggtggcaccagcagcagctccatgactgtgactgcrgccagggcggctccacgacggtgactgcggccagggcggctccacgacggtgactggggtcagggcaggagagtgtggaggccagtgaggagggtccacacccatcggtgaggcaggagtcagggtaggctgcagacccgggcggagattgcgaggcaggggtcagggtcactggagaaacatggctcaggaaaggcttcagggagaaaaaggtgttggacgagagaggctggtgctcaggggctgcaggggggccgggcctcagcagggagggagggagggactctgggaacagcagagccggcactgaggatgctgccagggaagggcactgacgtgcatggacctggaggatgccactggccaaaagctaggatctcactcacatgtgggatccgaaaaccctgaattcatggaaacagagagtggaaagggggttgcaggaggccggggcaggaagagagatagagaaagcagagacgttggtgaaagggtgcaaagcgttcgttagctggagctgtgggcttcaaggtcagccgcgctgtgtggcggccaccactgccgttaaccacagtacacagggtgctcggtaagtgcagttctgcttccgaggatttatgatgtgggaaaagttttaaattaaaaataagaataakaatgtaaaacaatacagtagaacagccgttttcatggccttgccttgcactgggtgctaagtcatcggagatgatttgaagtcctgggggtgcvtgtgcaacctctgtacaaactctaggccatttcacatccgggacttgaacatcctcggattttgttatcagagcggcgtcctggaaccaatttccctgaggatgccgagggatgactgtattgtataccaaattgctagaaaatagacttgtaatgttctcaccacaaaaaaaacaagttggtgaggtgatggatatgttgattagcttaattgaatctttctgcaacaaatacttacatcagaacatcacgccaaaccccataaaacataaaccccatcaatacacacaattattcaactgaagataaactaaaatcagtaaaatcaatgtactgggaaataaagctacgaacatctcactgcccttggcaacaggagagcctggtcctgttcccaccatgagctgagtgccagggggtggaacttcagagggcctggcagggagagagctgggctaggacaccgcagcrgaggagagggagctggcaccatgcggtagaagacccagcggccgccgcgagtgtgaggaggcagggcctggtggggcctgggtctgggccttgaccaaggaggcagagaaaggtggcccaaggagggccctggggtgagtctgagcctggtggcagcgctgacccagcaaccaggggcctgtgcagcgggatgtcctgagtggggtctggccaggacctcgtggagtgcgtcagcaatgcttcactctcagacgcttggcggaggccacaggsggcctgacgtgcggaaaccacggcccgatgttctcaaagccctgctcgccgcaggtggttctggagcagccgggcggaggaagggctggtcggatgtttgcctgtcaagctcaaagcgacagattccactttccactcgtccactcctgagtgatcagggacacgaccgcagcctcgaggcctcaccgccagccagctcccgggccccacaagctcagatgaaacctggccacggagccaccaatcagggtctgtgccaggctccacggctgggcaggtggtcagatcagggagcgcacctgtgtcaggcttgagttaaacccctgctgctgtggtcagaccggcgtgagggtgggagtggccacaggcccacaggtgtgcccctccctccaggtgctgctgtggtcggccaacaaggtgtttgaggagctgacggacatcgagaggcagttcmacaaggccttctacacggtgcgggcctacctcaactgmgagcggtactccgtgggcctcctggacatgaccaaggagaaggtgaggcttccgtggctcagggaccccctgcctggcccgacccaggtcccgcagtgaccgccccaccctcacctcttctctgcccaggaattttttgacgtgtggtctgtgctgatgggagagtcccagccgtactcgggcccacgcacgcctgatggccgggtgagtcttaggggaggggcccagggcctgtccacacgcctctgtttccctgactccaactccagggcaggagagggagggataggggtggggtttagggaggtgggaactggccggtgggaccccgggtgcctgtctgtggtctccaccaggctcccctgctgctgcactccagggatggggtgtccagggctggtccctgaatgagggccgccaggctggtcgtgaagacccacgtcggctctgattgtgggggctcctgctgccccatctccccacgtgggacctcctgtgcacgtgtaggatgcgtgtgtgtgtgtgtgtgtgagagtacgggcccagcttgtgtgtgggattgtgcggaacacagactgggaagacagatgtaaaccgcggcgtgtgatgcgtgtcccgtgagtattggggacggtctgcatgtgtgtgcaccctgagcctgtgcatgtgtggacatgggtgtgagtgcacccgcattcgtagaatacctgcgcacggcggagacatctgttcacgtgtgtacacatgcacggttacgtgtgtgggggtgtgcatgcgtgtggctgtgtgtagctgcatgtagctgtgtgtgtgtgtgtgagcccctcagagcttggccaggcagccccccgaccagtgtcttctgcttctcaggaaattgtcttctacaaagtgatcgactacrtcctccacggcaaggaggagatcaaggtcattccgtaagtgcaggattttaccagaagcgtcccssggggagggaccgcccctcagaccccggctcagcccccagggccrtcctcccagggcttcccacggtgcagtcagcagcaccggcctggcctggccccacctgtggtgctctgtgtgccgtggggcatagtggagttgggggtgagacagaagccgactcactgttctgggagatggtgaggaggacgtgggctgctgaggagcccgagtcactgtggacatccagagtggacatacaggggaccaggcaagctgtccaggcggcctcgtcagcaacaattgagcatgaaggccccaggatttgaccctggcaccaccagccccacccagacagtggagcctccagccaggaggccgagtcttggccccgtggggctggaagaggaggggaactccagtccggaggtcagggcaggactccagccaagggaggggcagctggtggcccagtggccctgtgatcccataagcctattgggaccccatccccaggccccaagcaggaaccaggatccaggtgccaggcttgagcacaagtcagggtcagggtggcagggcaggcaccaacgctgagtcctagaaagcaggctgaagccatacggcctccggagagggaggggttcccaagagggaggggccccagcacggcagcctggggaggaggaagaaggcagcacagccgtcctccaacccacgccctggcctcctcgcctcctgaaccccctggcactcagagaagagagtaaatgctgaggatggcacatgagccagagacccccagacccctgcacacacgcccagtccatctgaccccagtacacctacatccagcgcagcctggcccctctgacccctgcacacacacgtgcagcccagaccagcccctctsacccctgcacacacacgtgcagcctagaccagcccctctcamccctgcacacagacatccagtccctctgactcctgcacgcscacatccagcccggcgtggcctatctgacccctgctctctgcccacagcacaccctcagccgatcactgggccctggccagcggccttccaagctacgtggcagaaagcggctttgtgagtcccgtgctgtctggagtccccacagccttgccctcactgggtgcggcgatgtgtgcttctccttgtctctgccacgtcccgccctcccggccagctccacgtgcctcagtgaagcccccagctgccctgctttacctacttaaaagctcacctcagggccacagaggccattttagatcataacagaccttccgctgttttggatgaaatcgtttttctgatgctttttcagatttgtaacatcatgaatcgttccgctgacgaaatgttcaaatttcaggtatctgtctgtgccttggtagaaattatacttacttacaaaagaggagattttgattcagcgatgatgaagtgaattcgtttttgccacttaaaaaacaacttcagccaggcatggtggctcacgcctgtaatcccagcactttgggaggctgaggcgggttggatcacctgctgtgaccacagcccccacacacgcccgcaaggccgtgaccgcggcccccacacacccctgcgaggccgtgaccgcggcccccacacacccctgcgaggccgtgaccgcggcccccacacacccctgcgaggccgtgaccgccgccccacacacatgcccatgaaaccactcctggtgggaaaacggcctctacctcctccrgtgggaaaatatcatgacacaaaaaccatggacacaaactccaaatgcagagagggagagagggaatgcagagagcagagacaggaacacgagcccagccgtcacggctctaggggagaagacatgaggtcactctccccggccacacgcccgggccagggccagcctcagggcggagctcagctctggacaccgctcccgcaggaaggggccctggacgactccgggtggctcatcaagaatgtgctgtccatgcccatcgtcaacaagaaggaggagattgtgggagtcgccacattttacaacaggaaagacgggaagccctttgacgaacaggacgaggttctcatggaggtaagcacctgggcagacgtggttccgccggggatgccctgcgaggggtggggcctgtgcggtgtgggggcctccccgccaagcattcggctgtgtgcgtgtgctcatgtgtgtgcggtatgcatgcggccagggagaggacgacaaagggcccccccgggagcaggagcctctgcagagcacccgggagaccccacacagaagcactgcgacaccatggtggcagccccaggacctgcccgccgagccacggggcctggcacacaggcacatgggagggggcgcgccgggagcgctgagcgccagtgacactgccatcccctccagtccctgacacagttcctgggctggtcagtgatgaacaccgacacctacgacaagatgaacaagctggagaaccgcaaggacatcgcacaggacatggtcctttaccacgtgaagtgcgacagggacgagatccagctcatcctggtgcggcggggcaggacgtcaggggtcaccaggggtcacggctgtgtggcagggggcaggtcgtcaggggtcaccaggggtcacggctgtgtggcaggggcaggtcgtccaggggtcacccaggggtcacggctgtgtggtgggggcaggtcatccaggggtcacccaggggtcacggctgtgcggtgggggcaggtcgtccaggggtcacccaggggtcacggctgtgcggtgggggcaggtcgtccaggggtcacccaggggtcacagctgtgcggcgggggcagggcatccaggggtcacccaggggtcatggctgtgcagcagaggcaggtcatccagggctcacccaggggtcatggctgtgcggcgggggcaggtcgtccaggggtcacccaggggtcacggctgtgcggcaggggcaggtcgtccaggggtcacccaggggtcatggctgtgtggcacaggcaggtcgtccaggggtccattgaggggtcacaggggtcatggctgtgcagcagaggcaggtcatccagggctcacccaggggtcatggctgtgcggtgggggcaggtcatccaggggycacggctgtgtggtgggggcaggtcgtccaggggtccatccaggggtcacccagaggtcatggctctgcggcgggggcaggtcaccaggggtcacagctgtgcggtggggacaggtcaccaggggtcatggctgtatggtgggggcaagtcgccaggggtcacggctgtgtggcgggggcaggtcacccaggggtcatggatctgtggcagggacaggtcaccaggggtcacggctgtgcggcgggggcaggtcgtccaggggtcacaggtgtgcggggcaggtcacccaagggtcatggctgtgtggtgggggcaggtcacccaggggtcacaggtgtgcggggcaggtcgtccaggggtcacggctgtgtggcaggggcaggtcacccaggggtcatggctgtgcggtgggggcaggtcacccaggggtcacagctgtgtggggcaggtcacccaggggtcacggctccctctgtgcagtgggcggccaggttacccaggggtcacagctctctctgtgtggtggggacacggccctggggccagagctgagtacagccctggcatgcccccgaggtccctctgtctgcacggccctggcatcccttccctgtgctcaatctccccagccaggggccttgcatggccagagccctcctggtcatcatgagagagtcccatcattatacctgaggactgcgtaaggcagtgcccgagagaggacaggtgggaaagtcagcaggccatgcacacggtcatttgtctccagatcagaggccgccagggccttcccagggtgaaagcacaagctcttgacagcaccttcctctagctcacacggggtggacgcaccgccgtcaccttgtcccacatgcgaagctctttctcgtgacacatctgtgtctctgtgtagccaaccagagcgcgcctggggaaggagcctgctgactgcgatgaggacgagctgggcgaaatcctggtaagaaccttgctcccgtccctcccatggaggccggccacgtgtgaggctgggaggaagagttctgcattctccgggacccgacggtgctttgcacacacggtcatcagggatgttggtgctgtgtgtgtatacttgtgtatctaagcaccttagtgtacgtgtgtgtacataagcctggctttcagtctcagccagtgtgtccctgagtgtgtttgcatggccagaatgtggctttgatgtctgcactcctgagtgtatcttcgtgtcttcctgtctcctctgtgctttgccagatgtttagttttcaccggatgtttagtgggcctgacttggactctgtgtccatctatgtcatctctgctctcagagtgcctaggtgcctgcaactcccagtgtgtgtgcatccgcatgtgtgcacgcacatgggtgtctgtgtgcatgtgtgtgcacatgtgggtgtctgtgtgtgcacaagtgtgtacgtgtgtgtgcatgtaggtgtgtgtgcacacgtgggygtctkcacaggtgtgtacatgtgtgcacatgtgggtrkgtgtgtgcacatgtgggtatgtgtgtgcgtgtgtgcattgtatgaatgtgcacatgtgtacacatgtgtgtgcacatgtgtgcccacgagtatgtgtgtgcatgtgtgtgcacatgggcgtttgtgtgtgtgtgcccgtgtgtgcacccatgtgtgtgtgctcacatgtgcacagggggtgtgtattgtgtgtgcatgtgtgtgcacatggatatatatagacacatgcttgtgtgtgtctcctagagacgattgctggatcaatgtggggattatgtggtgtccccatcaccctgtgtctgcctatgcaatttagccagaatctcccggggccacgagccttgtgagtaggccttggactgagcatgggaatgtgcctggtgggtctgaaagtccactgttgtgtgtgttacctcatggctgtgtgtgtgagcctacatgcgtgagtctgcacgtgtgtgcctgcatgtctgtgggtrtgcctgggtgctcatgtgtgtgcctgtgtgtccacaycggtgcctttgtattcatgggagtggccgtgtatccaggtgtgcctgtgtcacgtgtgtctgtatccgtgtgtgtgtgtgtttcttttcatgtgcacacctttgtgttttcttgtctcaacaacatcaccctgtccacccaactgggcaagttcttcactgttgggccacagggtacaagaggggagagtgaggctgagccaggggggcgtgtgagcagcctgggatacaggctggagcgccaggaatgacacatctcctcagagatgcctgaggtgtctgaggcttggcaggggatctggagagaagaaaggatgagaagcaagtgggggctgtggcaggccaacctccctcagcccacaatccctcccacagaaggaggagctgccagggcccaccacatttgacatctacgaattccacttctctgacctggagtgcaccgaactggacctggtcaaatgtggcatccagatgtactacgagctgggcgtggtccgaaagttccagatcccccaggaggtgggagacaccgcagggcgcatagtcaggtccctgaggccgcccaggacatgggggtggggatgtgatcagggcctcaggtgccccagaaggtgagggggatgggattgggggttccagatcccacaggaagtttagagggccgacatgttcatcacagaacaggtaaaatgcacacgggaagtaagcataaaacaaataattggatggctgggtggatggctggattgatggatggctggrtgggtgaaaagcagggaggaaggagggaggttaggaaggaaggaaggccaacaggcaagcagaaagaaacaaaggaagaataaatgaatggatgggtggatgccaatggtagttggatagttggataaatggatggatgggtgggtgggccaatggtagttggatagttggataaatggatggatgggtgggtgggccatggtagttggatggttggataaattgatggatgggtgggtgggcgggccaatggtagttggatggttggataaatggatggatgggtgggtgggccaatggtagttggatggttggataaatggatggatgggtgggtgggccaatggtagttggatggttggataaattgatggatgggtgggtgggtgggccaatggtmgttggatggttggataaatggatgggtgggtgggccaatggtagttggatggttggataaatggatggatgggtgagtgggccaatggtagttagatggttggataagtgaatggataggtggatggatggagaagtgggtggatgagtgatagatgagtaggtgggtcaattaatgaattaatagatgggtcaatgaatgggtgaatggatgggtggacagcagatggatggtgaatggatagatttaaagttttattattaggagttccaagcaatttgatcattaggcacatcatctggcaataacaggggatttggtgtggggtgctgaggagatagaagcatcccatcacctaaacagaaagcacaaagtggcccccctggtttggccacagcagcactcctcggagaccccctggggaggcgggatggctttcccagccctcgtccacagctctgtgccctccctgggttctcctgccctgccctgcttccaacatctcaaggggcttcccacagccctaggaagagaatcctcttttctcatgcccctctgagaacaggtgcagcaggccagcattttcaaaagaagttttactaaatactaagggaaaacactcaagaaaaaatgtatagaaaatatttgcagaataaaaaatatttccaaataattttctgaccctaaaaatcacaatggccgcaggaagagcctcctgggcttgcgcagggcaagagagaccagcattctcttgcctgcggacatcggttctcccaccccagcctgcagcccacacattctgctcattcaaatgtccatgcctaaaaccaacatcttaaaatatgctgcatccccaggggtcctcctcccagcttgaggccaggcagtcggatggaggctgggcggcccctgaaggctggggctgttctcagctcctgccctgcctggctccaccccataggtgccaatgtggcagcccctacccaggaaggccagcagaggccagtgggaaacgcagggatggggaagatcgggaagtccaggagacggtgtggggatgatggcacggagcagggcttccactgtgaagtcagccacaggtgccgctctggcgggacttasacgcttgccgccggagccctgtgtcctctcggctcccccaggtcctggtgcggttcctgttctccatcagcaaagggtaccrgagaatcacctacyacaactggcgccacggcttcaacgtggcccagacgatgttcacgctgctcatggtacgtggctgccagaatcaccagggttgtgcaggccctcctggtaccaagggcagcactcaagcaccccgagggatgagatgggggtcctcccagggcagaaggatggaggagggcaacgccctctgacaccgtgcaccgcgcaccccagccctgcggtggtcggaggtccaacctccaacccgacgcytaggtcatcccaacccctcaccactccccaccctgctggagccaggaccggtgagcaaggtggccctgtctctacagaccgrcaaactgaagagctactacacggacctggaggccttcgccatggtgacagccggcctgtgccatgacatcgaccaccgcggcaccaacaacctgtaccagatgaagtaggcacctcagggcgggcatgtgaattagccctaaatcaactccacgcccttggcgtgaattaggcttcgcatagcaggctatgtagaaagtggagtccacggccaggccccgtactccagcactgtgggaggccaaggcgaggggattgcttgagcccaggagttcgagaccagcctgggcaacatggcaagakctctcctctacaaaaacttaaaaaaaaaaaaaaaaaaaaaagctgtgtatggtggcgcacacctgtggtcccagctacttaggaggctgaggtgggaggatcacttgagcccaggaggtcaaggctgtattgagccatgattgcaccactgcactccagagtgggtgacagaggcagaccctgtctcaaaaaaaagaaagtggggcccatctgggggggctgcagagcgcagggtgggccaagggcaggtcccacgggcctcacctccaccacctgtgtaacaggtcccagaaccccttggctaagctccacggctcctcgattttggagcggcaccacctggagtttgggaagttcctgctctcggaggaggttggtatactcaccctcggtttctgctgtgggcgctggggacgcagcgtccgcaggacggcagggccgtatcctgcggagcasggttctgatgcagcgggtgagcactgggtgtgtgagcactgggggagggcggcagagaaggcggagggccgaggctgagggcaggtgcatcggaggccctgggaaaacgcttgtggggaagacaactggaaagggcccctcatggggtggggtggaagccgaaggggaagcggcccgggacccaccagcgggggaatgaagggcagccgagccctgagcggcccccaaggacctggacactcagtggacccctccctgcgctccccggtggtgacctctgaggccatctgcgtcccaagccgacgatggagccgctggtggagagctgggcaccctgaggagggccctgagcagcaggcggattaggggtcccgcccaccgagggcccgagggcgggggcgtgagaggcacaggcagccgaggcggaaggggcggggtccccgggcaccctgagaggtggccgcaggcgcctgacgcgctgggcataacctccgcagaccctgaacatctaccagaacctgaaccggcggcagcacgagcacgtgatccacctgatggacatcgccatcatcgccacggacctggccctgtacttcaagtgcgcgccttccgggagggggcgcctcgcggggcgggcgggtagcctgggacccccggcagacacgggggcgcagcggcggcacagcccgggggacgcagccccggattccgtccctgcccgccggccccgcgcaccccggatggggcctcgctcgggctccgcgcctccctgcagacgggcgcttggggcggggtctccacacttgctcccacctgcacctcccttgttccctgggttcaggaagagagcgatgtttcagaagatcgtggatgagtccaagaactaccaggacaagaagagctgggtggagtacctgtccctggagacgacccggwaggagatcgtcatgtgagcgcgggcggagggggcacgaggggtccttccctcgcagggaccgggcccactcaccagctggttaaccctgcagccctccccagacgctctggagcaggaagagcccgtcgcggcagcttgtcgagggctgtgaaacaaatgcgccgtccttatttccccccagctctcagggagatggtgcagagctggggagcacacaggccctgcattggtctgtagcccttggcagtaacttacttcattttgaccttccactttttcacctgtaaaatggtgattcacaaccakcccctccccaggctggtcccagggacccagtgagaaaatacacataaacccagcacttgggaggccgaggggagtggatcacctgaggtcaggagttcgagatcagcctggccaacatggtgaaaccccgtctctaccgaaaatacaaaaattagccgggcgtggtggcgggcgcctgtaatcccagctactcgggaggctgaggcacaagaatcgggaggcggaggttgcagtgagctgagattgcgccattgcactccagcctgggcaacagagcaagactccatctcaaaaaaagaaaacacatataaaccacctgccctcaggagacgcccatcagcactcgtgcccggtttgtgtctgcagggccatgatgatgacagcctgcgacctgtctgccatcaccaagccctgggaagtccagagcaaggttagaacagagggccctccagacccagagtcagtgcctctcagcacatgggactgccgggcgggcgggagcctcggatggcaacggaccattgtttgcarggagctctgagggccacctcggggccaggccagggcggcaaggatgggggtactgcagtgtgtctacatggctcaaccggagccctgtgtggtggggaccccgggggtctggggcggagaagaccgaggctcggagcctcacggggcgggcccgggcccttccgcgtgggctcagagctccacagacagctgccttcctgtgcctccaggtcgcacttctcgtggctgctgagttctgggagcaaggtgacttggaaaggacagtcttggatcagcagcccattgtgagtgctgcttctggaaccttccactcctgaaacgggtgttagagacccctcttggtcctcaggagcctcaggtcctggcttggtctcaggcagggggttctgaggtcgtggggtccttatctcactttgtgggatcatgtgacatgcgtgtgggtggctcggacctgggtacagctgtggcttgggtgatgcttatgcagaggtgacgtcgttggcactggaggaaccagggccacccgctcatcaccargagcctctgggtccaggcagctctgcaggtgaaccccagcagggccgcgagccatgcaccaagaaagccctggggagggtgctggggcagagaacgcatggggggcgtcccgggcccacacagtggtatgatggacaatgccagggtcctcaggtcagcagcggggtctggatacctcctggcagcaggagaggtgccagcaaatgggagagtcaggataggcgccaggaacaggagaggcagggctgccccagccccacgtggaccaggtgggagctgtggtttctcacacacccgctctggtgggcggcgaggggctctctggagcctgcagtggagagggcttaggccaggtgcagcctcggcaggaaagggggcattggttggtcagcaaagccccacaggggaaggacaggcagcaggtccatcccccgcgcccggcctctagagtcctgcatggttcaccctccaccaggacgctgtgaggggacggacagcccagggcactcggggtctgacactagaaacagctccagagcacgtctgtgtctgccccaggcragtgcacagcgaggtcctggtcagccgagtgtctgggcagtgcagcccagcccggctcagcactgtgtacagcccatccccctccccgcctctccccagctgcagtaagggtccccagagccaagagggggctgccctcaggggaccacgggctggagccaacagcagctgtgggaagaagctgcccacagttcctaggagctgtggagccgctggccaagggagagggtgtcagcttcccctcccgagagccagtttctgtcaggcaggctcgtcccaggctgtgtctccatgagcacatctgagtgagggggtcggggggctgggcggggccccaggagctgcctccctggtcactgttctcccgccctctgttcctcccaccagcctatgatggaccggaacaargcggccgagctccccaagctgcaagtgggcttcatcgacttygtgtgcacattcgtgtacaaggcgagtggttcacgggtgttccgagctgactggggcagggtggctgggagcaggcaagggggcgcgggctggagtcgcgtggactcacacgggcccggcggtgtcctcactggagtagggatgccagtgccagcttcgtgccgctcttgagtggggcaaatggggaggaacatcagtttccggacccccacaggtgccccagcccatcctcaccctgctgtgcccctggaagctctgagccctttcccagcccagaatgtcctctgctarcctccaggcctaccccagaagttctccctcagtgccctccgccgtggccagcacactgttttgggggccttggctgcagctctgtgggttcatttgttccatgtttgtgaaccctcgaggcggggctgggtcggcctgtctgctggtgcacccgcccacaggggcgtttggaacagcagaaggagccacatccctgccaatctgccacagtccgatgccagctgagtctctgaggacgcaaggcggacatggagggggagactcgatggggcaggggtctgaccgtggggccctgtgtgatgcccataagagccagctgcctccggccacactccctggtgatggaatccacgccccaaggaggatgccacgggttccacatgaagttgtcccggagtgggctgtgcccactccccgccccatcctacccaccccgggtcgtcagtgctggggagaaggtgggacaagggtggatatttgggcctgaagtggccacaggtcacggccccactgcaggtgccccccactgccttccccaccccgccacactccatgtgtgatgtgcgcgagtgcacgcgtgtgctgtgcttgcatgatgtgtgccgtgtgtgtgtgggagggacgggagaaggcactgcaggggctgcctgctgtccgcctgtgcccaccacccctctgcctggcaccctgcccccaccccctgagctgttctgctcattcttgggttcctctccctgcaacactgcaccctaagcatgcataccctaaagctcccggcttcaatgtcaccaacacagcccccgaggtttctcccttcacagggctctgctgggaaggtgccccctccgtggcgctccctcctcctgccaggcagttcatcccctacgagggggatgagctggggaagggctatcttactctggagagagcaggcaggacaggactggtggtgacttctcgactcccctcaggagttctctcgtttccacgaagagatcctgcccatgttcgaccgactgcagaacaataggaaagagtggaaggcgctggctgatgagtatgaggccaaagtgaaggctctggaggagaaggaggaggaggagagggtggcagccaagaaaggtctggctctgtgtggcctgtggggcagggactcggtgactctcccaaggcaaaatgaaaagacagggcacagagcagagttaaaatggagaaaagcagagccactttcaagaagcctcgaggtggacagggccayagtgcagggagagaggccacggcgggggagagtggcagctgactccacctcggtagcaaacccggactgaaaaatttcctctgttcctagccagtgaaccccatttttcaagaaagaagtaaccatatcttatgtcctttataaaggacttagttgcaacaagtcagcacacccccaagttcaaatcccaaaggcatcgtggtcttgccattggcccgcacttggctaccttagctctgaggtttggcttgctattcccgctgctcccagtatcccatgctattcccgctaccccatgctgctcccactaccccatgctgctcccactaccccatgctgctcccactaccccatgctattcccctaccccatgctagtaccactaccccatgctattcccgctaccccatgctattcccctaccccatgctagtaccactaccccatgctattcccgctaccccatgctattcccctaccccatgctattcccgctaccccatgctgctcccactaccccacgctattcccctaccccatgctattcccgctatgccatgctattcccctaccccatgctattcctgctatgccatgctattcccctaccccatgctattcccctaccccatgctgctcccactaccccacgctattcccctaccccatgctgctcccactaccccacgctattcccctaccccatgctattcccgctatgccatgctattcccgctaccccatgctattcccctaccccatgctgctcccactaccttatgctattcccactactccatgctgctgccactaccccatgctagtcccactaccccatgctattcccgctaccccatgctattcccctaccccatgctattcccactaccccatgctattcccctaccccatgctatccccctaccccatgctattcccgctaccccatgctattcccctaccccatgctattcccactaccccatgctattcccactacgccatgctattcccgctaccccatgctattcccactaccccatgctattcccactactccatgctgctgccactaccccatgctagtcccactaccccatgctattcccgctaccccatgctattcccctaccccatgctattcccactaccccatgctattcccctaccccatgctatccccctaccccatgctattcccgctaccccatgctattcccctaccccatgctattcccactaccccatgctattcccactacgcccatgctattcccgctaccccatgctattcccgctaccccatgctattcccgctaccccatgctattcccgctacsccatgctattcccgctacsccatgctattcccgctaccccatgctattcccgctaccccatgctattcccgctaccccatgctattcccctaccccatgctattcccgctacgccatgctattcccgctaccccatgctattcccgctaccccatgctattcccgctaccccatgctattcccgctaccccatgctattcccctaccccatgctatccccctaccccatgctattcccgctatcctatgctacataaacaaggcgacttcaggactatggaaggccasgatgagcataatcagggcacagtgtcaacagaggctaaagcactaagaaaggctcagcccagctaatcggcttgggctggtcacagacccaggtgctgtccttcctcctgcaggggttggtagaggtcacaccaggcaggagggaaggaatagggctggtgtgcacaggtggttccactcaccatcttctgtcttctcttgcagtrggcacagaaatttgcaatggyggcccagcacccaagtcttcaacctgctgtatcstgtgagcactgtcccrtgggacmctatggctccctcaatcttcacccactaggatttgggttctgcctgtggctatttgctacaagaggttaggaagcccaagaaaatgactgaagatcattctggatattttaatttttttttttttttttttttgagatggagtcttgctctgtcacccaggctggagtgccgtggcacgatctcagctcactgcaacctccacctcccaggttcaagcgattctcgtgcctcagcctcctgagtagctgggactacaggcgcccaccaccacacatggctaatttttgtattttcagtacagatggggtttcaccatattgggcaggctggtctcgaactcctgacctcaggtgatcacccgcctcagcttcctgaagtgctgggattacaggcatgagccaccacgcccagcctgtttttataaactgaagccaactgtgaataaactgtagcctacattactcatccatttttggatagttaccactgggagacctttgaaaagggtccatgaactctgaaatcactgagaacatttgcagccacacatgtacatatgtgtacacaggtagacagatggacacaggccgtttctcatccagtttaggaaaacacacatgctcaggaattcagaataaaataaacagaaaactacttgcccattatctgtggtaaaatgatagcggaagccacactacatttgacccatcagaaaattctgccagagaggtcaaggccatgagtaaagcggccatccaacttcagtggtctgagcggaaatgatctgtaataaacaccatgtagagtggctctgatggccccagacggcaccaggagggcagtgcagggctggatgccgaagcccgtgcacccccatgattaaatattggtgagcctggagtgaaggacagaggcaaagaaacggacttcccagttgaaatcggtattatgttaaattcaggatgttcaactcatgatgtgagctccaaggcatttgctcccaacactagatgacgcttaactagatgggctcattggggtgggcgtgggagagcagcagacatgcccagcacagccatggggctgcaggaagggggtgctgggttttttgcttgagacagtctcactctgtcacccagcctggagtggagtggtgggatcttggctcaatgcaacctccaccttccgggttcaagcaattctcctgcctcagcctcctgagtagctgggattacaggcacccatcaccacaaccagctaatttttgtatttttagtaaagacaaggtttcgccatgttggccaggctggtcttgaactcctgacctcaagtgatctgcccaccttggcctcccaaagtgctgggattacaggtgtgaaccaccgagcgtgctgggattacaggtgtgaaccaccgtgcccagccttttcatctcactggtcagagacccctggtatccagagcctgggtctgggatgaggggctcttaagaggttctgagggatcctgcaaacagcccctctggacgccaggacaggatgtgaaagtatcttgctcactcaaagctcaccttaaccaaatgtcctgaaaagcttataggctgcttctccctttggccttatatttgcaaacgaactcattttacaaactggggctccaagcctagatttgctcaaggcacataactgggaagtagcaaattcaatctgtccattgcaaaccaccaggccaagggtttgggttgttggcaagctcacagccaggaggggcgagaagcccaggaagcctgctggggagggaagtggctcaggcaccacaagaccacctccctgcacaactcaaacagcactcaggccctgtgctcaggaggtcacatcaccagacttttagtcccaagtctgacctggccacttcctgggatcaaagggaggatttgtgaaatggcaggttggggcgaggggttattgtggaggaggacccagcttcccaactgtaagggcgtcagtcagtgcctacccctccccatccaggggtctgggctgctgagagcagcagcctagaactcagaatcaagacaaccccagtactcatgaggcccccagctgactgactccattacagacggcctttggggctccccacctggatgccccagacagaacaggcagcgcgcatctgtccttcccactgtgtttacatgatgcattctgggtctgtgaatggtaatgtggattcttttgaaaccccctccctgtcttccacctcacgtgaactgggaggtggacagaacttcaacctaggaattccacaaccagcgacagcaaatgaggagccggagtatcacacaacacaggaagctttattcatccgctgctggtccaaagagtgggtcgcagggtcactcactttaatatgctgtcatcttgggccggaaggttagaagaaaagcacatgttaccactcaggcaacctaaaaagaccacttcagcttcccagttattttttttttttttttttttgttttgagacggagtctcgctctgtcacccaatggcgcaatctcagctcactgcaacctctgcatcccaggttaaagcgattctcccacctcagccttctgagtagctgggattacatgcacccgccatcatgcctggctaattttttttagacagaatttcactttgctgctcaggctggagtgcagtggcgtgatctcagctcactgcaacctccgcctcccgggttcaagcaattctcatgcctcagctttctgagtagctgggattacaggtgcctgccaccatgcccggctgattttttgtattttagtagaaatggggtttcaccatcttgcccaggctggtctcgaactccagagctcaggcaatctgcctgtctcagcctcccaaagtgctaggattacaggcatgagccaccgcaccgggccatgcccggctaatttttgtagagacagggttgcaccatgttggtcaggctggtcttgaactcctaacctcaggtgatctgcccgccttggcctcccaaagtgctgggatacaggcatgagccaccacgcctggccagcttccccatttttaaacaatccgcatctacttagctctgcttaaatgtcctcctccattttccttatccctgcacaaacctgggagggacaatctataagagccagtgtcactcgtaccttctgccaattctctggcaatccgtttcagttcatcctgcttcttcttctcttctgctgctatcctcctctcctcttctgcccgaggttttaggtaatctgtttggcggaatgcaggagaataaaattcactggaaatgctgtacaaaaggaactgagtccacaggtcaaggtatcttcagcgacgctgtaaaccagacgcacctgctgttcccgctctttatgttaatgcgagtcaacgcctgaccttcaccctgacgagtccaacccagaggctacagggcccctgctgcccacccgctcacgcactggctcactcgtcctctgcgaacagggactgcctcccatcaagacctcagcactcgaacagccatttagcacccgttttcaccaagaagcagccgttttcgagtcccccgcccgggcctcagaagcctgagctttgggtgagctgattccactatcggggtcacgctcggtggaggacacggtcctgcagcctcgcatgcgtcccaaggcccccttccagagctgggagttctccaaatagcacaggagctccacagggaaagccgagcagaccccgccccggccnnnnnnnnnnnnnnnnnnnnnnnnnnnnnnnnnnnnnnnnnnnnnnnnnnnnnnnnnnnnnnnnnnnnnnnnnnnnnnnnnnnnnnnnnnnnnnnnnnnnnnnnnnnnnnnnnnnnnnnnnnnnnnnnnnnnnnnnnnnnnnnnnnnnnnnnnnnnnnnnnnnnnnnnnnnnnnnnnnnnnnnnnnnnnnnnnnnnnnnnnnnnnnnnnnnnnnnnnnnnnnnnnnnnnnnnnnnnnnnnnnnnnnnnnnnnnnnnnnnnnnnnnnnnnnnnnnnnnnnnnnnnnnnnnnnnnnnnnnnnnnnnnnnnnnnnnnnnnnnnnnnnnnnnnnnnnnnnnnnnnnnnnnnnnnnnnnnnnnnnnnnnnnnnnnnnnnnnnnnnnnnnnnnnnnnnnnnnnnnnnnnnnnnnnnnnnnnnnnnnnnnnnnnnnnnnnnnnnnnnnnnnnnnnnnnnnnnnnnnnnnnnnnnnnnnnnnnnnnnnnnnnnnnnnnnnnnnnnnnnnnnnnnnnnnnnnnnnnnnnnnnnnnnnnnnnnnnnnnnnnnnnnnnnnnnnnnnnnnnnnnnnnnnnnnnnnnnnnnnnnnnnnnnnnnnnnnnnnnnnnnnnnnnnnnnnnnnnnnnnnnnnnnnnnnnnnnnnnnnnnnnnnnnnnnnnnnnnnnnnnnnnnnnnnnnnnnnnnnnnnnnnnnnnnnnnnnnnnnnnnnnnnnnnnnnnnnnnnnnnnnnnnnnnnnnnnnnnnnnnnnnnnnnnnnnnnnnnnnnnnnnnnnnnnnnnnnnnnnnnnnnnnnnnnnnnnnnnnnnnnnnnnnnnnnnnnnnnnnnnnnnnnnnnnnnnnnnnnnnnnnnnnnnnnnnnnnnnnnnnnnnnnnnnnnnnnnnnnnnnnnnnnnnnnnnnnnnnnnnnnnnnnnnnnnnnnnnnnnnnnnnnnnnnnnnnnnnnnnnnnnnnnnnnnnnnnnnnnnnnnnnnnnnnnnnnnnnnnnnnnnnnnnnnnnnnnnnnnnnnnnnnnnnnnnnnnnnnnnnnnnnnnnnnnnnnnnnnnnnnnnnnnnnnnnnnnnnnnnnnnnnnnnnnnnnnnnnnnnnnnnnnnnnnnnnnnnnnnnnnnnnnnnnnnnnnnnnnnnnnnnnnnnnnnnnnnnnnnnnnnnnnnnnnnnnnnnnnnnnnnnnnnnnnnnnnnnnnnnnnnnnnnnnnnnnnnnnnnnnnnnnnnnnnnnnnnnnnnnnnnnnnnnnnnnnnnnnnnnnnnnnnnnnnnnnnnnnnnnnnnnnnnnnnnnnnnnnnnnnnnnnnnnnnnnnnnnnnnnnnnnnnnnnnnnnnnnnnnnnnnnnnnnnnnnnnnnnnnnnnnnnnnnnnnnnnnnnnnnnnnnnnnnnnnnnnnnnnnnnnnnnnnnnnnnnnnnnnnnnnnnnnnnnnnnnnnnnnnnnnnnnnnnnnnnnnnnnnnnnnnnnnnnnnnnnnnnnnnnnnnnnnnnnnnnnnnnnnnnnnnnnnnnnnnnnnnnnnnnnnnnnnnnnnnnnnnnnnnnnnnnnnnnnnnnnnnnnnnnnnnnnnnnnnnnnnnnnnnnnnnnnnnnnnnnnnnnnnnnnnnnnnnnnnnnnnnnnnnnnnnnnnnnnnnnnnnnnnnnnnnnnnnnnnnnnnnnnnnnnnnnnnnnnnnnnnnnnnnnnnnnnnnnnnnnnnnnnnnnnnnnnnnnnnnnnnnnnnnnnnnnnnnnnnnnnnnnnnnnnnnnnnnnnnnnnnnnnnnnnnnnnnnnnnnnnnnnnnnnnnnnnnnnnnnnnnnnnnnnnnnnnnnnnnnnnnnnnnnnnnnnnnnnnnnnnnnnnnnnnnnnnnnnnnnnnnnnnnnnnnnnnnnnnnnnnnnnnnnnnnnnnnnnnnnnnnnnnnnnnnnnnnnnnnnnnnnnnnnnnnnnnnnnnnnnnnnnnnnnnnnnnnnnnnnnnnnnnnnnnnnnnnnnnnnnnnnnnnnnnnnnnnnnnnnnnnnnnnnnnnnnnnnnnnnnnnnnnnnnnnnnnnnnnnnnnnnnnnnnnnnnnnnnnnnnnnnnnnnnnnnnnnnnnnnnnnnnnnnnnnnnnnnnnnnnnnnnnnnnnnnnnnnnnnnnnnnnnnnnnnnnnnnnnnnnnnnnnnnnnnnnnnnnnnnnnnnnnnnnnnnnnnnnnnnnnnnnnnnnnnnnnnnnnnnnnnnnnnnnnnnnnnnnnnnnnnnnnnnnnnnnnnnnnnnnnnnnnnnnnnnnnnnnnnnnnnnnnnnnnnnnnnnnnnnnnnnnnnnnnnnnnnnnnnnnnnnnnnnnnnnnnnnnnnnnnnnnnnnnnnnnnnnnnnnnnnnnnnnnnnnnnnnnnnnnnnnnnnnnnnnnnnnnnnnnnnnnnnnnnnnnnnnnnnnnnnnnnnnnnnnnnnnnnnnnnnnnnnnnnnnnnnnnnnnnnnnnnnnnnnnnnnnnnnnnnnnnnnnnnnnnnnnnnnnnnnnnnnnnnnnnnnnnnnnnnnnnnnnnnnnnnnnnnnnnnnnnnnnnnnnnnnnnnnnnnnnnnnnnnnnnnnnnnnnnnnnnnnnnnnnnnnnnnnnnnnnnnnnnnnnnnnnnnnnnnnnnnnnnnnnnnnnnnnnnnnnnnnnnnnnnnnnnnnnnnnnnnnnnnnnnnnnnnnnnnnnnnnnnnnnnnnnnnnnnnnnnnnnnnnnnnnnnnnnnnnnnnnnnnnnnnnnnnnnnnnnnnnnnnnnnnnnnnnnnnnnnnnnnnnnnnnnnnnnnnnnnnnnnnnnnnnnnnnnnnnnnnnnnnnnnnnnnnnnnnnnnnnnnnnnnnnnnnnnnnnnnnnnnnnnnnnnnnnnnnnnnnnnnnnnnnnnnnnnnnnnnnnnnnnnnnnnnnnnnnnnnnnnnnnnnnnnnnnnnnnnnnnnnnnnnnnnnnnnnnnnnnnnnnnnnnnnnnnnnnnnnnnnnnnnnnnnnnnnnnnnnnnnnnnnnnnnnnnnnnnnnnnnnnnnnr

SEQ ID NO: 95630 - DNA, 39140 bp, Homo sapiens
ccgccccaacagcctctactaccttatatgctcagacatctcctccagggcacaatgcgcagagcaacgggggccaggacaggggccctaaggacacctccctggggctcccagcccccactccaccactcgacctctggcaagcaactaatctctgcaaacgtcacttttctcttctgcgagatggaagtaattatagtacccactttccagggctactgtgaggaccacacaatccacataaagtactactgaccatgctcggcaaatacgaagagcccctaagggttgctgtggtggttctgaccatttttacttcacgctgggaactagccaaagtggacaaatgttgatgatcaagctgtcaacttggaagtgaaggcggttggtaccaggagagccgccagggggcagctactctgtggcagaatctgggcctcacaggcctgatgacctagaaccaactaaccaagccccagagaccctgcttacctgcgctccgcactgccccgcacccctcccagctcacctgcgctccgcactgccccgcaaccccccccaccccgctcacctgcgctccgcactgccccgcacccctcccggctcaccagcgctccgcactgccccgcacccctccccgctcacctgcgctccgcactgccccgcacccctcccggctcaccagcgctccgcactgccccgcacccctccccgctcacctgcgctccgcactgccccgcaccccttcccgctcacctgcagtccgcactgccccgcacccctccccgctcacctgcagtccgcactgccccacacccctcccggctcacctgcgctccgcactgccccgcacccctcccggctcacctgcagtccgcactgccccgcacccctcccggctcacctgccctccgcactgccccacacccctcccggctcacctgcgctccgcactgccccgcacccctccccgctcacctgcagtccgcactgccccgcacccctcccggctcacctgcagtccgcactgccccgcacccctccccgctcacctgcagtccgcactgccccgcacccctcccggctcacctgcagtccgcacccctccccgctcacctgcggtccgcactgccccgcacccctcccggctcacctgcagtccgcactgccccgcacccctcccggctcacctgcagtccgcactgccccgcacccctcccggctcacctgcagtccgcactgccccgcacccctccccgctcacctgtagtccgcactgccccgcacccctccccgctcacctgccctccgcactgccccgcacccctccctgcttacctgcgctctgcactgccccgcacccctccctgcttacctgcgctctgcactgccccgcacccctccctgggtgagcgcaggccccgcacccctccctgggtgagcgcagccaccgcacttcaggctctgggtccaggagaggtacaaagaagcaaggatgacagaaccctggtggctaagagaacagcacagagctgcagaggctggtgccctcagtcacatggccaagagaacagcacggagcttcagaggctggtgccctcagtcacaagtcctatgtgggaagagggtcggctacaaggctggctcgccacagcaacctaagggtctacttttttttgagatagagtctcgctctgtcgtccaggctggagtgcagtggtgcaatcttagctcactgcagcctccacctcccaggttcaagtgattctcctgcctcagcctcctgagcagctgggattacaggcacgcgccaccatgcccagctagtttttgtattttcagtagagatggggttttgccatgttggtcaggctggtttcgaactcctgacttcgggtgatctgcccacctcggcctcccaaagtgctgggattacaggcgtgagccgtcgtgcccggcccggtctacttttaagatcagtctaaggctgggcacattatctcatgcctgtcgtcccagcactctgggaggcctaggccagggggatcacgtaggcccaggagttcaaggctgcagtgagtcgtgatcgctccactgcactcaacatgggcgacagagccagactcttttcaataaaagaaaatgatctcaagtgtaccctgcrgaggacacatggggccagcatgcggcctcccctgccactgagcccaccttggagacatggggccttcctgccactgagcccacctgggagggtttctgaaacttgcaaccaagagtcttgcttgtaccacatgattctgcaactgtcagtcagtaccaaatattcacagtgccctcacccagtccagaacattcttttttcttttcttttttttttggtgagacggagatttactcttgttgcccaggctggagtgcaatggcgtgatcttggctcaccgcatcctccacctcccaggttcaagcgattctcctgcctcagcctcctgagtagctgggactacaggcatgtgtcaccacacccggctaattttgtatttttagtagagacgggtttccccgtgttgcccaggctgatctcgaactcccgatctcaggtaatccacccgcctcggcctcccaaagtgctgggatcacaggcgtgagccactgcgcccggcccagaacattctaagtaagtgaagggaggaagcctccaaaagccatgtcaaggaggaagaagggtggagagtcaggaccacacacaagtggccctgggggtgggagtaggctgtgccctccccattccttaggccagagcttgacccccaaggctcctgagcgggcccagccactcagctaacactgcgcatggcacacaagggctgcgggctggctcaaattacatacaacacccaaccaaacgcacgaggcgggttacgcttaaaccatacgacggctgtgcggcatcgttttcttttctgcctcaatttatctcactagcagtaaccccgagttcaagtcagccacacagggaaggtggatttccctgcagtcagggcaccacaggctccacttcagaagcaacggcacgcagaacccaaaacaaagaacacacagcatacacctgccctgggcatctctgacatggttggtgctcctgataatctgccttttaaaaaagtgaagactagctaggtgcagcagcacatgcctgtaagcccagctactcgggaggccgaggcaggaagatccagagcccagttcaaatccatcctgagtaacagcaagacctcgtctcttaaattaaaaaaaaaaaaaggaagatgacagaacaaatttgaagaaattagaaagctatctggttccacagttctacctaaaaacccattcacaccacaagtccaaattcctaaaagctatgaaaaccattttttcctaactcacttgacagcaaatcctggtctatcataataacctcatttgggataaaacctgacatgaactgatatggggttaattacagactttaattatcccacagtgagaatatttattcatttaattacagaaatattaatgtattcaattacagaatactttcccaagtcttctgggagtatcccacgatatacaggttatatgctgcaatgaccattctgaaacctgaaaaattctggaagtgtaaacatctgtactcaagggttcagattaccagccatcaccatgtttacacaagacagcctaaactcccatagcctatgttctaaggttgctgttcagacaaaacttaattaagtatgtttatataaaatacttaattcagctttcacactctgtttcagttcaaagaggcttcaaagtacttaggaggctgcaggccacctattaagtttacaaggaggaaatctacagctcctaattgcattggttatttttatctcctgacttgcctagatagcaaagggaaacaagttcttttgcacaacctcagcagctgcccacatttccttgttcttcttcctgggtgctaagtgacccacaagcttctttctttatacgaatcttcctctccgggccccagtgagggtgcattctccatccctcccaccaagatccgtgccatcttctgcttggccccttcccaaagctcacactgtctgtaccacccctaaggatctgtccctgtgctgcctctgtctctccaccccttgagcacaagtctgaagttccagaaagcaagtcctgtccacaataaacttcttaaagaatgaagataaccacctagtattttcagaataaatgatttgatctgagagaaatcttccaactgatgtgaaagaatatcacacttcagcccccacttctgaaagaagagcttagactttctgaccaaatcatacccaaaatctgtttggttttgaccacaatggagacaaagtgtgtgataatgctacagtcaaaatgtctccgcaggccttttgtgataatcagaattctgggatagtctcctgtctggtcacagagcaggcacctggacagrctaaccctccagccctgagaggtaccagggagctggtgagggtgagggcttttgtgtcgcttcactccctctccctgtgccaatacagcagaatagagttacgcttccgcacccaagtcaactgtgtttagcccataaacttcacagccagtgaaatatgacacacctccaggcaccactggacaaaaaatgtaaggaaaatccacaagagagaatgggacccactggcactggtgatcgattccgtgtgaacggagaggacatccagggagctagaaatagcatgcagagacaaaactgactcaagactgactcaagaggacttaagccgagtgacctgtccactctgcaagttctatataggtcacaaccactggctctgcttcctgtactacacacggaatcacacgagtagatgttcaccgggaagagaaacactgaggtgttgaaagacgaagggggatcacgagacacagcccagtctaccctcggccaacccccccaccccccaggctacaaccgcaactacctgcaacacgtgtgcacccaccaactctcaagttccctggactgtagaagaaccagccctaacctccaaagtccagtcctgtccctgcctgctcaataaccccagatgtccggcaaaaggccaaggcttaaacccacctcctgcaccgctcacctcctgactccagctgtcggccttctaggcaccgtccctcagtctccgctgtgggtccccacccaagctccctgcctgccaccatcccccacctcaccgtaacatcttcccccacccaccctgagggggttccccaagccccaggccttgctccgacttgaccctactcttatgacaagaaagtaccccgacccggtcccagcctcgccctccgcaatcaccgccagcaggcactcacctacgcccgcgctatgaccttcgcctggccctgacccacgccctcggcagagaccctcccctggccgaccctgacccacgatcccgctgggaccctccccagccctaacccacgcccttccactccgggctgacgctgcccccagcgtcccggagacaacactccgcggccgcacccgcgctgccgacccggggcctcaccttcggccaggacccgccgcacccgcagccgcagctcgcccagttccaccgtctgccccacgaagtcactctggtcgcggccggaagcaccgcccagggagcctggacccgccaagaagtcgagcgccgactgcagcagcgacatggcggtggctgcgccgcaccccgcggcagccggagtggtcgggctcgggctcccgctccctcgccgtccgggtcagctcagcaaccgccggcccggaggtgcaccatcttccgcctcgacgccgtgacgtaggcgcccgtgaggacgcgtcgcgtcaggcggcgacccggcctagccccgtcccctccgccgcggcctcacttcctggctgcgcgcgcaggcgcggaggtctgacggagacagcgcgtgcgcggcgtcgccgggcttgcgatgaacttccggctgtcaagctcccggccgggctgactcaagcggaggcgcgcggaacagtcgccgaggcgattcccgcccaggtagttcagcgccccagtccagctcccggtaccgttccccacatggtctgttttgtgggaggctccttctcaggtgtctccggtttaagcgcttcgccatcctctgggtggagtcagcctcccgtttgctgttagcgccgcgtttgcgaatgggttcgcgaatttttctctcagttggctaaggagcaaggagttagcgtgcgttaagctttcagtaaatacttggttttcgtctcatggaggtcggagtttcctgtgacgcttagtgagtaaggttggcagccccctcccagcagccaggcaggcagtttgcaggggaaacgctgctgcattgctctgtcttccgaggagagggccagggtctggcctggggcagtgaccagtagtgggagccgtgggctagaaaaaccttcgtcctgggcaaccacaacactgcagagactgccctgtgaccctcaaggttcgttctcaccctgacattttccaaggcaaaagcaaatcctcatgaaccacttggaagggttcgtaatgcccaactatttggagatgaaatggtgactttccttataggataataaggaaatggctcacagacaatgcatttttagtttttggcccacacagtatttgggggttgggagtgggtagcaggaggtgaattagttgctatcatttaaagactgatgccaggcgcggtggcttacacctgtaatcccagtgctttgggaggccgaggcaggcggatcacctgaggtcaggagttccagaccagcctggtcaacatggtgaaaccccgtctctactaaaaatacaaaaattagccgagcgtggtggcgggtgcctgtaatcccagctactcgggaggctgaggcaggagaatcgcttgaacccgggaggcgggcgccactgtaccctagcctgagactccgcctcaaaaaataaataataataataataataattgaaaggcctaaatgttaaaaacctagttttccagcttctgtggaaaaatcaaacctgtcaatattggacccaaaatgatgtgtgttaccaattacctagagtggtcccttgaggtaagacacagtcatttgcctgaccagatgggctcatgtatgttacctgcctggttcctatagtcatttaaggttgcaaccccttcaacagagttatttgttctccaactcaaaaatggattctaaagctcacatcagcctcttagccgtcccagaagctaacatctgttatctttatcattaaaagataatagcctcagctcgttggaacacttatctatgttatggaatgaagtattgcatgaagccaaatgacatctttaaaaatatatataacaaaaataacagtagcaatagcttagtttaggcactgatttattgcttacaacacccttttctgtaatagttcattgtagtgaaaacatctttgtgaagaaagcacagtataattaaccccctttattttgggatgagaaaatatgctcaacaatgccattattcggccagggccaacaagtgatacaactgcaattcaacgcaagtcatggcttttccagccagtgcgtttgtctggtcgactgtggaatagaaggatagagagctcaggaaagaatccctgctagagacasatatctgggcatcctcagcatagaggtggcagttggctctaggagctgaagagaggaccaacagagatggtgtactagacataaagaggttagaatcttcagagaatagacagtttgtggagaaagagcagtcagtgaaggaggaagaaaaccaagagagtgtcgtaacagagccaaggaacgaggatgttcggggcagagagtgcagctaagagtgtcgaatgccacttaaaagtcaagtagaaaaagaaatggaagatatgtgttggatttattcacaagggatcattggtgacctcaccaagaatagcttcattggagtaatgaggtggaagctacatattaccgtagagggatgaagagatgatgaggtagagatggcaagtggagataactcaaaatgtttgtctgtggaagagaatatgaacaacttcaggccaacaaattcggcacccttagctccagggagctacaagggtgatgtagtattgagatgttttaagatgagagattcttgagcagcctaaagcggatggaagggagagaaggtttgctggtacagaaaaaagaggaataataagataattctatcttaatgagatatcttctatctcttagaacataggaggggaatgacatcaagagcataggtagagatatttgctttggacataggaaaaacactcaggaagaaaaatgggctgcagttgyaggtgaccttatgtatttattggaatgaaggtgaaggaattctctaatgacttctgttttcattgtgaatgaggaaagaaaaacatcaactgaaagtgagaggggaagtaggaaacccaagatttaagcagtgtcaaaaagatctaaaatagctattatgagaaacctagcaaataactcactggaaagcatgagagcgtttaagcactcatctggaggccatgaacttatactggcatgacctgggatcagctggacatttctaaaccttgtaatcactttggaaaccagagtcagactacttatcttacgaatatttctggagcacctttatttattggcattgaagtagatgctatagtaacaccatcttaacccaaatatctatctccatatctcatctgaactctcagatgtttgttcttagatactgctacatgtataaacatgtatatatccaaaactgaagttatagtcttaatccctataactgatttcctaaatttcatagcaaagagtattgcaagagattaagaggatcattttgtaatgaagaaggggtgaattcatcgaaaagacttgataatcctaaacatttatgcacctaataacaaagctctaaaatacacaaagcataaactaatagctgcaaggagagagaaaaatcacaattgtagttggagaatattctttctcaataaacgataggatagatacccagaaaatcactgaggatataggcgacttgaacatgactgtcagccaacttgacctaatgaatgtttatggaacactccccacaataacagcagaatacacaatttttcaagtgcattaaaacattaagcctgatcatattctgttctattaaacaagtatgttatctgaccagaatgatattgaatattaaagtagaaatcagtaacagattggaaaatcctttcaatatttggaaactgaataactcacttttgttttttgtatattttttcaactcacttttaaataactcatgggtcaaagaagaaatcaaaaaggaaattagaaagtattttgaacagaatgaaaatgaaaatgcagcatttaaaactggtgggatgcagctaaaacagtattaaatgttaagtctcaaatcagtgacctcagcaatcaccttatgaaactagaaaagttggctgggcacggtagctcactttggcaggctgaggtgggcagatcacttgaggtcggaagtttaagaccaccctggccaacatggtgaaaccccatctctactaaaaatacaaaaattagctgggtgtagcagtgcatgcctgtgcacgcctgtagttccggctacttgggagcctgaggcaagakaattgcttgaacccgggaggtggagattgcagtgagctgagactctgtcacaaaaaaaaaaaaaaggaaactagaaaagtaagaggaaatgaaacccaaagtgaatataagaaggcagataataagtatcagagtggaattcaaaaaaatagataacaaaagcaatagagaaaatcagggaaaccaaaagctgattctttgagattaataaaattgaaaaatctctggccagattgaacaagaaaaaggcaagacacaaattaccaatatcaggaatgagaaatgacatcactacggaaaggataatcggggactattattaaggactttaggccaacaaattcagcagcttacactaaacgaacaaattcctggaaagcacaaaccacttaagctcatttaagaagaaattgtgttgggcccggcgcggtggctcacgcctgtaatcccagcactttgggaggccaaggcaggtggatcacaaggtcaggagatcaagaccatcctggccaacatggtgaaaccccatctctactaaaaaagatacaaaaattagctgcgcatggtggcatgtgcctgaaatcccagctacttgggaggctgaggcaggagaatcgcttgaaccagagagtcggaggttgcagtgagccgagattgagccacggcactccagtctagcgacacagtaggactctgtctcaaaaaaaaaaagagaaattgtgttgtatgaaaggatgaaagaggccctgacatgcatacaattaaggcattgcaacatactttgtgttatctaaccatcttttttttttgaggggatggataccccattcttcatgatatgattattacacattgcatgcttgtatcagaacatgtaccccatgaatatatacacctactatatacctataaaaattaaaaatgtaaattttttaagaagggaatagataacctaaatagctctatgtctattaaagcattgaatttatagttgacaaatcttcccttaaagaagactccagacttggctgggcacagtagctcatgcctgtaatcccagcactttgggaggccgaggcaggtggatcacctgaggtcaggagttcaagaccagcctggccaacatggtgaaacctcatttctactcaaaatacaaaaattacccagcatggtggtaggtgcctgtaatcccagctacttgggaggctgagggaggagaatcactgggacccaggaggtagaggttgcagtaagctgagactgtgccattgcactccaacctggacaacaagagtgaaactcgatctcaaaaaaaagaagactccaaacttagatagcttcwctgggaattctactaaacattgaaggaagaaataataccagttctatacaaactcggaaagttgaaggaaggaattatttcccacctcatcattccttacagcattattctgataccagaattccacaaagacgttactagaaaattacaggataatatctcttgtgaacatagacaagaaaatgcatttaaaacattgtttagcaaattgaatccaacactatatacagaaaggatagtacaccgtgaccgagtgggatatcycaagagggcaaagttggcttagcatttgaaagtttatcaatgtaattcacactcttgagagtgaagaaacaaaatggatcatgtcaatagatacagagaagcatttgacagaatccaacatccattactgatttaaaaaaaaaaaaactcagcaaactaggaataaaatgaaacttcctcagtatagtaagggcatctgtgaaaaacctgcagctagcatcatatgaaataataaaagactgaatgttttccccctaagaccaggaacaagccaaggctggctgtctgatctcaccacttctattcagcattgtactagaaattctagccaacgtgatgaggcaagaaaaagagggctggggccaggcacagtggctcacacttgtaatcccagcactttaggaggccgagtcgggtgggtcacctgaggtcaggagtttgagaccagcctggccaacacggtgaaaccccgtctctactaaaaatacaaaaattagctgggtgtggtggcgggcgcctgtaatcccagccactcaggaggctgaggcaggagaatcacttgaacctgggaagtggaggttgcagtgagctgagatcgcaccactgtgctccactctggacaacagagtgagactcggtctccaaaaaaaagaaaaaaaaatcggatagaatctataaaaagagctactcgtgagtttagcagggttccaggatacaagataaatatgcaaaaatcaattctatttctacgtactagcaataaatattggaagttgaaattagaaacatttacaatagcatcaaaaagtctgaaatacttgggataaatgtgaaaaaagatgtgcaagacttatatgctgaaaactacaaaaattagctgagagaaattaaagcccataataaatggagagatatgccatattcataaactaggagattcaacagtgcagttctcaaattcacctgtagattcaatgtaaaccagtcaaattcccagcagactatgagaatttgacacatagattctaaaatttacttggctctgcaaagaagctagaatagtcaatacaagattgaacaaggacaagacaaaattgtgtgatttacattacctaatttaaacacttaaagccacagtaatcaaaactgtggtggctgggtgtagaggtacgtgcctgtagtcgcagcaactcagcaggttgaggcgggaggatcccttgagcctgggagtttgaatctagcctgggcaacagtgtggagttgatataaagatagctaagtaggtaaatagaagagtccagaaattgacccacaggtatctatgctgaattgattttttataaaggtgtaaaagtagttcattggagaaagaataattgtttcaacaaatgatactggaaaaattggatattcacgtgtttagaaaaaggaaccttgggccgggtgcagtggctcacgcctgtaatcctagcactttgggaggctgaggcgggcagatcacttgaggtcaggagttcgagaccagcctgaccaacatggagaaaccccatttctactaaaaatacaaaaattagctgagcgcaatggctcacgcctgtaatcccagcactttgggaggccaaggcaggcagatcacttgaggtcaggagttcgagaccagcctgaccaacatggtgaaacctcatctctactaaaaatacaaaaattagctgggcgtgggggtgagtgcctgtaatcccagctactcaggaggccgaggcaggagaattgcttaaacccaggaggtggaggttgcagtaagctgagatcatgccactgcactccagcctgagtgacagagtgagactccgcctcaaaaaaagaaaaaagaaaaccttaacccttacctagcattatgtataaaagttaactcaaaatcataaatctaaatgtgagatctaaaactataaaactcatggaagaaaatgtgtgaaatgttctgtgagatttttagccatgacactaaaagcwygatcccatgaaggaaacagataaactggatttcatcagcgtgaagaactttataatatgctgttgaaaatagcccatatgaacaataggtgaatagataacctgtaagtccataacatagggtagcattcaataataaaaagataagctatcaagcaacaacaagacttgaaggaaccttaaatgcatattgctcaatgaaagaagccaatctgaaaaggttccatactgtatgattctaactatagaacattctggaaaaggcaaaattatgaagacagtaaaaagagcagtaggccaggcgcagtggctcacgcctgtaatcccagcactttcggaggccaaggcagtcagatcaactgaggtctggagttcgagaccagcctggccaacatggtgaagccccacctttactaaaaatacaaaattagctgggcgtggtggcatgcgcctgtaatcccagctactcaggaggctgagacaggagaatcacttgaacctgggagctggaggttgcagtgagccgagattgcaccattgcactccagcctgggcagcaagagtgaaactcgatctcaaaaaaaaaaaaaaaaaaaagcagtagttgctaggggttcaggaagaaagagggagggtggagcaccagagatttttagggtgtttaaactattctgtatgatactgttttggtgaaaacaagtcattttacatttgtcaaaacccatagaatacagcacagaatgaagcctaatgtaaactatggacttaggttaattgtgatgtatgaatatttgcttgtcaattgtgccgtatgtgccacaccaatgtaagatgttaataataggagaaagggaggccagacatggtggctcatgcctgtaatcccagcattttgggaggctgaggtgggtggatcacgaggtcaggagttcgagatcagcctgaccaacatggtgaaactccatctttactaaaaatacaaaaattagccaggcgtggtggcgtgtgcctgtaatcccagctactcaggaggctgaggcaggagaatcgcttgaacccaggagtcggaggttgcagtgagccaagattgtgccactgcactccagcctgggtgacagagtgagactccgtctcaaaataataataataataataataataataataataataataataatgggagaaaggggaaagggggatgtgaaagtgtataaaagaactctgggccgggtgcagtggctcacgcctgtaatcccaacactttgggaggccaaggtgggcagattacgaggtcaggagttcaagaccatcctggccaacatggtgaaaccctatctctactaaaaatacaaaaattagctgggtgttatggcaggcacctgtaatcccagctgctcgggaggctgacacaggagaatcgtttaaacccaggaggcagaggttgcaatgagccgagatcgtgccattgcactccagcctgggtagcaagagcgaaactctgtctcaaaaaaaaaaaaaaaaaaaagaaacaaaacaaaaaaaactctgtactttctgctctatttttcttttttttttttttcttgagatggagtctggctctgtcactcaggttgcagtgcagtggcgtaatctcggctcacggcagcgtctgcctccctggttcaagaaatactcctgcgtcaaactcccgagtagctggaattacagacgcgtaccaccacacccagctaatttttgtatttttagtagaggtggggtttcatgttggccaggctggtcttgaactcctgacatcaggtgatccgcccaccttggcctcccaaagtactgggattacaggagtgagccaccgcgcccggcctctgctaagtttttctataaacctaaaacggcttaaagaaaaaatcaattttggccaggcgtggtggctcattcctataatcccagctacttgggaggccgaggcaggagaattgctagagcccagcctgggccacatagaccccatgtctttataaaaaaagaaaaaaaaagaatattttgtcaaacccaatgtcatgaaatgattttctccggcatcatcttccaagagttttatagttttaactcttacatttacatcattgatccacttcgagttaacttttgtatgtgtattaattaggttgagtccgaattcattctttttttttcttttttttttgagatagagtctctctctattgctaggctggagtgcagtggtgcgatctcggctcactgcaacctccgcctcccgggttcaagcgattctcctgcctcagcctctcgagtagctgagtagctgggactacaggcacgtgcaaccatgcccagctaatttttgtatttttagtagagacgaggtttcaccatcttggccaggatgatctcgatctcctgaccttgtgatccgccttcctcagcctcccaaagtgctgggattttgggcatgagccaccatgcccggcccgaattcattcttttgcatgtggatattcagttgtcccaacaccatttgtgaaaaagacttttcttttcccatcgagtggtctcggcatccttgtcaaaatcagttaaccataaatgtaggggtttatttctgaactatattccattggtctgtgtctatgctgtcttgactactgtagctttgtactaaattttgaaatcagaaagtgggagtgctcccaattttgttctttttcaatattattttggctgttaaggttccttgaattttctttttttttttttttctttttgagacagagtctcactctgtcacccaggatggcgtacagtggtgcaatctcagctcactgcaaccttcgcctcccaggttcaagcgattctcttgcttcagcctcctgagtagctgggactrcaggcgcacaccactacgtccagctaatttttgtatttttagtagagatggggttttgccatgttggccaggctggtcttgaacccctcatctcaggtgatccgcccgcctctgcctcccaaaatgctgggattacaggtgtgagccactgcgcccagccaaaattcagaacttctgttctcctaaagactggtaagagagtgaaaagacaagccacagactgcaagaaaatatttccaaattacacatcttgcaggatttttaactagaatataaagaactctcaaaactcaatgacattacaaacaactcagtaaacaagcaaagattctaagacacttcactgtgaaagctatacagatgaaagatgcctaattagtcagtagagaaatagcagattaaaaccacaatgagacacccctacacgagtactagaatgactaaaataaattaattgaattattgatttttattattactatttttttcctagacggagtcttactctgtctcccagcctggagtgcagtggcacgatcttggctcaccgcaacgtccactttctgggatcaagcaattctcctgcctcagcctcccgagtagctgggattacaggtgtgtgccaccacacccagctaatttttgtatttttagtagagatggggtttcaccatgttagccaggctggtctcgaactccggacctcaagtgatctgcccgcctcggcctcccaaagttctgggattacaggcatgagccaccgcgcccagctaaattatttctctaagctgtgccaaactgagtaccagaggagatgagcaagcgcaggtctcatgcctgtcggtgggaatgcagatggtgcagctgcctcggcaaattgtcgggtggtttctcaggaaggaaacatgtccttacaatacgacccagcaaaaccactcaaaggcatttacccaaaagtcatgaaaacatgtttacacaaatgcctgtgtgcaaacgtttatatatagtggctttattcataattgtgcaaaatgaaacaatacacacgtttttcagctggtaagtggatccacaaactgaggtgtgtccatgcagtgaaattaccacacagcaaccaaagaagtgtgttactgatactcccagcaccacagatgagtctcgaaagaagctagactcaaaacctctggagggtgcgattccgtttataccacattctaaaaaaggcaaaattggctgggtgcagtggctcacgcatgcaatcccagcatttcgggaggccaaggtaggtggatcacctgaggtcaggagtttgacaccagcctgggaatcatggtgaaaccctgtctgtactaaaaatacaaaaattagccaggcatggtggctggtgcctgtaatcccagctgctcgggaggctgaggcacaagaatcgcttgaacccaggaggcggaggttgcagtgagctgcgatcgtgccactgcaatccagcctgggcgacagagcaagactgtctcaaaaaaataattaactaaataaacgaggcaaaattacagtgacagaaaacagatcagtggttgctggagcttggggttggggaagcttgaacacaaagatgctgtttggggatagaacagtttgctggattgtggctagctgtggttacatgcctgtctgcattctaggtaagaagtaacctgggcatagagcaaaagccccccacctgctccccgcccctccctgcctgggttgctgcagcgctgtctggaagttggcgaacattgttcttatttgtggttttcatttcttaccgtatacacatacggtgtgtgtataattaagaagatagatggttttatgtgtccattgtttacataaatggtacaatagtatggttttgcaacttgatttttttgtctcaacattttgttttatagttctatacttgtagatctgttttaactttctgatagtttacttcatggtttaatgatttgtcccttactagtcagaatgtgttttagttttattgttaaaacacaccgggctggctgcggtggctctcgcctgtaatccaagcactttgggaggctgaggcaaggagattgcttgagcccaggacttcaagaccagcctgggcaacatgatgaaacccctgtctctatgaaaaatacaaaaaattagccaggcttggtggtgcacgcctgtagtcccagcaacacaggaggctgaggtgggaggatcacttgagcctaggaggtcgaggctgcagtgagccgtgattacgccactgccctccagcgtgggcaacagactgagaccctgtctcaaaaagaaaaaaagaaaaactgcgtgttgcctcagtgcagaccctaggcagcctgtcatggcagtcccagtgagactgcctggaatggacccttggagggtatggcactacaccttattaactgttgctaaactgtcgctgaaacacacatgtccgtttacattcctgcctcagtttctgtttccccaggcccccgccgtctctgtctcctcactccccgccgtttgttgctgcctcagcttctgttttccccacgtctttgccgtcctgtcgtctcactccccgccgtctgtccccaccgttcattccagcctcggtttctgttttccccaggtccctgccctcccgtcgcctcacgcccaccaccctggctggcctctctccgtttcatttgcacctccccgatctccctgattgctagtgaagtggaatgccttgtgtgtttgtttttcccggctggaaaccagtgagcctctgtccattctctggggtgaactctccttgtttttgtgcgtctcgccttggtgtgagcagactacagcacatccctcttcctgcggaccctctagctggccacatatttcagtcccctgatgcccttggccaagtaaacagcaccccctttggagtaaaacctgggggctctggcttgtcacctcccgctggtgctgaagggctctccccatacccttcctgaagaggtctccgccccttaaatggtggagagcccagcctgtcctgcccccggctgctcctctcctccttcccgggtgccactccctcggaccacccccacatttccaagtagcacagaaattacttctgtttctaacacggctcaatccgaggtacctttgaaggctgcagctccagcctgactccttccatccccatagctcccctgccctgagacagcctccggtgcttctgctgtgtcccaggaaacaagcctgaagcaagcactcaccatccctcaagaatgtgccctgaccyaccttcctcaccacggtggcatcagggccaggtgggctcccccttctccgtcaccccccacggcagcccccaatactcttaggagctgctttcccacatgctgtgtgtctcctgggatgccagacctccgtcactcctctcctaggtcatagcagcccttctgactggcgtccttgacacactgctgccctcttccctgctccggggcacctggctgcaggtggggctcagccaacatggggctctctggccacattctatgtttggggaacttgtctcagtgtgcccagcctccacctcgggtgcagggtgaaatccatagtgcctggttggcacgaggctgcccactcgggtgcagggtgaaatccatagtgcctggttggcacgaggctgcccactcgggtgcagggtgaaatccatagtgcctggttggcacgaggctgcccagcaccatgcagcaatggctcctgcagccatacctcagttctgtctccgtgaggcgctggggtctcttctgtccagagtactctccacctggcatcttattcatcttcccagatgcatctctgatattaaaaatgcctggggagtgctgtgctgagccacagctgtggcgtgtgcccagtgtgcacccagccccggctcccacaggcggactggagtgcctgccctggtgctaactggctacatatgcagggccttggtttccccaaaggtcaccaagggagagcgcggcccctgtaggaaacagccccaggcacgcgtgcacaggcgccgagaccgagggagagcgcggccccgtaggagacagccccaggcacgcgtgcacaggcgccgagaccgagggagagcacggcccctgtaggagacagccccaggcacgcgtgcacaggcgccgagaccgagggagagcgcggcccctgtaggagacagccccaggcacgcgtgcacgggygccgagaccgagggagagcgcggcccctgtagagaacagacagccccaggcatgcgtgcacgggcrccgagaccgggggagagcgcagcccctgtaggagacagccccaggcatacgtgcacaggtgccgagactgagggagagcgcggcccctgtagagaacagacagccccaggcaygtgtgcacgggccccgagagcgagagcgggggagagcgcggccctgtagagaacagacagccccaggcacgtgtgcacgggccctgtagagaacagacagccccaggcacgcatgcayggtcaagggccccgcagggtgctgtgttcctcttccacgtttaggtcggccttggggtctgtgatctctgtgcctttccttgtctctcccgtttcctgaggagaaactgaggcccagtccacscagatcagtgttcaccagtaacagggccgggmgtggcatctgttgttggcctctcagcctggaggccagaaatttgaggggcacctgggagaggacagagcagcgtggacccttcccctgctcagtggcggccaagcccccccscataccagtccctgtccctgcaccagggctgaggctgcatggccgacctccaggagcgccccacaggcacactcaracctgcctttcctcccaggctcctgtaaccgccaggcagyggccccgccatgtcccagccccggaccccagarcaggcactggatacaccgggggactgccccccaggcaggagagacgaggacgctggggaggggatccagtgctcccaacgcatgctcagcttcagtgaygccctgctgtccatcatcgccaccgtcatggtctgtacggggcccctgcttaggcctgccccaccccgagcctctcgaggcactgcccrgcccacctcagacctgtctaggtcttgccagcatccttgggtcccccagctcctcaggcagcttaggggggcccagcactgccctcgagtccccagtactgccacacccaatccaacaagcgtctcttgctctcctgcttccttctgtctctttgccccctcagatcctgcctgtgacccacacrgagatctccccagaacaggtaacggggcaggctgtgctctgcgtggtgtggccctgcgaagatatagggtccccgaggctcracctggcacagggtgctgaccctgcacgcctcgaagcttctgaggcttaggaggcagaggcgggaggcgggggcctccttggaaagggagggagccaacaagtcctgctcagcctgtgctcaccccggcggaggtcctggcctcctgggagggtgggagactgggctcctagggctctgtttccgagttcagtggacaaaggcagcaccctggaagtgagccagaggacaggttggaagaggaaggttccgggcctgccccaaggacagaagtttcctctgcgggagggcagctgccccagcaggcaggccccttacgtagctgctctgagtaaacgcggccagcgccccgtctcagcggggacactcccaccccggctgctcctgcaggcctggaggtgagcgggaaagggtttacaagcagagtttccacyttgactgtttctgagctaaagagccaaacagcatcttagaaggggaatgactggagggcrtctggggcccacacctgcctggctctgtgtcctcatgacagggtcgtgcggcccaagcttcatgggtgcgcaaggcacagcagtgaccacgtagcccttcctgggccagtactgaggttgggcctccagtcctgactcgtgagctgagcctgggggacgcbgagaagtcatgggagctgcttagagttcggctttctcagctgtgcgaaggggatgatgagactttacatagggttttcataagtagaaatgcgggtggagcctggcccagtctgcagggagaccctgggcaccagcaggcagcaagcagcacaggcactgggaccccagagcygctcccgccctccctaggggggcagctgctcaggaaagctgcgtccccaccgaggcccatggggtgggcttggccaaatgcagtcgtgaggtactggccttggctgcccctttcagaacggggtcgctgaggtacggccacatccacctgtgatgcccgtgccagagggcgcatgacaatgaagggcccgggtggttgaaaataaaaacctgtgaacctaaacctgctccgacttctctgcagccagggcacctttctaggactgtggtgtttagtgccctgtcttttctctgttgtcctaactgggtcacagggagggtctgagtctcagaaagtcctggagagtcaaaagctcattcagagaacacatttatgtgaagagggaaaggcctgacgtgtgtcccagggaaggtgctagaacagtggacacctccttgtgaggagaggggactcctggggctgtgctcactctgatgaaaaataaaagacagttgtaactttgaaaacccatgattcgaaaagctaaatgggactcaattaagaagtgactgaaacactaagttattgacccagagacctgcctgcaagtgaagaaccaagggagacagtaaagtgctcagtgttctgttgggagcgttcgtggagaaagcatgaaaaccttcccagggctggagggcgagggccccggtgcctccacgcccaccgcrgcccccagggcaggctgccttcggggtccctcgcagcttccacagagaccctttcccgtggctgctttggaattgcctacctaggcagtgccaggtgtgacccttttgtgctgtcaacctgtgtgtccttccgaagtccgcatgccggacgcctcacagggatggcgttgtgaggcagagcctttcggtggtgacccggttatgatggcagagcctcatgaatgacattcgtgacctggtgcttttgccctcctgtcccctcccacatgcggatacacagagggtaccatccctgaggcggagtccacagcagacaccgagcccattaagagctgaccccccagcaggaacacagcccatagaacactctggagtacacctgtgggtgtgggcatggatcagcgccctggagaaggggtgggggctggaggggtgggggctgcaggtgccaggggagacagaccagctggagacggaggctggacccagaccagggcactcagggtctgctggggaggccaggaccctcccaggtgcctcacaggacccacccgagggtttcgccctgccctgggccgaggccagccccccctcacggtgctgtctcgactgccattcagggacactcatgtcacctgggctctgacagcagtgctcttgtattccagcmgttcgacagaagtgtacagaggcttctggcaacacggattgccgtctacctgatgacctttctcatcgtgacagtggcctgggcagcacacacaaggtgggggcccgggcgcttccagcggtccatagctgctctcaaggttcccgtaccccgcaccacatcacgcacgggtccatggggtcggggaggacagcaggctactcctcccaccctcatccgcgtggggatggcaggacttaccccaaacccagggcctgggacagtgtggatggtgcagtaggcrgaggtgtggayggtgcagtaggtggaggtgtggatggtgcaataggtggaggtgtggacggtgtggatggtgcagtaggcggaggtgtggatggtgtggatggtgcaataggtggaggtgtggatggtgtggatggtgcagtaggcggaggtgtggacggtgcagtaggtggaggtgtggatggtgcaataggtggaggtgtggatggtgtggatggtgtggatggtgcaataggtggaggtgtggatggtgtggatggtgcagtaggcggaggtgtgggcggtgcggatggtgcagggtgtggatgggagcagggtgctttctagggaacttcatttccttcgtgttttccaaactccgtgcactaggtagtagtttatatttggttaacagtgacatcttttaatgatgttttaaccagaagatgctggaaagagtgtgtgtgcatttaatgttactacaaccgcgttttattgtctatctttttcttaaatggtttaggttgttccaagttgttgggaaaacagacgacacacttgccctgctcaacctggtgagtattttccggtccttttctggggagtgactctggtctgtaatctgaccctcagggaagaggggaagggagcagccggcctctctcgtgacctccagggagtctcggagcctggaatctgtccacagctgggagctccttgaatgatctttccctccccatgggtcgccagcctrtatctcctcccagacacagccagggtgtgggggaccaggggcactgggttgggcacaggtgtaggggacagagaggatgagtgcccccatctggccctgcagggtctgggggctggactcacactcgctggcccacccttcttggggagggcccagccctgtgccttcccggagtgggctctgtccattcccctgcccttctccccaggccgcatcatggctgtgatgccctccctccctccaggcctgcatgatgaccatcaccttcctgccttacacggtgagcaacaccaggcccctgacaccctgaggctttgctgggcaccactggatttgacctgtcctcaaaagcagaccagctggatggcccagggcccaggccacacggttgtagagaagagagaaggttctggggagagccagctgttgggctgttgggggcttctttcaggctggcggggaggggaggcagtggccccgatgagggagtcaccggcgctcccagctcccacccggccctgagcccacagccccctgcccatcccaggcctgtccctggcgtgcagcccctacagcctccgaccacccgccctgtactactcaggctgtgaaagtgcctccaaattctggcagtggccgctagtctgagtgtgcggggctgtgtgccacaaggaactggggtctggggaattccgtatgaatcggatgacattttggctttaaaggcctgagacatctggtggagttggttggggtgggggcagtttggacacatgccccccagcacccagctggcgccatcctgtgatggccccaccgcatctcccagcgtcccgtggagtggggaggctcaccatggcccagttccaggctctggggcctggtaacctaggatttgggggggtttggttttgtttttgttttaacagttttcgttaatggtgaccttccctgatgtgcctctgggcatcttcttgttctgtgtgtgtgtgatcgccatyggggtcgtgcaggtagggggcctggggggcctgcactgtgtgtgtgtgtgtgtgtgtgtgtgtgtgtgtgtgtgtgtgtgatcaccatcggggtcgtgcaggtagggggcccagggggcctgcactgtgtgtgtgtgtgtgtgtgtgtgtgtgttcaccatcagccctcttggggcctggggtcctgtgctgtgtgtgtgtgtgtgtgtgtgtgtgtgtgttcaccatcagtgctcttggggcccggggtcctgtgctctgtgtgtgtgtgtgcgtgtgtgttcaccatcagccctcttggggcccggggccctgtgctgtgtgtgtgtgtgtgctgtatgtgtgtgtgtatatgtgtgagtgatcgattgccgtcaggtcacacaggtagggttcctgaggccacctacacacataggatgtggcatgcccagagtccccgctttctgaccagagactgggaagagtgggccctgagaccccccacatgcggccccaggagccagcaggggctcctgttctctctccacctcagcccctgtgcccaaagtgtcccaggtacaagcccacctctactcgccaggtcctcccccaccccaagacccctgtgcgcgcgtgccatgcagcccggggccaggtcctccccacctcgagacccttgcgtgcgtgtgccatgcagcccgggggttgactgctgtgggggccccctctgctcttggggcctgtgtcctacagcttgcttttcccrcaggcactgattgtggggtaygcattccacttcccgcacctgctgagcccgcagatccagcgctctgcccacagggctctgtaccgacgacacgtcctgggcatcgtcctccaaggcccggccctgtgctttgcagcggccatcttctctctcttctttgtccccttggtgagtgctgggacagcccgtggggcccaggcaggaacgggggccaccataggagcaatgtccccgctgagcaacaaacacgggggtgggggcagagcgcagacaggcaggggttccacccagggtcttgtgtgtgaggcccagggctgcagtgagtggcaccagggagggaggcctgctccacctgaggccccgagacccagcctgtcgaggacagagacggacgctcatcgaaggaaggggcagctgagtgtccttctcagagaagcttcacgatgacgatgaccagaaacagcgacacccggaatccgggggtgcatgcgttttcttgttttgttttttgttcattgaggcaagatctcgctgtgtcacccaggccggagggcagtggtgtgatcttggctcaccacagcctcgacctcccgggctcaagtgattctctcacctcagcctcccaagtagctgggactacaggtgtgcaccaccacacctgggtagttttggtattttttgtggagacagagtcttgctatattgcccaggttagtctggaatgcctggactaaagtgatcctcccgccttagcctcccaaagtgctggattacagtgtgagccaccacgccrgcctttattttctttttttcttttttttttcttgagacggagttttgctgccaggctggagtgcactggcgcaatctcggctcattgcaacctctgcctcccaggttcaagcaattctcctgcctcagcctcctgagtagccgggattacaggtgcctgccaccaccctcagctaagttttgtatttttagtagacacggggtttcaccatgttggccaggctggtctcgaactcctgaccttgtgatccacccacctcagcctcccaaagtgctgggattgcaggcatgagccactgcgtccagcctattttcttttggataaggaatctatacaaaactgtgtcaggacagtaaacatcaaacagtgtttggaggaggagcccctggggataagaccagtatctgctcatggggacatcagctgttggtgcttggagaatgtgagccactagggagagggagaaggcaacaaaagcactgctggagacgtgtaggtgtcgtgagtggcgccgctgtgagcactgctggagacgtgtagctgccgtgagtggcgccggtgtgagcattgttgcgtgtggagccactgtgggcattgctggagtgatgcctctctgagcattgctggacacgtgtctcttcagatctgtcttctcaggctgttggtgtgtgtgcccacagtgagtttctgggtcatttggtgattctgtttaattttttaagtttaattttttgaggaaccaccaaacttccacagcagctgcagcattttacattcccaccagcagcacatggtggttccagtttgtccacatcctcatcaacacctgctgtttttcagttctctccatcctagtggatatgaagaatctcgttgtggttttgatctgcgagaggtcgaccatttgcatgttttgtttggagcaatgtctgttctcatcctttgcccatttttaattgggtcgtccttttatttttgagttgtaagaatttcagatagggagatagacgataaattttaagacacggtcttgctctgtcacccaggctggagtgcagtgagctgggtcacctctcactgcaactcctgtctcccaggttcaacaggcacacacagtcacacctgactaattttttatttttcgtagagatacagtcttactatgttgcccaggctggtctcgaactcttgggcccaagcgatccacctgcctcagccccacaaagtgctgggattacaggcatgagccactgtgctggcttaagaatcctttacactttttgggtactaggccccatcagatacatgatctgcaaagaccctcccttctgccgcagcccctgctttggcacacagctttgtgtgggtaaggcctggcctcggacccctgtggagggcactgacctgcggtttgtctccctgcagtcttacctgctgatggtgactgtcatcctcctcccctatgtcagcaaggtcaccggctggtgcagagacaggctcctgggtaggtgatgactgggtgggctggcctgagaggcctgtagtccgcccacctccgtgcggctgctccgcactgagggctgtccgtgggccgaggcccgtgtgcgtggtggtggctggggctcccccactccgcccctygggcgtccctgtcctgtctcctctcctggcctgcacattccaggcctcttcatggatgagggyggtgacagccacgcgggctctacctccacatggggggtttggccagctccaccctcctggcgtgtccccaggccacagggagccctcggctcacccagtggaagtcttctcgtttgacctccacgagccactcagcaaggagcgcgtggaagcyttcagcgacggagtctacgccatcgtggccacgcttctcatcctggacatctggtgaggaccccgcgtcacctgccccagctatcaggtggccaatgtgtcttgagtccctggcgtctcatcctggaaaccccagaaaggcacaggggtcttggctccaccctcctctggatgcctagagttttgtgtgaggtcagggcagcccccacttcagggaggacaaccttcccggcggcccctcccttcccagcggcccctcccttcccagcggctcccaccccaagcacagccgaggatggggtgccagggtgaggtcagcaccagcagccaactgctctcctcactcctctcagaggggctcagcagccatgggtatccccctgccccaggcctcacccctgccccaacaccagcccctcctagtccctagtccctcccattccctccggctccctcccagtgccccccatcgcttcgcagcccctcctgctccctttggctggctgttgcttccttccagcgtctgctcctccgcggcctcatctgcctcttcgtctgttagagcgcgcgtctcgtctcagtcgtcacgtttttggtttttgtggggtttttttttttttttttttgagacagtcctgctgtgtcgcccaggctggagtatagtggctcaagctcagctcactgcaacctccgcctcccaggttcaagcaattctcctgcctcagcctcccaagtagttgggattacaagcacccaccaccatgcccagctaactttttgcatttttaatagagatgaggtttcaccaagttggccaggctggtcttgaactcctgacctcaggtgatctgcccacctcggcctcccaaagtgctgggattacaggtgtaagccaccgtgcccggccatcgtaatgtttgaatttgcttttttacatcttccatccttttggagtgtcttgttccctcgtcatagttcagcactgtgaccaccttggggttagacactatggttttatatcctgtacttgatattctcgagtccaagtctcctgatgctcttctctgctgtcgtgtgcatttttaaaaacgggaagcaaacgttcattggcayctgatctctaaggcccaggtgccagggatgctccagggtgagctgcctgattgtgcaggccagctgaggctccccttgggagggacctgccgaagagaggcagcagcgtggggccgggacagtgacctctcctccacctggagccatggccaggggagctgccccctcccagcaacttcctgcccttgctgcctccagtctgtctcctgcccccaacccccacccctcacccctcgccctctgcgtattgttctggaggacagaagtctgtctggggctgcatgaggaccactgtccttcacktcccgatgttgaaggacgacactgttcccggctttctgggtggtgccgtcagaaggcagcagccctgacaagggggttcccacagcctccctgtggagggagttggcctcctgagaccccyatgtgcatctgagaaccrtggaggcaagccctctgcagatcttcagccagggtgttgtgtgggtggctccgagggctggaagctgggagggaacagacctcgctgccccacagcaggctggtcctgcccagcaaacacaggagagcctcggccagagagggctgcagcccagggcccccagcagcactctgggccagcagggttgggctcccattagcacagagcagaagggtgccagtttctatggaatttcagatgaacagcacgtaacagtcagtgtgccaaatacacataaatacggcgttctgaaatttagcacactgggaagtccacatggttcatctgaaaacgtgccagatccaggcagccctgacaggcgctcagccaccctgctggggcctgtgtggccacggcaaggccggcacaaatgcatctattcactgttctcagcgaagacaacgtcccggacccyaaggatgtgaaggagaggttcagcggcagcctcgtggccgccctgagygcgaccgggccgcgcttcctggcgtacttcggctccttcgccacagtgggactgctgtggttcgcccaccactcactcttcctgcatgtgcgcaaggccacgcgggccatggggctgctgaacacgctctcgctggccttcgtgggtggcctcccactagcctaccagcagacctcggccttcgcccggcagccccgcgatgagctggagcgcgtgcgtgtcagctgcaccatcatcttcctggccagcatcttccagctggccaygtggaccacggcgctgctgcaccaggcggagacgctgcagccctcggtgtggtttggcggccgggagcatgtgctcatgttcgccaagctggcgctgtacccctgtgccagcctgctggccttcgcctccacctgcctgctgagcaggttcagtgtgggcatcttccacctcatgcagatcgccgtgccctgcgccttcctgttgctgcgcctgctcgtgggcctggccctggccmccctgcgggtcctgcggggcctcgcccggcccgaacaccccccgccagcccccacgggccaggacgacccacagtcccagctcctccctgccccctgctagcagccacagagcccactcccagccgtcctcaccagagatggaccagggaggacaggatgctgggcaggggaagccaagtcacgggcaggccgcagtggttcttgcgtggcctggttttattttcrttgtgaaatatcatgctcttatttcagtcctcaaattgttctccactttttgcggagagaggagtttcacaggaactggaaatgtgctttatggcatttgcctatccactctctccaacctgaagacacgttgccaagctcacctacccgaggggcagcccactcccagcccctttgaggcctatacagagctggtggggtcgggggtgccaagccaggccctcccctcccctcggttgttgacacaaagatgaggaagagatggtaggatagtgacgcccagactgtatttgtcctggatataaattactgttgcattcaggcagcgataaatacagaggggcccggtgtgcagggcacagaccccacctgggtacagactcacatacaggacaagcccctcaccacagttacacacgattcatacagaccacagtccacaccagggctcgcgaagcaaaactaatcacaaaggactggtcttgaagatgacaatgacgtaaacaagagtgcacgctggaggccacaagcggccttacaatgcgtgtgtctgtgcagtttggcagatgcggggggtcgggggattagtggcatcaagggccccccaggaggctgcagcaggctgggccaggccacactcctgaggccaaaccagagccacttctgaggtcaaagccacacccaggaaagctccgcaggattggaggcccaggccagctgtgccccacaagggaagggggagatccgcaccgtgggaccgtttctcgtgggggagtcggggcttccccacagagcgggctccatttttggtcagactcctcccggggccagtgcaccatctgaatccttgggcacgtggaggcagctttgtctttggctgggtgcaccccagcctggcccagatgcaggaccctccaccaagctgtctgggggcgtgggagcaggagggctgcaggagctgggtctccacacgctgacgagggataggactgagcagatgtcggctcacacaggcactgggaactgcacatcaacagcgggcaagcagcgtggaaagtgctagcgtggggtctggggctgaaagccagctcctcctccacgtgcatgggctgtttacacctcccaaactcctctgcaccgccatgccctgcttttggtcccttctgggtgctaagtgccccaccctgagggccgaggggcagacactcgggcccggcccacactctggtgctgccagggcagcacctgagacctcctagcctccacgtggacagaggttctcctccccaagcagaggcactaggaaagggccaccaggtccagctgggcactgcctgcccctggagctgtacctgagatccaagctgccatctgtatataacaaggccagaaaacaagggaaggcaccttctcccttccctgaacacaaggaagtcaccagtcaccaccacccggcagcctcacacgctgcccacacctgctgcccagggcggggaggtgaggctggagggactggcagcctgtgtctgctggggcagggacacaccagggagcctgctgctcttaaggactggccagggggacggcccgaggggcacaaagtgagatcagacccacctggacggcctgcatccagcactgtccagctcaaggggctcagtggggagagggatgggtgcccacccctgaggagaggaccaggcccccacagggcagagggctcaccatccagagccctgcgcccacccgggacacggggtaacactgccacccgcacaccagtctccagtgggatgagggctgtgacaccaacatgtgtcaccaatgggatgagggcgggtcccgctccgtcactgggaagatgctgtggtcagggctgtagccaggtccgaccacagggccggccactgtgtggacgtggagctgcctccagaccacctgaaaacaaggctggcgggagcagagatggctcgagcccttgggctgccccagccacccctacctaggatcgctctcaggggcaggcgcagcatccgcccgggcatccctggtggtcccggccctcctcggcttctgcttggccttcctcagcatgtgcacctgtcccagggcaggggacagaggaccagggtgacatggccgatgaaagaacggtacacgggcagcccccggtcctggggccccgggcagctgatgccatctcagccccatttcacggaaggggagggacctgtctggctgctccctgtgccacctgtggcccgcctggccactggcacagccctcctctgaagcaggcaccctcccggagtcagtgctccctggccgcagccggccatgccagcaccacctgggtaccactggccactcccatggccggcccagcccggcccacctcccctggctctccagcctcaccccacataccttagggccagcagctgagatgatcatgtgccccggggcctggacccagggctccccgtccacctgcaccggggtggccttgaggagcgtgactcggaagtaggaaccctgggcaatccggattccggagcgcagcccaccctggacctggccctggggcgggagaggccagccgggctcagcggggatcagggacgcccaccgctgacctggccctggggcgggagaggccagccgagcagggaccagggacgcccaccctggacctggccctggggcgggagaggccagccgggctcagcggggaccggggacgcccaccctggacctggccctggggcgggagaggccagctgggctcagcggggaccggggacgcccaccctgggctcgcccgcccactcggccggcggctcaccatgtgcacgacgcccgtcacgcccacaacctccagcagcccgtcgtccatgcgtggcttctcaaacctggtgtcgctgtcggagccccacaggtcggcccccgagccccagctgccgcataagagagcgggcacagaggtgtaggtgcaggcaggacgagggctgagcctgcccatggccccgccgggcagagcctctggggagccccgcccgcgagcacctggggatgttgatgaagatgaggccttcaatactgggcagctccacctcctgccgctccacctgcagccggatctgcttgtgcaggctccgagagtgactgatcttctgcagccccacccgcacgtacacacccttgttgtgcagcctgcaggacggggcaggtcacccatcaccaggggaagccctaccccgccttaggcagcctccgggttccggcccctctgcctgttcctgctgggggacctgagggaggtatgccgttgacaggtggtagcccctgcggctccggtacctgcttgtgaacttgccaggctcctcttcccgtgcctggtggaagtccaggctcagctccgcrtcgatgccaatgccacagtagttactcatctgcacgatctggggacagggcgttcatctcccaggacccggccgccctcaccaggccccctgagctccccaacagctctgccggcaggcagagacaagagcaaggaccaccctggcaccaagccgagcacccaggagagggcagcatgggcaggtcctggccaggctctgtcgccagctggctcrgcacaatccccagcagtggctactttctgtgtctccctcaactgcccgctttgcagaggggatgatgcgggcgcgtacacccgagtgtggctgggaagaggacgcccgttgtgacgcgtgtagcggggtcatatgcaggagcctggaaggcaccccacgccgggctgccctgtaccttggggggctctgcgtctgccgtrtcgttctctgcactgccagcctcgtgggcatccagcaggatggtccagcggtccatgagcacggcgtcggcctcgtccacagacagcagtacggagaacgggtcctcgccgctgtagcccgccccccagcggaggactcgaccaaggtcattccctgggacacaagcagacacagagcatctgtccacacccacccgcccatcagctgggtgcagaccccaccacgaggacagccagcccaggcctcggcaaaagctgcacaggaaggggtagaccctgaggccccctcctcggctgcacggctgagcccacctgtgcccaggggcaggatggccacagaaggctccgggcaggccagtcggtaccgtgtctcctccagggcgccaagcacccagcccacagtgccatcgccaccacacaccagcacccggaagcagggcacctgggagaacaggtggagcctagcgggagacaggaagtgtcctctaccagctgcgggcgcagcccatcccccacccaggctgcctcttccaagtgcccgtcctggccgtgtggaggacttcaaggtcccagcacgggatccccgtggagctcctgccggccgagacagctgtggcagcctcctggggcccttcccgcccctgctgctgccctggaccaggggtcctgctggactcacccgggaagaggacctccgttggtcaggtcgaagacctgatgagggttcagtagcttccggaagctgcagagcaggtctcggcccttgaggcctccactcttggggttcacgaacacaaggaggggacagctgtctgggggcagcttcgcgtgctgacagacagggggctgggttaggatggggacccaaggtggggtgtccccactgctggggttgccaggcagtgcccagcccccaaccctgagcccacctggcttggaccagccccctccccaggaaggcgtggccagcaccctcacatctgaggcctcacacatgagctgcgtggtcaccccatctcgctgctggccagcagggcggcactgaggacagccggctggctgcctggcactcccagcacaaaggcctcagacctgcccactgagctgcgtgtgaacagaccacacccgcctgggccatgcagcgcgagtccaggctggaaatccacgtgggactctgcgtggcactctgtgccagcgagaccaaggcctgtcccctggggggcctctggtgcacacctttggaggatggcggctcccaggccaccgcccacctacacagcagccgagaaaagctcttaactcacagggtggcacgcggcgtccctcgaccacaggacagagtccatctccccacacacaaccccaagaaacagtacccagggatctagacacagcgggctcagggctgggatccctacgacaggaggctagggaccctacgacaggaggctggggcccccacagcggggaaggctgggcaacaggagacacacaggctgggtgcagacacagggtgggcagcggcacaggggccggccgtggctgggggcaaggacacactcggggcttcgtgacccacttggcaggcagagccgcctgcggtcaccacttaccactcaccccagggcaggcagctgacgggagagagaaagcgcgtgtcggccccaaacctggctctgcccacagagcgagtggagctggggtgggggctgcatcctcgggacagtggggatggccaccctgtcctgagccaggcaaggccgggtgtaggggcacaggagggaggcatagcagggagccacaggcatctcccgtcccagccacagacaactcattctgctcgagttctgcttcgcctggactggggtcacgatcaagggtcaaggttcaggggtagaacagccatggacacctggggggtcctcatgggaccctttgggggctagatgggctgaggacgagaggccaatgtgaaggcacggtgtgcagcgtggagtcccaggctccagcccctccatgggccagaaccccgttccccccggccctgccctgtctccacggaccagacccccgttccccccggccctgccctgtctccatgttccagatccccctttcccccagccctgccctgttgccaggtgccccctcttctgggcactgtgggtctgaagggcagcgttcaaagtttgggagctgcactgactggcctggggagctccaggcagagagcagaggccctaaggcctcccgggcagggggagtgaggctgaggctgtaccgggagggccatgcctgggatcctgacagctggtcacaaacacgctctggcccttggcgaggcagccgcagcggggcccggcacatccaggagctgcgtcctgtgggcctccctactgggtggaggcctcaggtgcagcgtggaagctgggcctgaccccacggtgccccacggagctggtatcacctactgggcagcctcggatgagcgctgaccctctgacctcaggccccttgctgtaaaacgggcaacagagtccttcctgctgttgtgaggcacaaacaaggtggcacctacaagcccccagtgaattcaaggaagtgatgccagatgaaaacagcgagtctggctgtggggcctgtgcacctgcagaccccgacctccctctggccaccccctggggtgtgtgaagagccggcttgaccgcacactcaccagcaggtcggggagcaccagggcagtgagcagccggccccgcacagccatgtccttcagcagcatgtacagccgctcggcctccgcaaagcaggcaacgtccaacactaccgcgcctgcggcaggagcccaggactcagggggagcctgtcccatggcccccacggtgccagggcaggaaccaaaccaggacgtttccccagcccagggctgcccaagggaaaggtcaggtgctacgtgagggccagggctgtcccacttcaccccaggaacacccctgggcctcatgtgaccacgtccctcagggcagctcaccttgggaggagtagatgtgactcacggacaccacggtggctgca

SEQ ID NO: 95631 - DNA, 24463 bp, Homo sapiens
  misc_feature (1)...(24463): n = A,T,C or G
ccgggagacagaggttgcagtgagctgagattgcaccactgcactccagcctgggtgacagagtgagacttggtctcaaaaaaaaaaaaaagtgacttgacctgccttgcctgttagaataacctagaaatgagctatatcctcaayagcaggaacacagtttgcctggtgattcctcctgctagaaatccatctggtaccaatagtcccttttatatgtctacctctgccattcttttcctttaggacaatagttctcggtggatggcctagaaactcctggggtcttcaaagacaaaattactgtagtaatactgagatatttacctttttaacagctagcatttgtactgatgatgcaaaagcaatggtgggtaaaagtgctggcaactaagcaggaatgaagaccatggcaccaaattgtagtagtagccattgcattcctcaatgccatgcacttgcaatttttaaaaatgccactttctattaagaacgtccttgatgaagctgggtgtggtggctcacacctgtaatcccagcactttgggaggccaacacgggtggatcacctgaggtcacgagttcgagaccagcctgaccaacatagagaaaccccttctctactaaaaacacaaaaattagctgggcatggtgggtgcgtgcctgtaatcccagctactcaggaggctgaggcaggagaatcgcttgaaccagggagtcrggttgcagtgagccaagatcgtgccactgcactctagtggggcgacatagtgagactcggtctcaaaaaaaaaaaaaaaaaatgagtatccctgatgaagcagtacaaattattaattgtattaaatcttgaccctacagtacatgtctttttaatattttgtgtgaagaaatgggaaatatgcatatagcacttctgcatataatagttgtctcatggtttgtcaagaaaaagcacttgtgcaattaaactaacctttggcctggtgcagtggctcacgcccataatccaaacattttgggaggccagggcaggaggattgcttgagatcaggagttcgagaccaacctgggcaacatggagaaaccagatctgtacaaaaaattagctaggggtggacacctcacccggctacttttttgtatttttttgtagagatggggtttcaccatgtcatccaggctggtctcaaactcctgacctcaagcgatcctcccaccttggcctcccaaagttttgggattatgggcgtgagccactgtgcccagcccctctgcctatttttatttgggttgtctttttcattgttgagttgcaggagttctttacatattctggatactagaccctcatcagatatggttttaaaatactttctctcattcttttcactttcaagtatccctttgatgcacacacccaaaaaagcaaatagtgtccaattgcattctttgatgaagaagaatacaagcagtaagtcaattacagcctatttttttcttttctttctttctctttctctctctctctttctttctttgagacagggtcttgctctgttgcccaggctggagtgcagtggcacagtgacagctcactgcagcctcaacctcctgggctcaagcggtcctcccacctcagcctcctaagtagctgggactccaggcgtgtgccactgcgcctggctaatttttgtattttttgtaattttttgtagagatggggtttcaccatgttgcacaggctggtctcgaattcctgagctcaaataatcctccctcctcagcctcccaaagtgctgggattacaggcatgagccactgtgcccagtctatggttgtttttaagttaacagactagtgccgggcgaggtgagctcagcgcctgtaaatcctatcacnnnnnnnnnnnnnnnnnnnnnnnnnnnnnnnnnnnnnnnnnnnnnnnnnnnnnnnnnnnnnnnnnnnnnnnnnnnnnnnnnnnnnnnnnnnnnnnnnnnnnnnnnnnnnnnnnnnnnnnnnnnnnnnnnnnnnnnnnnnnnnnnnnnnnnnnnnnnnnnnnnnnnnnnnnnnnnnnnatggtggtgcgcgcctgtagtcccagctactcaggaggctgaagcagaattacttgaacatgggaagcggaggttgcagtgagccacgattgtgccactgcactccagcctggcgacacagcgagactccatctcaaaataaataaataaattaattaattaattaacagactattctggggggacaattttagccttacagaaaaactgagcagaaagtacagagaattccaggctgggagtaatggctcaagcctttaatcccagcactgtcggaggccaaggagggaggatcacttgagctcaggagtttgagaccaggctgggcaagatggtgaaaccccgtctctacaaaaaataaaaaaaattagccaggcacagtggtgcacgcctgtagtccagctacttgggaggctgaggttgaaggatcacttgagcccagaaggacaaggctgcagtgagtcaagattgtgacactgcccctccagcctaggcgacagagggagactctgtctcaaaaaaaagaaaagaaaaaaaaaaaaagaagaagaagaaagtaccgagagttcccatatcccccttcaggctccccatttttcctattattaactttttgcattagtgtggtacatttgttacaactgatgagccagtattggtatattattaacatagcccagccgggcgcggtggctcatgcctgtaatctcagcactttgggaggccgaggcgggtggatcgcctgaggtcaggagttcaagaccagcctggtcaacatagtgaaaacccatctctactaaaaatacaaaaaattagctgggcgtggaagcgggtgcctgtaatcccagctactcaggaggctgaggcaggagaatcgcttgaaactgggaggcagaggttgcagtgagccgagatcgcatcattgcactccagcctgggcaacaagggggaaactccgtctcaaaaaacaaacaaacaaaaaaacatagtccatattgatacattataattaactaagtccataagttacattaggctttactcttttccacacacaagtatgacatgtatccaccatgacactattacatcatacaaaatagtttcacttctgtaaaactcccctgtgctccacctaccatcccttcctccccccaactccacttccctggcagtcactgatctttttattatctccatagtttagccttttcagaatatcatacagttggggccaaacgcactgcctcatgcctgtaatcccagcactttggaaggctgagcaggaggattgcttgagaccagaagtttaagaccatcttgggcaacatagcaagaccttgactcaaaaaaatacatatatatatgtcatatggatggaatcatagtttgtagtctttccacattgatttctttcgcttagcaatatgaatttaaggttcctccatgttttctaatggcttgatagctttttttttttttccttgagatggatcccattatgttgccccggctagtcttaaactcctgaactaaagtgattgtcttgcttcagcctccagaaaagctgggaatagctgagactacagaaacatgccattttttttcctttgtagtagaagttagaaagcttttttttttttttgagatggagtcttgctctttcaccctggctggagtacagtggcgcaatctgggatcactgcaacctctgcctcccgggttcaaccgattctcctgcctcagcctccccagtaggtgggattacaggcacgtgccaccacacccggctaatttttgtatttttagtaaagacggggtttcaccgtattggtcaagctggtctcgaactcctgactttgtgatccacctgcctcagcctcccaaagtgctgggattacaggtgtgagccaccgtgcccggccttttttttttttttttttttttgagacagagtcttactctgtcacccaggctggagtgcagtggttcgatcttggatcactgcaacctccacctcccgggtacaagtgattctcctgtctcagccttctgagtagctgggattatagacgcctgccaccacacccggctcattttttttgtatttttagtagagacggggttttaccatgttggcgaggctgatttcaaattgctgaccttaagtgatccaaccgcctcggcctcccaaagtgctggaattacaggcgtgagccaccgcgcctggcctcaaaaaaaaaaattttttttttcaggacggcgtcttgctctgtcgcccaggctggagggcagtggtgcgatctcggctcactgcaagctctacctcctgggttcacgccattctcctgcctcagcctctcgagtagctgggactgcaggcgcctgccaccacgcccggataattttttgtatttttagtagagacggggtttcaccgtgttagccaggatggtctcgatctcctgacctcgtgatccactcgcctcgtcctcccaaagtgctgggattacaggcgtgagccaccgcgcccggccaaaaaaatttctaatacggcaaatattgaaagatataatccacataaacaaagcttttagggtcttctataatttctaacactgtaaatggttcccaagacccaactgtttgagaaccgcttctctgggatgccttcttcttttcctgctggctaatcccagtggagagatttaggtatttaattctgctccagactcacctctgagaaccttccctgatgggccacactctactcactgcccttgctctgtatcccctcttcagttatgttgttcctgtttccctggctgcttttaattttctttctttcttttcttcccgccttttcttttctttctctttctttttcgttttttgttttttgagacggagtctcactctgtcgcccaggctggagtgcagtagcgcgatcttggctcactgcaacctccgcctcctaggttcaagcgattctcctgcctcagcctcccgagtagctgggattacaggcgcacgccaccatgcccggattatttttgtatttttagtacagacggggtttcaccatgttggccaggctggtctttaactcctgacttcaagtgatccgcccgccttggcctctcaaagtgctgggattacaggcttgctgccgcacccggcttgtttttttttttttttttttttgagacggggtctcactgtgtcccccaggctggagtgcagtggtgcgatcacagctccctgcagcctcgaactactgggctcaagcgaacctcccacctcagcctcccgagtagctgaaaccacaggagcgcgccacgacacacagctaactttttttttagtgttttttctttttttgttgttgccttttttttttttctttatcgatcctcccgcattggccttccaaactgttgggattacaagcgagagcagtgcccggcccctactgctttgaaacctcggttctttgcaggtcctggaaaagaaagtgaaggggtcgtgcaatggctcaaaacccaggcaacatttccaggcgcgtcctcaactcggcgtcactctgacaaaaagtttgccctttgcgcccgatccctcacaccagagagcaccgcagggacgcagggacggagaggactaatggggtcggggaggacccaaggaagttggggaactcagactcttttcagtgtttaaaaagcagaggccccctcggaaggcataacaggcgagwctaacaatgcccctggagatcaacggcactaaggggtacctttgccccgctccaaggctccttgttccgccccctgccgccaagcaaggaatccggcgccgccggtcgtgggtagtatttacgacagtgctggcgctttgcggccggccgcacagccgctgacgcgtcgggaggcggagcctagggaagcaaattctcctggcggcctccgttcagacgcggcagctgtgacccacctgcctcctccgcagagcaatggcggtgtctgccgggtccgcgcggacctcgcccagctcaggtaggcttaggaccccgccctccggcggagagttcctaggagcgctggtctcagaggggcgggggcgggaggacgcccagtgtctcccggtgaggcggggggggggtcctctgtggggaagggggcgtgctgtgagacatttgcagcctgcggcttctgaatgatgatgacattcgggaacactgcggttaggggactgtagtctgaggggttctgggacattaggggatcgtggagakggggctgcactgcagggatgtttcctatagtcagatcattgaggcaacctcattgagccgacccgggtgggcggaagctctgagctgttggtgcwgtgatttctttgatttgaggtggagcccacccccrcacacatattttctccatttattgattgcagataaagtacagaaagacaaggctgaactgatctcagggcccaggcaggacagccgaatagggaaactcttgggttttgagtggacagatttgtccagttggcggaggctggtgacmctgctgaatcgaccaacggaccctgcaagcttagctgtctttcgttttctttttggtgagtccagtttatgggtgggagcaatttggttgagagtggagaatgacaatctctattttttggttgcaagtagacttagctcccttttcctcagagctgaagacattggtataaaagaagaggtctttgcgaagtttaggattaaacctgctttgtctcctacagttaggatttacttggtggccagaaatgcttttttttttttccttagacggactttcgctcttgttgcccaagctggagtgcaatggcgctatctcggctcactgtaacctccgccacccgggttaaagcgattctcctccctcagtctcccgagtagctgggattacaggcgcccaccaccacacccggctaattttttattttttttgtatgtgtgtttttagtagagacggggtttcaccatgttggccaggctggtctcaaactcctgacctcaggtgatccgcctgcctcggcctcccaaagtgctgggattacaggtgtgagccaccgtacccagctagaaatgctatatgatatgtagaggcgaggcagcagtgacccattttgcttgtggcatgaagttgcccagaagactcagagaaacagagcagggggccacagggaccataccttttggctgtgactccctaatcaagagcttcttaactgaggccgcagcatggtgtgcttggaatggtttacagatgtgcagagatattagtccccttagcccagtagttctcaactggagggagttttgctccctgggagacatttggcaatgtttagagacatttttagttgtcacaacttgggggaggaagaataggtggctgctggcatctctatagaggtcagggagtgctcctaaatgtcctgtagtgcattggataatcccctcaataaataattaaccagcccaaaatgtgactagtcctgaagttgagaaaccctgctttatctcaagctggcttcctgatctgagtagcctcttctgtttattcccagggtgttgacgaaatgcaactgtttttggagtgtgccaggaagcagaaaaggttgagaagcactcccagagcactttctttctttctttctttctttttttgagacggagtttcgatcttgttgcccaggctggagtgcaatggtgtgatctcggctcactgcaacctccgcctcccaggttcaagtgattctcctgcttcagcttcccgagtagctgggattacaggcatgcgccaccacacctggctaatttttttgtattttaagtagagacggggtttttccatgttggtcaggctggtttcgaactcccaacctcaggtgatctgcccacctcagcctcctaaagtgctgggattacaggcgtgagccaccgtgcctgscctcccagagcactttctgaagctcaataggatggatctttatagctgtcaagaccctaacagtttttatagcattttgtgcatttctgtaatttaatcctctctgtagtcctgtgatgtattccccttctcacaaatggggaattggttaaccgagctgcaggggctgttctagatggcacaacagatgtagtactgtgcagagtaggcactcaataattaatactgaataaatggcagagccaagattagaaaagaagtctgaccctggagctgcacactgtcaactgtgttccactgtattctactgcttccttagctgaggcccaatgaccaactcccctattgccttcttagggttcttgatggtgctagacattccccaggagcgggggctcagctctctggaccggaaataccttgatgggctggatgtgtgccgcttccccttgctggatgccctacgcccactgccacttgaytggatgtatcttgtctacaccatcatgtttctgggtgaggggaactgtgggaaatattgactggcctgccagaaacacagaaatagaagcatgctggtgaatggtcaaagtctttggcaccttatttcacttctgctgtgatcaatttcatgctgttgacctgtgtgtcacttaagctgtgatcccataattctttttaaaatattaaaataacatttaattttcatttagttttatgtgattatacaatgcttgatttttcttaattccaaccatatcctggtccagggaaactgggcctgtggtgatctcttgacctcttaatcctctccctacaaatcccaggggcactgggcatgatgctgggcctgtgctaccggataagctgtgtgttattcctgctgccatactggtatgtgtttctcctggacaagacatcatggaacaaccactcctatctgtatgggttgttggcctttcagctaacattcatggatgcaaaccactactggtatgagtcaggggggacaaaggggaggggttggctgggtcaggatggttatcagagataggggcccagtgaggttctggaatttttcagtcatgtttgcaaagtatggttacaaggtcactttgatctaggtggatttgggaggggaaagggccaactagttggagcgcttgggatgacacaaagcaaaatggctccatcccaccccttcagtctttccctatctccccaggtgccttgatttattcacctcttgtaaccctcttagagagaaaaacagaatactaaagccagacatggctgttttcagatactttaagggtggttatgtagaagagggagcagactttctctgtgtgagtccagaagggcagagttagagccaaaagtagaagttgctgtgaggcagagatcatgtcaggagaagagggcccaccagggctgctcagcattgctgttctcggaggaggtaacccttccccatttctggcttaggtgactgtctctaaggggaggtggagaagggatttggagataaggtggtggggcagttgaccttaaggattctttatatgttgagtgaaaagtaataaaataggtgtcaataacatgagtatggggaaaaaaactcaaacattgaattcattaacagtcattaagttttatttatttttctttttatttatttatttttaaatagagatggggtctcgctttgttgcccaggctggtcttgaacttctgggctcaagcagtcctcccacctcggcctcccaaagtgctgggattacaggcatgagccactgtgtccggcctatttgttaatacacacatacaaaacccctttggtaaaacttgaaactcattcagaatggccagctctgatcatagagaattaagaggcagttttgatagaatatctctgaaaagttccgttgtggggatatttgttgagatggcatctcactgtgtcgcccaggctagagtgcagtggcgtgatcatagctcactgcagcctcaaccttcttgtgtttaggtgatccttccatctcagcctcctgagtagctggaacaacaggtgtgtgccaccacactcagctaatttttaaaattttttgtagagatgggatctcactatgttgctcaggctagtcagaagttccatttttatgactttatgcattttgaaaaaatcacttatcatttattcagggttttccacatcgcaggcactatactaaatatttagagtttttcctcattaaaaccctgtaaggtcgatggtgctgttcacattttatgttttttggagtcagggtcttgctctgtcactgaggccagaatgcagtggtgcagtcatagctcactgcaacctcaaactcctgggctccagagattctctcgctttagcttcccaaaatgttggtattataggtatgaactactgagcctggcctgttcacattttaaagataaagaagctaagtattattgacgagtgaagaatttgcctaaggtcagctagcagttaagaaacagaagtgagtccaggtgttcatgactgcagagtccagtgctcttgaccacagtgtaagctgcccctttcccagcttctacttcttgraaacttgctttgcttctgcttccccagagtacatctggtgttagtagcctgggtctaatcagttctcttccagaatacaagctgttagcaggaaccctcttatactggatcctggcacccaggtctatgaaatgttagtttatgttgtgtgttactctgctgttgagggttttsatttttttttaaagataatacaccgcatatttatttacacatacatagcttttcaaacactccatcaaattcctcccctttttcagtaattttctagtattgtagtccttttttcctgatttgatccattagaacaaactcaactgggagctaacaagaaatactgaactttttgctgttataacttagtagcaatatttcttctatgacttgtataatcatgttagaatttgctcatataattctaaaaggtctcagaataaccagggaggatatgggagatgtgcccaggatagataggattatcgtgtatraaaggaaggatggagatgtagctgcattaagcagctcccccctcaatgtttacctccctcggtgtaggtctgtggacggtctgctgaatgcccataggaggaatgcccacgtgcccctttggaactatgcagtgctccgtggccaggtacagcattttaggacagagggaggagctccttgacagccatgtggtcagcatggccatcccactgccagactacactctccgctgcctccctggatcktctgtttttagtttttaccctttgctggaaagctaggctggcttctcattttttccaatcccttaatctctgaattatcttatttgtcaaggaaagactagagctttgtccctgctagattggaatcctcatgacaaagagaaaggattcagtctgtgctttatgacttcttccttggtgcctgatactgtcgctgacattggttggatgtcaataaatgctgtttggatgaggcgaatttctgagatgaatgaatagaagatggggtctattcttccttgggccctggactcagatcaktatttattttattcatttaaaaaatatatataagtagattatttgggtcaaggactgtaatatttgggtcaaggactgtaactcaggagcatggattcaagttgtcctaactatatgctccttattttattcttgcctatctgtagaaaagattctttttgcttgaactttgtgtcacattttattttcagatcttcattgtgtacttcattgcgggtgtgaaaaagctggatgcagactgggttgaaggctattccatggaatatttgtcccggcactggctcttcagtcccttcaagtgagtggcagtcatggtgkaggcctctttgaggcatgggtacagagcaggtgactcatctctctcagtaatggcacctgttcctactttgcctgaatttgccacatgccttcctttgtccactcatttccctattcagcagaagcagagtcagtggtatcaaaagattgagccctagctgctcttgggagatatatggtatagataggcaagaaaggaaaagaaatttaaaaaggaaaggaaagagccggaactggctgacttggtgagtgagccagtgccctcagcagctgccttggatggtgcctgtgtccttgccttgccactctagcctcccatcagagccctgcagctgatgtactgagaagatgggcactcactgttcaggctctgacaaaaccattattatcacttccacaaaacaaagggtcacctttctgatttgtcttcttcccatttcttctttcctcttgttttactttattctctttcttcttccctgttattttccagttcctgaagtttgacttcattatgatgttagccaagcattcaccttttaaagtgtcctctcactcatgacytccgtggggaacgtcccttccacaacacacacacatctcagtcaaattttgtcctaggagatctgcccttgcttattacataggatatgttagaaaacattgaacacctaaagtgtgtgaaaatgtagagggggctgggcatggtggctcatgcctgtaatcccggcactttgggatgctggggtgggaggattgcttgagcccaggagttcaagaccagcctgagcaatataagacactgtctctacaaaaaaattttttaaaaaaacagctaggcgtggtggcacgtgcctgtggttccagctacttcggaggctgagacaggaggattgcttgagcccaggagtttgaggctacagtgcaccatgatcatgccattgccttccagcctaggcgacagagtgaaacttcgtttcaacaacaacaacaacaacaacaacaacaaacaacctagaggagtgtcttcatgggtggattatgtaccttaggcatctacccagccactggagtagccaaggcacattcgtgctgtgaatgtgctttgatgtgttctccagtgggctggtgcttgaactttctccatgtgtttgcagactgctgttgtctgaggagctgactagcctgctggtcgtgcactggggtgggctgctgcttgacctctcagctggtttcctgctcttttttgatgtctcaagatccattggmctgttctttgtgtcctacttccactgcatgaattcccagcttttcagcattggtcagtacctgtagcctgggaggaaacaggaaccacagttttgcaggaagggactagccagaggcattgtttgggagtgggagagggtggtgtgagcaggagctaaattgaacccagggcagtcactatgaagtaggcataaatggggataagaggactggggcttctgggctcagttagtatgttgtacagtagggaatctccaggaagaacaaatatcttacagttaagaactactttgtggccgggcttggtggctcaggtttgtaatcctagcactttgggaggccgaggtgggtggatcacctgaggtcaggagttcgagaccggcctgaccaacatggtgaaaccccgtctctactaaaaatacaaaaacttagctgagcatggtggcgcatgcctgtaattccagctacttgggaggctgaggcaagagaatcgcttgaacccaggaggcagaggttgcagtgagctgagatcacgccactgcactccagcctgggcgacagagaaagactgtctcaaaaaaaaaagaagaactactttccttttcagtggaacacctgggagaagtctcctaagggaacggggttgaagaggcccagccaaactcctgaaatatgtattttctccctgctttcctaggtatgttctcctacgtcatgctggccagcagccctctcttctgctcccctgagtggcctcggaagctggtgtcctactgcccccraaggttgcaacaactgttgcccctcaaggcagcccctcagcccagtgtttcctgtgtgtataagaggagccggggcaaaagtggccagaagccagggctgcgccatcagctgggagctgccttcaccctgctctacctcctggagcagctattcctgccctattctcattttctcacccaggtttgtaggggctgtggagtgtacagcaaaggctggacttagaaaggaayggatgacaatagttgggaaagaatggggctggttttgcagccccttcttggtaggggatggggtcagtgtgagaagcattgagctgattcccctctgtgctgccttcccagggctataacaactggacaaatgggctgtatggctattcctgggacatgatggtgcactcccgytcccaccagcacgtgaagatcacytaccgtgatggccgcactggcgaactgggctaccttaaccctggggtgagatgtctgatgctgacaatttactgttcttcagagcccccttgtgctttggggtctggttttgtcttacacacaccataaagcaaaacaaatktgagtctgctttgccttttctcaagagccagattgaactatcttttatgtgggttgagatagggcaatgcattcatttccttgaactgagattagattcaggaaaagtaagcaccactagcccaacaatgaaaaattcattcccaaaggcaagttccatttttttctagccagaatgggcagcaggcagggatctcgttgtgccattggcagtgcatgacatgtcttggaagttgayaatgatgaggtgggactaatatgggggtttggggcaggtatttacacagagtcggcgatggaaggatcatgcagacatgctgaagcaatatgccacttgcctgagccgcctgcttcccaagtataatgtcactgagccccagatctactttgatatttgggtctccatcaatgaccgcttccagcagaggtgggcaaggggagcagagagtgggaaaaaatgaagcacagttctttttaccaagatgaacagcccttgcttcctggtattgtcttgcttaaaaagctgtccttcctctagtgcatgtcccccttgatctggttgtgggcatagctggttgcttccagcagggggcaccatcatccaggagaaaagtgagttgacttgttcttttagacactgttgacataataccttctcaggtagctactaacccccattatacccagtgctccagatctcttctgccttctttctctgccctggactggcaataacatgctgacacaggccatttcttcttctattccctgtccttaggaatgatgatgaaagggagagaactggaagttctggtgggtgggtggctgtgatgtccttagaacatggttttctttcctaaggatttttgaccctcgtgtggacatcgtgcaggccgcttggtcaccctttcagcgcacatcctsggtgcaaccactcttgatggacctgtctccctggagggccaagttacaggaaatcaagagcagcctagacaaccacactgaggtggtcttcattgcagatttccctggtatggaggaaagtgaggagaggcttttctgtctttccttctggcttccttggccagggacattccatgtggtgggaggggagagggaatgtttttgaaacctaaggggatgatggtggtaaaggtgtgatgtctctgttctggctgggagtgagttcactctgccatggggtgggatgatgaactctgttggtctggcaggactgcacttggagaattttgtgagtgaagacctgggcaacactagcatccagctgctgcagggggaagtgactgtggagcttgtggcagaacagaagaaccagactcttcgagagggagaaaaaatgcaggtattttgctgggattaacaacagcagaaagaactgagtgcagtagctcacaccagtaatcccagcttcttaggaggctgaggtgggaagccaggaattcacagtgagcctgagcaacagagtgagaccccatctctaacaatttaaaaaacaatggcagaaagcttagatgagcaagattcacttattatagactgaaaatrttttaccatagcagtaatgcagtggagctcaaaaaacaagggcccctgggactgtgaagagcctcatccaggattctagaggtccgttactttcgattccaaaacacaattgagtagaaagaagccaagagtcatasagtagggaggccataagctggctagagaaaagctgatgaaatttatccatttcttctcccttgtcagttgcctgctggtgagtaccataaggtgtatacgacatcacctagcccttcttgctacatgtacgtctatgtcaacactacagagcttgcactggagcaagacctggcatatctgcaagaattaaaggaaaaggtggagaatggaagtggtgagtgtatgaacatttgggctgagatagcctctggtttcaagaagtcagggttatgaatgatgttctagccattcaagaatgaacttgaagtctctagctggcagaagaggagttctaaggggagagagtgatccatctcagtgattcctcttttttctgtcttccgggcagaaacagggcctctacccmcagagctgcagcctctgttggaaggggaagtaaaagggggccctgagccaacacctctggttcagacctttcttagacgccaacaaaggctccaggagattgaacgccggcgaaatactcctttccatgagcgattcttccgcttcttgttgcgaaagctctatgtctttcgccgcaggtaagttcacaacaatatttgtcattgccatcatatgttggcaascttggtaactttcccctggrgagagtaactctagagactgtcatacaggaaaggacagttkagctctaggtatcttttcctgccattcttcttgatttactggaagaataagtggcctatatctgatggcctgctttcttgttctgcctcagcttatctccagcctctctgtgggctgttcctaccctatcctggaatcctctaccagactgtataaagagtggtgtacccttccagctgggagatggagggtcacttggggggagattcccatatatgcctgtgtgggaggagtgaggaccaggtgccttctaagggctttagctgaaattcttctggtgaaacaggagtttgaacttggtyggctttttcctgtttttcagcttcctgatgacttgtatctcacttcgaaatctgatattaggccgtccttccctggagcagctggcccaggaggtgacttatgcaaacttgagaccctttgaggcagttggagaactgaatccctcaaacacggattcttcacattctaatcctcctgagtcaaatcctgatcctgtccactcagagttctgaagggggccagatgttgggtgcagatgtagaagcagccagtcacagacccattctatgcaatggacatttatttgaaaaaaattctcaaaagttttttttttttttttgggggggcggggttctaaagctgtttttaactccgagattacaacttagaggaaccaaggaaataaagcaaataagatttaacaacccaagattaagaggccaggaagaggttagacgcaatgtgaaactgtcctcctaggataaggtttaaagtggctttttgggggctgggtgccgtggctcacgcctgtaatcccagcattttgggaggctgaggtgggcagatcacttgaggccaggagttcgagaccagcctggccaacatggcaaaaccccttctctactaaaaatacaaaaattagccagacgtggtggtgggtgcctgtaatccaactacccaggaggctgaggcatgagaatcgcttgggcccaggaggtggaggttgcagtgagccgagatcgagccactgcactcctgggcaacagagcaagacttcgtctcaaaawaaataaataaagtggctcttggggaaaagcaatttaatgtaccacgatgaatagctaactgttcccaagtgtttgctatgtgcaacacaccgcgtgagcagtgttacctgcattattacattaggctgagaggtaaaataatttgcccgaagacatacagctagtgacgaatggactgatggtttgaacttaacgtctatttgacttaaggtcctgcaccctgccacttgtaattttcagaatcactgataatctgaaataatgcagcttaaaacatgttttcttaattaaaagtataattggatggtggtcaggttgtaaatgcacacaaagtaatttatcttcattgcaattttggttccttctttgttcctattatctatatacacccagtgtttcactagcagttatgagagcagtcagaatagcagcatcaaagttaaataaggaaatctagatgattgctagattttctctaaaaataagcttagtatttggtattattctagcctttggtgagcagaaggggaggtaaagtaagaattaactaaatttagtaagggattagggaatgcttagacattttgtaggttggggtatacaagggtaactcaggaagctcctcagttcagtgaaaattcaaagggttggcactgagctaggaagcgagaatgcagggttatgaaaaaggatccctgctttgggagctcatggacttgtagcagagaccggtagtaaattggcagtctcagtaacttctgtaaatgattgcatctctttgcaggcttctcttcccatactctcccccactcctccttggacagtgttccgggggttctttcctaagcaactgctttttcagtatacatacttcagatgattgtgtctactccaggatttccaacgatgctaggtttctttcctgtgccctagacgtataggtctaagttccacctggatatcccacagggctatcaagctcagttcatcctaaacagaacttacattcatccccaactcagacttccttattctttattattgaatggcagctctgtaccttagccaagctgttatctctaggtcatcagccttgactcttcctttttccttgcatttcttaaaattgccaagtcccatcaattttacctcctggatacctcttgaatctatttttttttaaagacagggtttcactctatcacccaggctggagttcagtggcacaatcttggcttactgcagccaccacctcctgggtttaaacgattcttccacttcagcctcccatgtagctgggactacaggtgcccaccaccacgcccaactaatttttgtatttttagtagagacatggtttcccacattggccaggctggtctcaaactcatgaccttaagtatccacctgccttggcctcccaaagggctgggattacaggtgtgagccaccgtgcccagccaaatctgttttcattactacctatatctgtattttcaacctttgtattagcatctagttagggatagaccaggacagggccgacatgttagttgtcaagcagattgccaccctcccccaccactgaggaggccaaatggagtttggtggaaaatctctaattcattcaaggtattatatgggcaagcaatggctgtggcacagggtcccctgattactttgtaagaatgggtgggagggatgctgattttcaatccttttgcagatcttctctcatagtaacacaatagaagatactttgccactatgttgtttgccaaactcactgtacctacttgactggtaacaaaagtcccaagagttacttgggagaagacacttgaaaaagtatttttctaaatatgggcaaggatgctgcccttccccaaactgttagtataccacctctctgaccaattttcccaaggaagatattggggtagggtgaggtgtaaagaaaaagtggtcatgtaaatactggtaataaaagctgttcagtggggtagagttgggttgcaactgtagccattctaaaaatgggctatcaatgtccttttagccaaaagactttagtatacatcctcctcattctaccctcaggatttggatctttgcccctgatgggtatccatcccctttgaaactttagaaaggcaggttatatacagaatgttcaacctaaagacatttccttaagtcatactttcatgctttctaaactataatcacccttatcatcccctgctgttatgctttccctctgctccctgtggcctaatgttcctccaccaccttattaaccttcaggatacttttcccctaggctgggcaggacaacactatccccttggtccacaagctccctcaaggttggggaatctttgtttacttagcaaatactgaacataaccttaaagcggttacttttgaaaacttctcatgctattctaccaacttggaggcacctatccatgctcattcccctaatgtagccaatatggttatctgcaatgtattggcatctaaaaactcccttatgaaactgccagacttgttctggaacatttcaattacatgcaaaattcaggttctcaagttggaacaagtctaattgacacacctgcataggttttaaccttgccctccccctacttcccaacagatttccaagttttttgagaaggaaccttgctctggcccaggctggagtgcaatggcgccatctcggctcactgcaacctctgcctcctgggttcaagtgattctccagcctcctgagtagctgggattacaagcacctgccaccacacccagcttttttgtatttttggtagagacggggtttcagtttgccaggctggtatcaaaccgtgacctcaggtgatccacccgcattagcctcccaaagtgctgggattacaggtgtaagctaccatacccagatttccacggctttttttttaagtctcactctgttaccctggccggagtgtggtggcacgatttcagctcactgcaagctccacctcccgggttcacgccattctcctgcctcggcctcctgagtagctgggactacaggtgcctggctaacttttttatatttttagtagagacagggtttcactgtgttagccaggatggtctcgtgatctgcatgccttggcctcccaaagtgctaggattataggctcacgcctatattactatatagtggcctatattacaggccactccgcctggcctccaaatttccaagtttttaagtctccatgcaaacaggcataagcaagcactccttggctctacatttgcaggacaagctggaccaccattcagatgttggtagaaatgtaatccaagtggctattctctatgcatgtagctcctaggttcaagagcagtgtggtctgcggattttctacacaacctgccataaatgaaatttaagcctttggaaatttatagcattttcagctaatttgcattatttatctctgcaagatattgactagaaatcacgtttcagaacttctcagatgaaaacatcatacaacccttaaaactaagctcataatttaaaaatgtatgcagattaataggcttaaattgccaggactttagatagacattaccacttccaggttaatacttttagcggtttttatgccttcaatggtttgaagccctcaaccttagttgaaaacttaaaaatggcattgaatggctgctgcaataaggacacatgaattttggcttaagtggactaggaggactaaatcttgcttaggcttttaaaaaatgcccacccactgggtctagggattgaggttattttcctgaattatggctaattatggattacaattcaaggttaaagatacacatatagtattctcaggttattcatatgatagcattttttaagagccaaagtctcagtcacccaggctggagtgcagtggcttgataatggttcgctacagcctccaacttctatgttaaagtgatcctcctacctcagcctttcaaagtgttgggattataggcacgtacctatggccccaaagcactttaacaaatgagtaacagacacagttaaggtagaacctagcattttatttagatcttcattaaactgttggaattgagaaccagacatacgtaataaacctccaaaaatagatcctgaaaggcactttctgcttagggcaagcagtcatggaataagcatgtaaacaagctggcttctctgtaccacaccagccaagtcagctttctccatggccagccgcaccagctctgccctcccttctgttaacaccagccagaccccctgtaggtctaacccaaggtttttctgtaggacaccttggcctacctgggaatgctggaaacatgttgttaaaggaatcatggtgttgagagaaaaaaaaaaaatcttttaaaagctgccatctgaggtgatggcttctctgtacttacgccataccccagaatacaataaataagcaattagaaaacgttcaagtatgaagggatttcctcctccccgccaaaagcactgctctctgaaggaagctggtttctctgtagctacaccagctgttcagaaagctcattggacctggttttgaaaataaaacaaagttaaaaccctgggaggagttattgtgcagtgtggagtactcaggctttcttataaagaaaaaaaaaagttatctggtaccaaagtgtgcaacctacagaccctcaggtactgccctgtgacttctctgtatgacatcacaaggctgccaagtgcctgtttttctagaactaggagttggtgaggtttggctagtgctgaaaccatgcataggattggtttactaaattaaaaccttattacgtacgtcctccaaaagacagctgaaagtggagagattttgatttggtgctgttagaggtggcaattaagagcataagcaccagggagatggtttaatggtaactgccttttttgatgtcaggctggagctccaactgggaacttgcgttacatgcaagattgattggatagggaacactccctgacaaagagctacataattagaaatggatcaagttacagggaggataaggggaaggcttcacattcataatagagctcaagacattacaaattcatgctgacagggctgtggcattgccagacagaggctataagtggaactacaagtactttacgtgcacatcacaaggacattttcagcatctggtggggaaagtcaatgcaattatgactttggagcgttgggtgatagggcacaaaggttcaatttcaaagcattatttactacagtgttgtttctaggcagttacatggatcacctatgctcactaaattcattataatggtgaacaaaacacctagggacagaatagcaagcccaacttacagtcccccacaaaagctaaaattcatgtcattgactagagtgactgcaactggtcaggagctgaaagaggacaggaaaatttaggaaggagggccctttccctcagagcttgaaggcttctctgtagcctacgccaacaagtctggggaaaaaaggctaacactttcaatatttaagctttttgggcacttcccatgggaagctgtccctaccaaagtggccataggctgcagtcctctgataaattggcttcttcagatccagatccctggaatatacaagtccgtaacttaatatgtagcattaaattaaaataaagcaaaacaatcagcaagactcattttcaagagctctggcaaatgagttctctgggatatgctaggaaaaaaatttgtggcaaaagtgttacttccctggtgtccaaactccttgcacagtccttattagtaactatagttgtttttccgtccctggctcaacaaatacgaaaacttgtcattattctgagaaatttcaattgtcaaaaagctcacctgagatcacacaatacttaccaaggtcccgccgcccacaccctaccatggtttttacattgcaacaaaccttgagcaacccactttatctctattttcttaacacccttaagtagaagagcacaaagctcaaatatcaaatctggaacattctctagagtggttagcctaagccatggagcaccgtaattttaaatttctcaaataactaagtcttcactaaggcagcagttcaaaactgttccaggaattaaaatatattcccatttgaggagtcttccttcacaccttcacctcctcagccttaagtatatacacacacacccaacaccctcaatacttgactagcaac

SEQ ID NO: 95632 - DNA, 18779 bp, Homo sapiens
accatgttggtccaggctggtcccgagctcctgacctcaagtgatccacccaccttggccacccaaagtgctggaattacaggcgtgagccaccgtgcctggactagaatagctttctagaggtgggactgcagatactagggaatgtgaatttaaatttatgagagataccaaaggatttaaaaaaaaatttttttttgagacggagtctcactctgtcgtcccgacagactggagtacagtggtgtgatctcagctccactgcaacctccgcctcccaggttcaagtgattctcctgcctcagccccctgagtagctggaattataggcatgcaccaccatgcccagctaatttttgtatttttagtagagacggggtttcaccatgttggtcaggctggtgtcaaactcctgacctcaggtgatccaccttggccgcccaaagtgctgggattacaggcgtgagccaccgcaccggccctagcaaggattcttaacttgcaatatatggttaagtttcagaaattatacataaaatgtttgtccatgtgtgtgtgtgatttctagggagatccatagattttgtcagatatttaaaaagtttcaagtcactggggtacagggggccggcacttcactacagcagtggaccatgtgtagtatatttgcaggttttgagcaattttatcaaccaggtacttgtccagcaagggtcactgtctgtgcagctaccggaccacctgcaaggagagcagatgacagcattcccacgtatctcctgcccctagagtaaaggtgaagatccatacagaccacagtcatggtaccacctcctctttaggtctgattaatttgctagagtgtgccgggcacggtggctcatacctgtaatcccagcactttgggaggcggaggtgggcagattacctgaggtcaggaattcaagaccagcctggccaacatggcaaaacccggtctctactaaaaatacaaaaattagcagggcatggtggcaggcgcctataatcccagctactcgtaggctgaggcagcagaatcacttgaactcaggggtggaggctgcagtgagctgagatctcgccacttcactccagcctgggtggaagagcaaaactctgtctcaaaaaaaaaaaattttttttttccgctagagtggctcatagaacttagggaagcacttgctcatttttactggttattttaaaggatacaaacaaacagccagatgaagagatacatagggtgaggtctgggagggtcccaagtgtaggagcttctgttaccatggagttggggtgtgccaccctcctggcacgtggatgagttcttattcactttcctgtcagcctccacctgttcagctctccagaaactctctgaacccagtcctctcagcattctttgtcccagggtatggggtaggaccctctctggaatgagggtcttatgacccatgatcagaagggcagggcaagattagagtcctgccttggggcaggtgaaagagaagcaggaaaaagtcagagagattctgtttcctgaggcctgctcctgagtcctaacactctcaacattataacgaaacactgtataacaagggctatgggagttatgagccaggaaccatggataaaaacatatataaattcacacatatattaacatcacatctatcaacgaggttgagcatttttttcatatgtttattgcaatttgcattttctccttggtgagctacctattttatgttgtatatattttcccacagtaaaagagaaggaaatgatttacagctctacatagtatcctggagagacagtcatgaaaattgttaagaaaaaaaaaatccatgtttctctgaatagtaagatgtgtgcgtgtgtgtgttcacagaaaaaggaaagggaggatataaaccaaattgttaatattaacgacctcagggagtatgcagtatttattgtttggctataagaaggggcatgaatttagaggtcagaccaggctcaaggccctagctccactactgatttgatgtgtgacatggacgaataacatgccagyttcttcatctgtaaaacaggaagagaaatagagctgttgtgagtagtagatattacaacagtgcctgtcacaataaagtgtagctattgtcatcatattattatctccttcagtgtcttcttcactgtaccatatctattcttccattcaggacttctttattgggactgtaaaaagatttaagtatcaaaagagaaaaacatagaaataaaaacaaaatacaaaaagcctaataatgagggggttcacatagtacttgtttctgatcccactagaactagcttgcctctgaggccatccgagatatctaagctttggccctaaagaactgccacaaatttggagacgtggcctacatttctttcttcttggtctgtcttcacatagaaggtgctcttaagacacacagcctaggaacctccttctcaacacctccacaccttcacttgctctttgctatccctactgtcaccctcctcttttctcctgccacatcaacagcttcttgcactgcaaatgttttctggaactctccccatgactgacaggctaataaggagttattttatttgctgtttgagtcacaaataccatttttatccaatcccaactttgccttttttgtagggttactgctacattaatgttctctggcttgagaaatctgaagcctttaggcagtgattagatttttcctacgtgctttacaacacttcacattcaacaaattcattaacgataaacaggaaataaaccaacaatttctcctggtttagttcacccttaggacacgcatstatgaaatcagaaatcttattcctgtcagaacaggatggccatgtgcttccctgttaacaaagaagtcttaattttattaattacaatgcttacgactaaaacaaagcaggacctctttccattgatttcacatgatcgccagagtctctcatttctctgcttccttctgccatctttttttttgagacggagtcttgctccgtcgcccaggctggagtgcagtagtgcggtctcagctcactgcaagctccacctcccgggttcacatcattctcctgcctcagcctcccaagtagctgggattacaggcgcccgccaccacgcccagctaattttttgtatttttagtagagatgggatttcaccgtgttagccaggatggtctggatctcctgacctcgtgatccaccccgcctcggcctcccaaagtgctgggattacaggcgtgagccaccgtgccccgcccccttctgccatctttatattcgttcattttccgtttccttcccttcttttcttgtctctccctcttgaacatttctaagcaccttgtgtgtgccaggcattcagtaacaaagcttgagcaaaacagcccaccttctcattatcatggagcttacaagcctaactgggaattggagacattcatcaaataatcaccaaatctataatttgaaactgcacttagtgccatgaaataaaacacaggcccctgtgacaaatctgtgtagatgaaggcttcatccaggaagtggtagctgagctggagtgagaaggataaggagttagccaggcatctccccacatttagagcgccgagtgggcagagaccaggattgttatagcatttgctcctgggtctgactcacagatgtgctcataaatatttgtggaagggaggaagggacaatacgaataatataaaataaatgaaaatgtgtcctcctttgttttgatactatgaaattaataaaattaactgctactaactaaaaaatccaagtagaacacagaaaggagagtgtggcacaaggtaaggttgcagaagtagcagccaaatcacactggggccttgagtatgtagagattttagtccgtatcccgacagcaattgaaagccactgaaaagtaattcacagcaaatatagttaatttttttacagcttacattaaaacaaattatgtactagatactgtgctaaagactctacttgcactatttgaatccttgaaacaatcctatgatgtactattaatattccaattttacagaacgaggatactgatgcatagagaggtcgtgactccaaacccctactcttactgtattacacctacacactattcacaagtgagagaagtaggtaagcaactatgtacagctaaatctcatctccttggcaggcctagccccactgtggagttggyagcacaggggtatcaggatttaatgagccaatcattgactttacgctccttgttctgactccctaataaawtaaccttctagttatattctggcttcccatatagatttttctgctgggagataatgcactgaccagcctacacacrcattttgttccagttgacaattttattacacattgtaagttaataaattggcattctcctttaaaaaataacaaaaaaatttaatagtcttatacagttactttcccatgaagggttagcttgaaaagtaaaaagcaacgaataaaaatatcatcacctattgtctcttttgtggtcgaaccttttcttgctgcctgctttgagcgaccgtggatgtggtcactgagtctggggaggagccctttatcttctttgtggatgcccccagcacagcccaagtgcttcctttgtttcccactgagcctttagcaaatcccacctttcctcctgcaccgacggagaggattgttcttgggaatgcaccttgttctactgccgccagcagtaggcagctggagactgttactaggggtctccttcacctccccagcgtaaagtacatcccatgctaggagcaggccgttccctgagaacctcattaaacccggcgttcttgtcacgcgctccgctcagggccaccaggccaccagcccgaccagacctgcaccgaggcccagccccagaacaggctgcagagacccccgcccccaaggcgggctccctccaaacgggactccatactccttgctggctcaagttttgtttcgctctttttccctgtaattcctttattgggcaaaactgggacaaacgcaggtggacattttaaagtgaaagcttcatgaaacagcccattccacgccgtcaagagatctgcttaagcacattcaagggaacgaatagcccccacccaccaaaaaagaaatgttcgttccatattctcctgaacagaggattgaaacatcgattcccccccccktcaaaggaacaggaaggccacggggcaaggacggacttgggagcggcctcctttctctctggagggaaaggctggagcgctgcctccacttttaagtccacgaaccacgaagggtgaggatccctcagaaactttagcgcaggggagcgggcaggagggcgattgtttaaatcgatggcagcaccttcattaatctgctttccggccatcttcagcagagccattcaccaggaaacgactagaaggtgggcctgcgcccctcagatatcccggggccggcaacgagccgggcagggacgccgaaggaaggccgtgaggagccctcgctggccggccaagatggccaccttcacatggccgaccgccaccggctccctgccacccggcatctagaggcgggacggccagaaagaccccagccgcagcacaaaacctccgcgattcccgccgcctccgctgggggacgcgacctccgggaaagctatcccggccaacggtcggaagggaggtgccatgtcaccgcacaggggagcgggtccagcaagccccagtcgctttttctcccacatcaaacaaggaagagcaatcccccacgtctcctcgcgtctgcatttttctcctagctctagcggctcaagatagctgaacggtctctggagggccggattgccacggcacctcccgcggccgcgcagtgtggttcagcccggactccgcggggcgagctgcccttcctcccccgacccccgcgcaagtggtgcattggcgcgcggcgccgaggggcggggcccgagccgggcgcgcgcgggcgctgctctataaataccgggccgcaccgccsgctgcttcgttcgctccgcgccgcccgcctgctacgagtagaacgctgtccgcagcttgcgcatttcgcagccgctgccgcctcgccgctgctccttcgtaaggccacttccgcacaccgacaccaacatgaacggacagctcaacggcttccacgaggcgttcatcgaggagggcacattccttttcacctcagagtcggtcggggaaggccacccaggtgaggggacggcctgaagcgaagcgtggggcggggcagaaggyagcgccaaggtccggctggctgcggccggccggtggtggggcccgcgcgggtcgtcctcgtccgccgggtgatggaagagcggcgaccgcgcgctttcctcgtggcgccgccagggcctggcgcgtggccgccgctcctcttccccctcccctctccacccttcccttcccccctcccttttcattcggtcgcgcgcctaggcatgcggaaggttccagaaaacgtgaagggcgggggctgtggtcgctagtgagttctggccgggaagggagggcactgttaacccctcccggccctgccgtctgacaaacctggagtgggcgacccgccccgcgtgctcgcgtccggccctcgggagcgcgcgccccgcattgcagcggcgaccacgtgtttgccgcatgtggtatctgggcgagggggagccgtgagcctccccggctgtcctggccctcagtttgaggggtggggggcctatgccttgggacgtcgtctggctccactgcctcagtggttaggtcttgactacacactggagaatacgcacatgcccttcggcggatatggccttgcctccaaggtgacggcctctgactaaatatagctcatgtccaagaaggcagtccttatttggaccccttgtgaaaaggatgggaagcatgaattaggagctgccattgctttgggttcgcatttaaagtcttcggtgcagggttttacttgaggctttgtccgctcaaccgccattatggggatcaattggcacgtgaaggaggagtaaagctatatttccaggaactgaaaatctcagcctgagcatatcggctagtaaagatgattatttggctcttttggctgtttctgcccttaggatgaccgcagtagttatctatctggtggctttagggtctggtcagtttactgtgcccatgatgaaatcccacaagtaacttagtggtatgagaggacaaacccaggatcttgatgagtgctgaaggttagctgttacaccagttagtagtagaccgaagttcagagcctgcagtctggcttccacattatgtttggattctgttttaggcggttatagaaaattcagaaaaacgaacttgaattagggagatatttgttctccctcctaacaatagatgacaaagcagggagacatggattcggaatacgtttgagcatyttctacactgttgagcttttgtttcctgcgcaactcctaacagcaaaatcagataattgccattttagtcagaaaatgcttttcatttaattgtttaatcgaattatcttgttgctcattataattggtgwtccttaagattagggaaactggcctacctgtggcctcagttctaccagactcccaggtgcagaggggtttggtacagttgtggaagtgaatatgatatagggmaaattctgttctttaaaggatataggactaacagttcacctttctggtgattagatttataatgcaaactttgaattttaggaggaaagtgcaaacacaatgaattaagatgtattaagcatgttttttaaaatctccaaagattttacagatagtaacagggagggagcttgcatacatacatacatactttgtttaaagttaaagaaactgagccaggaatttctcttttccagataagatttgtgaccaaatcagtgatgctgtccttgatgcccaccttcagcaggatcctgatgccaaagtagcttgtggtaggttcagaatgtgcttatcaactggtggaaagatagcataaaarttatttttatagaagtgatgtttgagttgaatgtctctttttattagaaactgttgctaaaactggaatgatccttcttgctggggaaattacatccagagctgctgttgactaccagaaagtggttcgtgaagctgttaaacacattggatatgatgattcttccaaaggtgtgttttaatgattttgctcatttttttctaggtaacagctgtgaggtttgaagaaactcctagaatgttcctgctaatcctaaactccagttgtatcttactatacactaagccctattctgttcattctctaaaaggtccgatggtttaggtatatttgatttcttcagcagygtttagaattccagataattgctgtaaacagcaggtatttytaggacgtaaacaagatgttgtgttttttgcttataggttttgactacaagacttgtaacgtgctggtagccttggagcaacagtcaccagatattgctcaaggtgttcatcttgacagaaatgaagaagacattggtgctggagaccaggtatcttggtgtagaggctgttttaatctctyctaacattaaattctggagcttgatcacattggtgacttttctttctttagggcttaatgtttggctatgccactgatgaaactgaggagtgtatgcctttaaccattgtcttggcacacaagctaaatgccaaactggcagaactacgccgtaatggcactttgccttggttacgccctgattctaaaactcaagtaagtgatgatcataaagcttggttgtctcatttattacatcagcacagaagatccataattttgataatagctaactggaaaaaatagcatttgttttcctatattgtaacttcaggtagagaaacaaatacaaagttattgtttggtrtgatgttctgatgacctgtgttgccttcaaggttactgtgcagtatatgcaggatcgaggtgctgtgcttcccatcagagtccacacaattgttatatctgttcagcatgatgaagaggtttgtcttgatgaaatgagggatgccctaaaggagaaagtcatcaaagcagttgtgcctgcgaaataccttgatgaggatacaatctaccacctacagccaagtggcagatttgttattggtgggcctcaggtaatgtcattttgttgcatttttctggatttttgatggttacttaaaattttggctactacatttttttcaggctttctgaaacctacatgtgaatcatcggaggatatttgctgaatgaattcagaataggcaacctaatccacttggaaagcactaggcgtaaagtaacttaaatcctgtaatttcagggtgatgctggtttgactggacgsaaaatcattgtggacacttatggcggttggggtgctcatggaggaggtgccttttcaggaaaggattataccaaggtcgaccgttcagctgcttatgctgctcgttgggtggcaaaatcccttgttaaaggaggtctgtgccggagggttcttgttcaggtatacactctttatataacgaacgattaaaagtcatgtaagtgggagggtatttagtagtaatctacttaactacttgttttataccaacgtattatacaagtrtatgggtctttgcaatcactgattcttacracatttgaatccttttaggtctcttatgctattggagtttctcatccattatctatctccattttccattatggtacctctcagaagagtgagagagagctattagagattgtgaagaagaatttcgatctccgccctggggtcattgtcaggtaaagatggtaaagcctgttgctagtcaagtattgagggtgttgggtgtgtgtgtatatacttaaggctgaggaggtgaaggtgtgaaggaagactcctcaaatgggaatatattttaattcctggaacagttttgaactgctgccttagtgaagacttagttatttgagaaatttaaaattacggtgctccatggcttaggctaaccactctagagaatgttccagatttgatatttgagctttgtgctcttctacttaagggtgttaagaaaatagagataaagtgggttgctcaaggtttgttgcaatgtaaaaaccatggtagggtgtgggcggcgggaccttggtaagtattgtgtgatctcaggtgagctttttgacaattgaaatttctcagaataatgacaagttttcgtatttgttgagccagggacggaaaaacaactatagttactaataaggactgtgcaaggagtttggacaccagggaagtaacacttttgccacaaatttttttcctagcatatcccagagaactcatttgccagagctcttgaaaatgagtcttgctgattgttttgctttattttaatttaatgctacatattaagttacggacttgtatattccagggatctggatctgaagaagccaatttatcagaggactgcagcctatggccactttggtagggacagcttcccatgggaagtgcccaaaaagcttaaatattgaaagtgttagccttttttccccagacttgttggcgtaggctacagagaagccttcaagctctgagggaaagggccctccttcctaaattttcctgtcctctttcagctcctgaccagttgcagtcactctagtcaatgacatgaattttagcttttgtgggggactgtaagttgggcttgctattctgtccctaggtgttttgttcaccattataatgaatttagtgagcataggtgatccatgtaactgcctagaaacaacactgtagtaaataatgctttgaaattgaacctttgtgccctatcacccaacgctccaaagtcataattgcattgactttccccaccagatgctgaaaatgtccttgtgatgtgcacgtaaagtacttgtagttccacttatagcctctgtctggcaatgccacagccctgtcagcatgaatttgtaatgtcttgagctctattatgaatgtgaagccttccccttatcctccctgtaacttgatccatttctaattatgtagctctttgtcagggagtgttccctatccaatcaatcttgcatgtaacgcaagttcccagttggagctccagcctgacatcaaaaaaggcagttaccattaaaccatctccctggtgcttatgctcttaattgccacctctaacagcaccaaatcaaaatctctccacttycagctgtcttttggaggacgtacgtaataaggttttaatttagtaaaccaatcctatgcatggtttcagcactagccaaacctcaccaactcctagttctagaaaaacaggcacttggcagccttgtgatgtcatacagagaagtcacagggcagtacctgagggtctgtaggttgcacactttggtaccagataacttttttttttctttataagaaagcctgagtactccacactgcacaataactcctcccagggttttaactttgttttattttcaaaaccaggtccaatgagctttctgaacagctggtgtagctacagagaaaccagcttccttcagagagcagtgcttttggcggggaggaggaaatcccttcatacttgaacgttttctaattgcttatttattgtattctggggtatggcgtaagtacagagaagccatcacctcagatggcagcttttaaaagattttttttttttctctcaacaccatgattcctttaacaacatgtttccagcattcccaggtaggccaaggtgtcctacagraaaaccttgggttagacctacagggggtctggctggtgttaacagaagggagggcrgagctggtgcggctggccatggagaaagctgacttggctggtgtggtacagaraagccagcttgtttacatgcttattccatgactgcttgccctaagcagaaagtgcctttcaggatctatttttggaggtttattacgtatgtctggttctcaattccaacagtttaatgaagatctaaataaaatgctaggttctaccttaactgtgtctgttactcatttgttaaagtgcyttggggccataggtacgtgcctataatcccaacactttgaaaggctgaggtaggaggatcactttaacatagaagttggaggctgtagcgaaccattatcaagccactgcactccagcctgggtgactgagactttggctcttaaaaaatgctatcatatgaataacctgagaatactatatgtgtatctttaaccttgaattgtaatccataattagccataattcaggaaaataacctcaatccctagacccagtgggtgggcattttttaaaagcctaagcaagatttagtcctcctagtccacttaagccaaaattcatgtgtccttattgcagcagccattcaatgccatttttaagttttcaactaaggttgagggcttcaaaccattgaaggcataaaaaccgctaaaagtattaacctggaagtggtaatgtctatctaaagtcctggcaatttaagcctattaatctgcatacatttttaaattatgagcttagttttaagggttgtatgatgttttcatctgagaagttctgaaacgtgatttctagtcaatatcttgcagagataaataatgcaaattagctgaaaatgctataaatttccaaaggcttaaatttcatttatggcaggttgtgtagaaaatccgcagaccacactgctcttgaacctaggagctacatgcatagagaatagccacttggattacatttctaccaacatctgaatggtggtccagcttgtcctgcaaatgtagagccaaggagtgcttgcttatgcctgtttgcatggagacttaaaaacttggaaatttggaggccaggcggagtggcctgtaatataggccactatatagtaatataggcgtgagcctataatcctagcactttgggaggccaaggcatgcagatcacgagaccatcctggctaacacagtgaaaccctgtctctactaaaaatataaaaaagttagccaggcacctgtagtcccagctactcaggaggccgaggcaggagaatggcgtgaacccgggaggtggagcttgcagtgagctgaaatcgtgccaccacactccggccagggtaacagagtgagacttaaaaaaaaagccgtggaaatctgggtatggtagcttacacctgtaatcccagcactttgggaggctaatgcgggtggatcacctgaggtcacggtttgataccagcctggcaaactkaarccccgtctctaccaaaaatacaaaaaagctgggtgtggtggcaggtgcttgtaatcccagctactcaggaggctggagaatcacttgaacccaggaggcagaggttgcagtgagccgagatggcgccattgcactccagcctgggccagagcaaggttccttctcaaaaaacttggaaatctgttgggaagtagggggagggcaaggttaaaacctatgcaggtgtgtcaattagacttgttccaacttgagaacctgaattttgcatgtaattgaaatgttccagaacaagtctggcagtttcataagggagtttttagatgccaatacattgcagataaccatattggctacattaggggaatgagcatggataggtgcctccaagttggtagaatagcatgagaagttttcaaaagtaaccgctttaaggttatgttcagtatttgctaagtaaacaaagattccccaaccttgagggagcttgtggaccaaggggatagtgttgtcctgcccagcctaggggaaaagtatcctgaaggttaataaggtggtggaggaacattaggccacagggagcagagggaaagcataacagcaggggatgataagggtgattatagtttagaaagcatgaaagtatgacttaaggaaatgtctttaggttgaacattctgtatataacctgcctttctaaagtttcaaaggggatggatacccatcaggggcaaagatccaaatcctgagggtagaatgaggaggatgtatactaaagtcttttggctaaaaggacattgatagcccatttttagaatggctacagttgcaacccaactctaccccactgaacagcttttattaccagtatttacatgaccactttttctttacacctcaccctaccccaatatcttccttgggaaaattggtcagagaggtggtatactaacagtttggggaagggcagcatccttgcccatatttagaaaaatactttttcaagtgtcttctcccaagtaactcttgggacttttgttaccagtcaagtaggtacagtgagtttggcaaacaacatagtggcaaagtatcttctattgtgttactatgagagaagatctgcaaaaggattgaaaatcagcatccctcccacccattcttacaaagtaatcaggggaccctgtgccacagccattgcttgcccatataataccttgaatgaattagagattttccaccaaactccatttggcctcctcagtggtgggggagggtggcaatctgcttgacaactaacatgtcggccctgtcctggtctatccctaactagatgctaatacaaaggttgaaaatacagatataggtagtaatgaaaacagatttggctgggcacggtggctcacacctgtaatcccagccctttgggaggccaaggcaggtggatacttaaggtcatgagtttgagaccagcctggccaatgtgggaaaccatgtctctactaaaaatacaaaaattagttgggcgtggtggtgggcacctgtagtcccagctacatgggaggctgaagtggaagaatcgtttaaacccaggaggtggtggctgcagtaagccaagattgtgccactgaactccagcctgggtgatagagtgaaaccctgtctttaaaaaaaaatagattcaagaggtatccaggaggtaaaattgatgggacttggcaattttaagaaatgcaaggaaaaaggaagagtcaaggctgatgacctagagataacagcttggctaaggtacagagctgccattcaataataaagaataaggaagtctgagttggggatgaatgtaagttctgtttaggatgaactgagcttgatagccctgtgggatatccaggtggaacttagacctatacgtctagggcacaggaaagaaacctagcatcgttggaaatcctggagtagacacaatcatctgaagtatgtatactgaaaaagcagttgcttaggaaagaacccccggaacactgtccaaggaggagtgggggagagtatgggaagagaagcctgcaaagagatgcaatcatttacagaagttactgagactgccaatttactaccggtctctgctacaagtccatgagctcccaaagcagggatcctttttcataaccctgcattctcgcttcctagctcagtgccaaccctttgaattttcactgaactgaggagcttcctgagttacccttgtataccccaacctacaaaatgtctaagcattccctaatcccttactaaatttagttaattcttactttacctccccttctgctcaccaaaggctagaataataccaaatactaagcttatttttagagaaaatctagcaatcatctagatttccttatttaactttgatgctgctattctgactgctctcataactgctagtgaaacactgggtgtatatagataataggaacaaagaaggaaccaaaattgcaatgaagataaattactttgtgtgcatttacaacctgaccaccatccaattatacttttaattaagaaaacatgttttaagctgcattatttcagattatcagtgattctgaaaattacaagtggcagggtgcaggaccttaagtcaaatagacgttaagttcaaaccatcagtccattcgtcactagctgtatgtcttcgggcaaattattttacctctcagcctaatgtaataatgcaggtaacactgctcacgcggtgtgttgcacatagcaaacacttgggaacagttagctattcatcgtggtacattaaattgcttttccccaagagccactttatttatttattttgagacgaagtcttgctctgttgcccaggagtgcagtggctcgatctcggctcactgcaacctccacctcctgggcccaagcgattctcatgcctcagcctcctgggtagttggattacaggcacccaccaccacgtctggctaatttttgtatttttagtagagaaggggttttgccatgttggccaggctggtctcgaactcctggcctcaagtgatctgcccacctcagcctcccaaaatgctgggattacaggcgtgagccacggcacccagcccccaaaaagccactttaaaccttatcctaggaggacagtttcacattgcgtctaacctcttcctggcctcttaatcttgggttgttaaatcttatttgctttatttccttggttcctctaagttgtaatctcggagttaaaaacagctttagaaccccgcccccccaaaaaaaaaaaaaaaacttttgagaatttttttcaaataaatgtccattgcatagaatgggtctgtgactggctgcttctacatctgcacccaacatctggcccccttcagaactctgagtggacaggatcaggatttgactcaggaggattagaatgtgaagaatccgtgtttgagggattcagttctccaactgcctcaaagggtctcaagtttgcataagtcacctcctgggccagctgctccagggaaggacggcctaatatcagatttcgaagtgagatacaagtcatcaggaagctgaaaaacaggaaaaagccraccaagttcaaactcctgtttcaccagaagaatttcagctaaagcccttagaaggcacctggtcctcactcctcccacacaggcatatatgggaatctccccccaagtgaccctccatctcccagctggaagggtacaccactctttatacagtctggtagaggattccaggatagggtaggaacagcccacagagaggctggagataagctgaggcagaacaagaaagcaggccatcagatataggccacttattcttccagtaaatcaagaagaatggcaggaaaagatacctagagctmaactgtcctttcctgtatgacagtctctagagttactctccccaggggaaagttaccaagcttgccaacatatgatggcaatgacaaatattgttgtgaacttacctgcggcgaaagacatagagctttcgcaacaagaagcggaagaatcgctcatggaaaggagtatttcgccggcgttcaatctcctggagcctttgttggcgtctaagaaaggtctgaaccagaggtgttggctcagggcccccttttacttccccttccaacagaggctgcagctctgkgggtagaggccctgtttctgcccggaagacagaaaaaagaggaatcactgagatggatcactctctccccttagaactcctcttctgccagctagagacttcaagttcattcttgaatggctagaacatcattcataaccctgacttcttgaaaccagaggctatctcagcccaaatgttcatacactcaccacttccattctccaccttttcctttaattcttgcagatatgccaggtcttgctccagtgcaagctctgtagtgttgacatagacgtacatgtagcaagaagggctaggtgatgtcgtatacaccttatggtactcaccagcaggcaactgacaagggagaagaaatggataaatttcatcagcttttctctagccagcttatggcctccctactctatgactcttggcttctttctactcaattgtgttttggaatcgaaagtaacggacctctagaatcctggatgaggctcttcacagtcccaggggcccttgttttttgagctccactgcattactgctatggtaaaatattttcagtctataataagtgaatcttgctcatctaagctttctgccattgttttttaaattgttagagatggggtctcactctgttgctcaggctcactgtgaattcctggcttcccacctcagcctcctaagaagctgggattactggtgtgagctactgcactcagttctttctgctgttgttaatcccagcaaaatacctgcattttttctccctctcgaagagtctggttcttctgttctgccacaagctccacagtcacttccccctgcagcagctggatgctagtgttgcccaggtcttcactcacaaaattctccaagtgcagtcctgccagaccaacagagttcatcatcccaccccatggcagagtgaactcactcccagccagaacagagacatcacacctttaccaccatcatccccttaggtttcaaaaacattccctctcccctcccaccacatggaatgtccctggccaaggaagccagaaggaaag

SEQ ID NO: 95633 - DNA, 61970 bp, Homo sapiens
  misc_feature (1)...(61970): n = A,T,C or G
accacaagaacagtctggaggaaactgcccccatgatttaattatctcccactgggtccctcccacaacatgtaggaattatgggagctacaattcaagatgaggtttgggtggggacacagccaaaccctatcacttaggtaggcttgaggcaagagaataaggtctggaggcagggaacctaaggctgatttgcactgacttcctaaaattgaatcagatgggaaaccccacctctccatacccaagtaacaaaaggatcagaggccactccctttgcactgcatcacagatgaaaaatggaaagtacctctgactggtcccctcccgcaaccaatcagactggtcacggttcactcctttgtttacatagggtataaccaagtaaccagtgggaaacctctagagggtatttaaaccccagaaaattctgtaaccagccctcttgaaccattcactcgggccattcctactctgtggagtatactttcatttcaataaatctgcgctttctttccttcattcttttgttgctttgtttgtgcattttgtccaattctttgttcaaaacgccaagaacctggacgactactgatttgtcaggaccctctactggtaacaggctctggactctgacatcctgggtttgaatcctgactttgtgaccctgggcaggttgttttatctccttaagtttctctaagcctcgggttccttgggtaagatatggggataagagaccctaccttaaagggacactgtgaagataaaatgaagtaatttatgttatgcacttagcatgatgcctcacacataataggctctcagcaaatatttgtagaatgaatatatgggtgagggacagacagaagggcagcctgaagatgtgcctggatctgtcaatatgcatcactccactaacagaagaattcattccatgagggattgtttcctcaatctgagcctcctctgccaaccgccagccttcccatgatgtttttgtgtcatctttttccctcctttgtttgttttactcccgcttctcctgtgattgctcacaggaaaacattcctagaaaaacctcaagagaccaacttcctttgtgcttcagggcagcagacagagcctgtgttctgttggctacagctgtgctccagcccccgagggcctgcggaagagacaacgtctcagggggaccagacagaagtccaacataaaaagacaatgcttcagtaagtaacctgggcctgaaactccaacacgacaaggttatgtcacagggcaagggacccctcacccctcctgcctcacagacttcctcggtcttggctgccaccaacatctttcttcccgcctttccttctggccacctacaaatcagtcacatcagcatcacccctaacagtttcaaagacactgggccctcagggaaggcacagcttctgtcatggcatgggatgagggccatttggcaggcaaaaagaaacaggccgtctggagagacctctttgagacctcagtaatttgaaccaatgactccctacatttttacttattgcaaaaaacaacattataacaacattaaaacagatttgttaaaaaggaagaaagattacttgtgatcccaccaccctaacacaactattttctttttccaagttctcttccagtttttggccacatgatagatgtttgcatacgatgtgttgcctttttaatttttttcacttaatattatatcctaagtcttttccagtattgacatatgatcttcacgttggccacatttttctccctgcaaatattccagccaattagactgaggcataattaatgatttcttaacctttggggattcttgttcatcccctggaatctctgaggttggctcttggcaaagctgtaaatgaaagtaagtttggttttggggcccatctgcatcccttgcaaatcttctttcttccctgctagcagttctagcctaagagttctattgccatatcccattccccaacctgttctctaatattgcgctgccagtcattgcactatcaaaaaaagtaataatataggttctaatttttcctcagtgtaaaagcaatacatatgcatgttgaccaatatgggaaatacagaaaagcaaaaataaaaataagaagtaaaaatctgctataatcttgctgcttacgatcatatgccgctgaagatcccatttgcctgagctaggtactttcctcctggacccttctctgccttccagcctcatttcatcattgcaacttgtgttgcataagtaggtacatagcgaatcagttggggcatctggggttggctagttgaaaccacagaggaacttactatctcatacaggtgaaatgtacggaggcaagatggacttcaggactggtttgatttagtgactcaaaaatgtcataaaggaaatggtttctttctaaccgtggtcttctgcttcccacagcattactttcttcctaaaataagctcttcttgtagtccaagatgtctgtcttaccaacagcttctgaggctacttactgcctagttcttgtctagcagaacatgaaagcatctctcccccagcatccaataaattcctgagacttcctctgattggatcagtgtggttcctgtggctacccatgaaccattcctagtggcaaggaggatggggcaatggggctatctgggtggctgagaccagtaagtctcaaactctggtctcaggatcaatttacacacctagaaattactgaggatcccaaagaatctttttgacatggtctttctcttgatatttgccaaattaaaaattaaaactgagaaatttttaaatatttaatttaatttaaatatttaaattttaaaatatttattaagtcattaaaataataaatctggctgggcattgtggttcacacctataatcccagcactttgggaggctgaggagggtgtatcacctgaggtccggagttcttgaccagcctggccaacatggtgaaaccccatctgtactaaaaatacaaatattagctgggcatggtggtacgtgcctgtaatcccagctacttctggaggctaaggcaggagaatcacctgaacctgggaggtggaggttgcagtgagccatgattgtaccattgcactccagcctgggtggcagagcaagactctgtctcaagtaaaaaataaataaataaaataataataataataaatccattgcatgttaatatatattgataaaaaataacttcttttttttagacagagtttcgctctgtcacccaggctagagtgcactagcgtgatctcggctcactgcaacctctgcctcctgggttcaagcaattttcctgcctcagcctcctgagtagctgggattacaggcacatgccaccatgcccagctaattttttgtacttttagcagagacagggtttcaccatgttgtccaggctggtctcaaactcctgacctcaagtaatctgcccacctcggcttcccaaagtgctgggatcacaggtgcgagccaccatgcccagccaaaaaataactggttttggctgcatgcagtggctcacatctgtgatcccagcactttgggaggcccaggcaggaggaacacttgagcctaggagtttgaggccagcctgggcaacagagggagactgctgtctctacaaaaaattagaaattagcctggcatggtgttgggtacctgtagttccagctacttgggaggctgaggtaggaggattgcttgagcccaggaggtggaggttgcagtgagccaagatcgtgccactgcactccagcttggatgacagagtgaatctgtctctaaaaaagaaaaaaaaaaaaacgctgctgtcctggatttgtaagtagcctgagtgactctttgctagtcactattcagaagcttctctgagatcagccactgacttggagagataacagtaaggctttgagatctagaggctgatcttagtctgctgtttggagatctctgccttaatccagaataatagctgaggatgtctctgtggctgatgaagaaaaggaagtttgcaggcctgcttgtcttgctgcccaagtgggtcaacctaatgtgagtggagtgaatgaggtagtaagggcttaacagatgtcttgtgattctgggacaggaggcagcttcaagttccttttcttcctcacccccaccttacacccatccttggaagctgggatactgctgactctcatggcagccataacgctatcagcgcctggctttgccgacaaggggaatctggaagagaaggggaaggacaggggagacaaagagaggtaaagagtgttgcatcaagcacatgtgtcagaagtgttcaaaccagagcgcctccattttgagtgagggctagaaaaatgaggctgggacttgctaggctgcatttcctgaaagctaggcattcctagcctctaggtgtttatggttaagagaacaaattaataatgcttactaaacagacccagacttgagagagtccagatatcccgatatctggagaacaaaggcattcctaattttgctttaaaaataataatattgattattgcaaaatatagtaattagggaaaattaatcctttatcacaaacccttgtagcagaagacatctgcccatatatacaagcattacaagcattgtaccttagttggatatgtccctcctcttattttcaggaatgccctgctggagtgcagtggcgatctcggctcactgtagcctctgcctcccgggttcaagcgattctcctgcctcagccccgtgagtagctgagacaacaggcttgcgccaccacgcccggccaatatttgtatttctagtagagacggggttttgccatgttggccagctggtcttgaactcctgacatcaggtgatctgtccgtctcagcctcccaaagtgctgggattacgcgtgagccactgtgcccagccaccactttactttcttaataaacttgcttttactttgcactgtggacttactctgaattgtttcttgcgtgasatcgaagaaccctctcttggggtctagatcgggacccctttcctgtaacacatgggccttgggctgatctccaagattaagagggcaagatactcagctgcaagggtcagctgtcgctgaccccagcagctgctctgccttggccaacttaccggatttaaatcgcccagtgacagcttttcctccagtattttcaaaatgctcccaatatcctcacgttagaacaatccagaaatagtcttatggtaaaactcttttgggaaatgtgaaagtagagtcctcccaccttttcctttgcaacgcttttgccccaacctcgatcgcccaggcagcacattttttccggcacccccaccaagggaagaacagagacatctccaaaccagctgccctgcgccaagctgttacaaaatagagccacaagtctcccggtttatgcaaacatatttggctcggtgtctaggatcttctttttcaaactcagaaggagatcacaggcacacggccgcggtgctgtgtacgcccctctgaaaggaagttctgcaagtcgaccgacttcactggcttcactgaagtccggtccgaaaccaccggaaagttgcaggcgcacagtatacgttcagctgtgtccaagaaataacctatcaatcactgccttaagctttgtttccttcctgaattttcttattttcacgaatatttatgctttcacaaactgtatgtcatttcctctccagaaccaaggggggctcgccccagcctggcccccgccccgggtgcgtccctgcagggggcgccctgctctggcaatgcccaccgcaccgcagggctgactggccgcgcgcccgggggcgggggccgccgcggaggcatcgtgctctccgattggccgtccgcgtcctcgtgacgtcagaccccgcccacgcgcccctcctccgcatctgagcgggggagcggcggcccccagctgaatgggcgcgagagcggcgctgggggcgggtgggggcgcggggtaccgggctggcggccggccggcgccccctcattagtatgcggacgaaggcggcgggctgcgcggagcggcgtcccctgcagccgcggaccgaggcagcggcggcacctgccggccgaggtacgtggcgcagccccctcctcggcgtcgcgggggcccgcgggctgggggctgcggcggcgacttgtctcttcccgggccggctgggcgcggcgtttccgcctcgaaccccgcgggcagcgcccagggcacgacaccctcaggcgagcccggctggggcgcgggcggagggtcgtggtcccgggccgtgtggaccgggcggggggtcccacgcaggtgtgtacgcggtagagggtggggcggaccgccgggtgtcgggtcccgccgcagtggccctttccccgccgctttccgctgcagctcgggatttaattcattgctggaagcttcggagttagcagagccgagttaactcgttttcctgggatgggcttagggaaccccctgcaaggttactagcagctcctgaaacctctctctgcatccatcggggaggcgtgatgtggggccgctggtagaaatttgccggtgaccttccctgcaccctctctgcagccagccttgcggagaagacaggttttggcgaccttttgatttcttctgaattgtaagccgtggcttgacgcgggtgtgcattcattgtacgccttgcgtgtgtaagtaacgcagggttttccgagagcatccccgagragccctgcccttgcctcacacccgcttggtgaccttggcagacactgatccccctgtggggctcgggctcatggtctctcctgagaagcttaccctgccgatggccgaggtcccttccaggccccgggtttttctaatcataaaaaaatacgtttacgagggtagaggatcctgcagaatctctagctgactcggaagacgaattttatatcctcatgtcttaagtcatgcatgcggcttttgcttaattaggcatcgttcatttgaaggggaaaatggttttatgtgctgcgcttcatctggcaccagtggttgcctgctcctcgtggcagggccgtgctgggtgtcacagagaggaaggagactcatctcctgccctctggtgtttagctgccctcccccgggcttatggctgctaatccttttccacggaaggatacagctgctgaaactgtggaagaggaatccatttctgctgcatgaaggggcacagacttgaatacagtcaggacaggttgtggtttcacttgtgtaatcctgagagcttgacagcttcgaggagtgtctaacattgctagtaacagagcctagaagcacctgaattccagctgtcacttggagaaggagagattcatacgaactgcgagagcatataaccagcatgtcttgagtcttttacccatgtgcctgttatatggatgctgctgtttttgtaagatgaaatgacccttggatattctgggttatgatcagcatttcttcgtctaggcgagaaaagaaacaggtgagataggaaggcatgaaggggctcatggaagagagagggctgacaggcagaaattttgagagctcacatttacgactatttggacagttcttataattttggcataaattgtaaattgttgcatgttatcaaaatagattggtgatgaacgttaaggatatatccgtggcagaataagaacacactctttgttctttggtttgctcctctagttcttccctgcttgccttgtgggactatttgcagcaatgaggggaatttatctagcaggttgkcctcgggaggcaatgaatgaaaagaggttggtgagtcctctgtgggagtccattccaggtcctggagggctgaggtgggtgtcttggagccagcagtttctgggagaagggataaagctcaccttccacaccctcctggctcctgaggagcgatttaatccgcactgcctgtggacacgatggaggactgagatcactcccgaagggcatgctccgtggttttagtctgctgggaagctctggcagaagtaaaacaactgggaatatacacatgttaatgatgctccaagctgcctaactgctgaggaaggaaaagcaagggctggatcagtgtgggtggcataagttagcaaaggcatccaaagtggggtgaatcacaggcctggtgtgggaggaaaccataaatatgacggtgacacgcaggctcgcccgggagacagccagcttaagcacacgtgcagaggagaagcaagtgaaatgcgtaagggagcaggagaaaaatcagctttgaggcttcaaggacactaccaggcttgtcttacctggacaccagacagacaaaacttttttttcctcttttttttttaagtatagcatagatactaggaaagtagacataccataagtgtcctgctcaatgaattttccagactgaacatgcccatgcactcagcacttagatcaacaaacagaactggccgggaccctgggagctccccttgtgttgtactccagtcrcggcctcccccaggatcagccttgaactcctggagtcaagcaatcctcctgccttagcctcctcagtagctgagactacgggcacacaccaccagacccagctaatttgttttattttattttgtagagacggctcccactgtgttgtccaggctggtctctggcaactcctagcctcaaactattctcccacattgccctcccaaagcgctgagattacaggcgtgagcarttgcgcctggctggctagtgtatgccttctttccttaagcattgagtttctgagaatcactcatgatgctgcccatggttgaagcatgttcactctcattggtgataggggccattgggtgaatataccacatagtcacgcattgttagtggacatttgggcagtttgcagcatttgtctgttacagaaagtgccgctgtgaccactctagtgtctggctttggtacatatgtgtctgcatttctgataggtccatacctaggcatggtattgctgttttaggagccacaggcacagctattttactccagttttttttttcttttttttttttttgagacagagtctcgccgtcgcccaggctggagtgcagtggcacgatctcagttcactgcaggctccgcctccrgggttcacgccattctgcctcagcttcccgagtagctgggactacaggcgcctgccacctcgcccggctaattttttgtatttttagtagagacagggtttcactgtgttagccaggatggtctcgatttcctgacctcgtgatccgcccacctcggcctcccaaagtgctgggattacaggcgtgagccaccgcgcccgaccttattccagttttgaaatgatcacactggtagttcctcactgttygctgatgagggccacagttctaaggagactggggaaggaatcaggagtccttctggcagtcaggatcagtttctacctggctgtgtatggtgccagcaagtgtggtcacctataggccccagtctcccagtgggtcaggcagcagggcaaggtgagctgtgaggaacccttagctccccaagagcctctgacctaagggaagtgtttctctggtgaaactgcctggcttggtctcaactcccacccttgttgctgcaaacaaaccactcctctctgagctctcataatactgcacttcctatactttatgtctacttctgtggcctgctttctctgcatttctgctaaaaattatccgtgacctagaggaaaagcccatttcttatttgggtttttgaggccatgtaagacatttttgttgtcccgttattacagcatggaaaaatgttcaggattaagttattggatggttcaccaagtcctgtacccatgaattctttccttttttccttcaatttttaacatctgggattataacagttaagtatcatgtgataggataggatcagtttgatwaaaataacagattagaaaggtctgctttggtggaatagtacttctgtcttttgactgttaaggctgtttttaagaccatctctttttcataattcagagcttatgtgtattgagttctgagcaggggcagtttttctgttacacgtgtcgtttcttcctcagccttcctctctcctcctcagcctctgtgtttttatcctcttctgccctgttcttcaccccctttttgcttttcataaacatcttattctcatctctaatctatactctagcagaaaagagtaggacaagtatggcctctgatactctcctctctttgcttgtcactttctgcagtccagttgttgtcacccaggacttrgggactgatgtgggcttcttgctcatccttcgtctagatcaccactgtccagtggaaacataacctgagccacttgtccaattttatattttctagtaactacattttaaaaattgaaaagaaacaggtagatcaaagtttcaatttcccaaaaagtttccatttctaaactcttatgcacctaataacacagctgcacactatgtaaattattaatgagctgctttatattctgcttttcacagtaaattcactccctgcccccacaaatgaacccacatgctacaaaacatagatatgacaaaaagaaataagtgctttcctactcactttattctcatctattgtagacatgttatatatactaactaatgtaatgttcaccacagccctcagtgtttggtaccattgtcatccccattttataaaggagggtaytgaggaacagaggttaagaagccatagggggcagagctgggttcagactcaggcagtctggcctagaggtggtaaatgaggctgtcgtatccatgtctttgtggtctgtagtgcattcccagcctgccccttggaacagctactggtgaaattggcgagggtgatcttaggggcctgagagatggctccatcctgtcaggtgagtgggctcctgggcagtgccgtcatcacttccctggagctccacagcagcctcttaactggtcctgcttcgtgagaggacttccccatctccagtccagcctcgagagaggtctccaaaatccaattccactttaaaccacctcaccactggttgctcccttttattcttagagtaaaattgcagccccctgtggcatggactgcttgcttttctagcgtctcagggtgctgtgccctcctgggtagaccctttaggcacactgcacttggcgttctttaggcacgctgcacttgacattctgccatccgtccccactgtccctgctcccgaggcacctgcctctcccatcccattccagttcctattcaggcctgggcagaaacgttctttcctctgggaaccctttcctaagacacacattgtattagtccgttttcacactgctgataaagagataccccagactgggcaatttacaaaagaaagaggtttaattggacttacagttccacgtggctggggaaggtctcacaatcatggtggagggcaaaaggcacttcttgcatggtggaggcaagagagaaggaagaagaagcaaaagcagaaacccctgataaacccatcagatctcatgagacttattcactatcatgagaataacatgggaaagaccggcccccatgattcaattacctcccccgggtccctcccacaacatgtgggaattctgggagayacaattcaagttgagatttgggtggagacagagccaaatcatagcattcctcccctggcccctccaaatctcatgtcctctcatttcaaaaccaatcgtgccttcycaacactcacccaaagtcttagctcatttcagcattaacccaaaagtccaccgaccaaagtctcatctgagacaagccaagtcccttctgcctatgggcctataaaatcaaaagcaagttagatacaataggggtacaggcattgggatagccattccaaatgggagaaattggccaaaacaaaggggctacaggcaccatgcaagtccgaaatccagtggagcagtcaatttttttttttttttttttgagacagagtctcttctccgttgcacaggctggagtgcaatggcgtgcgatctcagctcactgcaacctccgcctcctgggttcaagtgattctcctgcctcagtctcccaagtagctgggattacaggtgtgtgccaccacatccggctaattttttttgtatttttagtagagatggggtttcaccatgttggccaggctggtcttgaaytcctgacctcaagtgatccacctcggcctcccaaagtgctaggattacaggtgtgagctactacacctggcccaaatcttaaagttccaaaatgatctcctttgactccatgtctctcatccaggtcatgctgatacaagaggtaagtttccatggtcttgggcagctctgcccctgtggctttgcaggttacgccctccctcctagccactttcatgggctggtgttgagtgtctacagcttttccaggcacacggtacaagctgtcagtggatctaccattctggggtctggaggacggtggccctcttctcacagctccactaggtagtgccccagtagggactctgtgtggctgctctgaccccacatttcccttctgcactgccctaacagaggttctccatgaggtccccgcccctgcagcaaacttttgcctgggcatccaggtgtttccatacatcttctgaaatctaggcagaggttcccaaacctcagttcttgactaggctgccaaggcttggggcttccaccctctgaagccacagcccaagctgtacattggcccctttcagccacggctggagtggctgggacacagggcactaagtccctaggctgcacacagcatggggactctgggcctagcccatgaaaccactttttcctcctgggcctccaggcctgtgatgggagggactgctgtgaaggtctctcacattgcctggagacattttccccagggtcttggggattaacattagtctccttgctacttatgcaaatttctgcagctggcttgaatttctccccagaaaatggggtttccttttctgtcacatnggctgcaaattttctcaacttttatgctctgttccccttttaaaactgaatgcctttaacagtacccamgtcacctcttgactgctttcctgcttagaaatttcttccaccagataccctaaatcatctctctcaacttcaaagttccacacatttctacggcaggggcaaaatgctgccagtctctttgctaaaacataaaagagtcacctttgcttcagttcccaacaagttcctcatctccatctgagaccacctcaacctggwtwtttattgtccatgctactatcagcattttgggcaaagtcattcaacaagcctccagaaaattccaaactttcccacattttcctttctttttctgagcccttcaaactgttccaatctctgcctgttacacagttttaaagttgcttccagattttcaggtatcttttcagctacgccccatctactggtaccaatttactgtattagtccattttcacactgctgataaagacatacccaagactgggcaatttatacaagaaagaggtttaattggatttacagttccacatgtctggggaaggtctcacaatcatggtagagggcaaaaggcacttcttacatggcagcagcaagagagaatgaggaagcagcaaaagcagaaacccctgataaatgcatcagatctcrtgagacttattcagtatgagaatagcacaggaaagaccagcccccgtgattcaattacctcccctgggtccctcccacaacacgtgggaattctgggagatacaattcaagttgagatttgggtggggacagagccaaaccatatcacacatacaccccaaatctgaaacatcatctgacactctgcccgcatgtccaacatagataagttaaaatagacctacttgtctrttttttaaaatgagattatgagagtttttttttttctttttagacagattcttggtctgtcacccaggctggagtgcagtggcaccatcttggctcactgcaacctcagcctcccaggagcaactggttctcctgtctcagcctccygagtagctgggactacaggtgcacgccaccaagcccagctaatttttgtatttttagtagagacagggttttgccatgttggtcaggctggtcttgaactcctgacctaaggtgatccacccacctcagcctcccaaagtgctgggattacaggcatgagccaccatgcccagcctatgagagctttttsaaggagggacagtgcgtgtgtttcttgttgctatctccccaggcacatactcctatttgatcaaaaatgggttgtataattaaaaactgttatgtctgttggggagcctgcccaaatgctggtttcccagaatttcagagccaacagtaaaagagatgtgagtggggtgtaaaagaaaattatatgttttagttagacctgaatatatgttgttggttttagaaatggaaatgtaacttgttctgagttttaagcagcccaaacaaaatctccttttgtctcctgtacaattcctccctctccttccaaccctaaattgccaggtcctgccaaactccgggttgtcactgtcccagtcactgtccctccagttccttttctagggtcattattttctgatttggggctttctatgactcctctggttcttctgttcctataagacatacaggattactgaataccatgggttattggaaaaaactgcctagcaaattccctatcttcccttcccatccacctggacagctgttccctgaagaatatttctaagatcctatttggtgatatcacttttatagtccaaaaccttaagaactttcaccttatgctttctgcggcagtgggatcttcattgttttagaaattgcccacaaactttcccatcatctgataccctgtgttccccattctgctcaagtttagtaaaaggcccatatgttggagcctttgggtactgggtcccagaattgctttttgttaactgtcagttctgctgactttcactttctcctgttaagtattatttattcagcccaactacttgtatttcctttgggttaagagggaaatgttccattaaacatttagcttctagattttgccttatttggggtattcatggggttgccacagagttgttctctcatagcagattctgcgtgtataatgtgctgtcacacaggcccaccacaggaaagctattatgtaaaagcttgatgggaccccagggggaggggcagttctaggggcaatttcttcagtttacccctagtgtcatgtcttgctccctctggcctctttctctttgagggacacccctrccttcaccattaaatcattttgagaaacagtaacatttgaagccttcttgcataccttctcccctgcgactcccctctttagccacctgaatttgttacacaggatgggtcttggctggcccagtgctataataatagcccctcctggcttggrcaccaagtcctgtggcaccttcctcctccacatctcttggttggccaccttccggcctttctggctgtggctcagctcctccgtcacccctcactgcactgatctcagtggtcttttgattaccctgtcccttggcctctttcatgccagtatgagctcaccactctcctacttaagaaccacttagggccatcctcctttgtgtaacataagagagcctggttccttcctagctgcgtcttctgcccactgttccccaggcccctgtaatctggcccgagcacacacctctctctgtgtgtcttggcattaccttccttctgtctggaatgccgcctcctctctctgtcctgtctccagagtcttagtcattcttcgaggacccattcatacataacctcctcagggaggcctccctgatttcctctgatggagcctgtggtttcctgcccaggatgcacaaggtctactgtagctcctctatcacagcgttatttggtatttcgagtatttgggcattttcagttttcctagctggattattcatttaaagaggaaagcggctgtgtcttatttatttttatattcccagtgcttggtgtatggaagaagcttatgaaatttttatttaaaggattgttaggtaaacaaagaaaattagacaaccatacagaccagcccttctcaactgaggttctacaagagacttttgtcccaatactgtcaggcgaccattgtatgttatgaattaacttctctccttgcttctggaatgattctagttatagatcattcctgggagaattgagaaaaatctgttcttttttgtaggacttcattcccgagtggaatgcaccttgaatgaggctggtgtagatagcatgacccccgtcatgatagtatatctatgcaaagagcagaggctgacagaatacagaccagaatgttaacagtgggtatcactgggttgtaagataacagtgatttttaaatgttctgttcttatattattttctgaaatttctacttgtgtcctaacagggtttttaaaatatttcttgggtaaggcaaatcagagtttctaaacctggtcatcagttgagagtagagttcttgtttttaaatgtagctgcctacattgtgccacagtgagctgggaatcaccaagctgagccrtgcagcgttgcccttggaaaatcaggcattggtgtgaggatggctccagctgttagctctctggacctgggtgtctcttcttgctgccactggacactttgtgaattgaagggctaagtttctagcagacatggaagcaccaatagagaaattaccatactcccaactcatatatactgtattctcaaaagaaaatctaaaggttatttttttttcttaatagctaagagtgaacataaatggggaaattaagtctgataggagtcttacatgttaatttttgttcatcacctactgttttatccagccctagtttcattcctgaggtttgaatttgtttgacctcacagagtcatatccttctcctgcaagaatctactggtggatactgaaacaagtagatttgatgataaacaggatatttacttagtctgtaagtatctcccatcaagtcacttattaattacgaagggaaaatagtcaactcracagtggaagaacctggcatctaccaccttaacccttaatcaaatcaacatcacatgcctcctgagaagtgctttgagaagcgcacaggatcacttctgtgatattccagccaaaaatgcataagttgaatctaatcatgaagaaacattagacaaactccagttgagggactttctacaaaataattggctgtacttttcaaaaatgccaaggtcatgaaagataaaggaacggtttcagattaaagaaggctaaaggaacataacagtgaatgccaaatgatcctggactggaccctgtaacagaaaataagaaaatgacatatattcttgctatttttgttctaaggccatcactgggactaatggagaaatttatataaggtatttaggtaacagtactgaatcagtgttaatttcctaattatcattatgctgtggttgtttaaaggggatgtctttgtttttaggaaatactaaaatatttaggggtaggtgtcatcatgtcttcaagtttcaaatggtccaataaatatgcacacagtataccaatggaatggcagcacaaatgtggtaaaatggtaacaactggggagtctggttaaagggcagatggaaattctttatgctgtttttgcaactttaagtttgaaattatttcaagataaagtttaaaaactgcagcctccaggtcttgggtgctgtggccagtctagcatcagaagccaccatagggcttttcagtgtctgccctttccgtggtcattatagaagtcacgcccacagcactgagctttcttgcagaatttgttttgtctcctctggtaccatcaggaaacagtgtagagggtcgggcgtggtggctcacacctcccagcactttgggaggctgaggtgggcagatcacttgaggtcaggagttcaagaccagcctggccaacaaggtgaaaccccgtctctactaaaaatacaaaaattagctgggtgcagtggcacgcacctataatcccagctactctggaggctgaggcaggagaatcccttgaaacctgggaggcggaggttgcggcgccgagatcatgccacctcactgcagcctgggcaacagagtgagactccgtctcaaaaaaaaaaaaaaaaaaaaggaaaaagaaaaagaaaagaaaacagggtggaggaacacttaacagtgtggctttgctgaacctgaaggttccttccagcccccaaccacccattgccactgctattttaggggactgcagtccttgtagctgtcctcaggcatctggtcaaccaactctgacccatacatttacctggtttagactagccctacagctgcccctgaaagaggcttcccaggcagaatataagttttaaaatatatttaaacacatttgagggtgtttatgcccagagatcagtgcacttcaccagggtgctttggtggaccycttggagggtgcattttacccaaatcctcagcatttgccagttaaagatgggtctctccactaccttgacagaactcaggttgtatgttttggcagaaatcacgaatttattatgtcctgcatgatgaagagggtccttcctcagccccacttttaaaacctagtttagggcaaccttctacgcttctggctggaacctctcctgtggggaggggagcaggcggcaggtcttggaatcagaggaggatctctgaggtgctgcctgtaatcgctttgtgggtaggtctgcttataagaattcgcaaagaggagttcctctgaaactccctagccccgggaaacagaaagaagaacagtgctggggcttctcttcctgttcctgtcttttccttccagttcccccttcccagaatttcctgtctctcaacctccactctgttttctccgccccagtgttcccccactctctttcatttttattgtcttaaatccacttctcccacttattccagctttctggttttctcccctagatggctataacatattagcatcaattgagtaagctaagcttcatgtttcttgttcttcctttgaaatgtagatgagtgagaatcgtaacattttattggaggaaggagccatagaaatgttgtcacccaaccctgctttctacagattaccaaacatyctcaaagagattgagtgatttggctgttatcaaatagccaaacagttgagtatttcatctctttgctcttctctttaaaaaaaaaaaaaaaaaaaaaaatcaggcaagtgtggtaactcacgcctgcaaattccagtactttgggaggctgaggtgggaggattgcttggggccaggggtttgagaccagcctgggcaataaagcttagactctatctctacaaaaaaattaaaaatgtagccgggtgtggtggtatacacctatcgtcctagctacgggaggctgaggcagaaggatcacttgagcctaggagttcgaggttacactgagctgtgatcacgccactgcactccagcctggstgacagagcgagaccttgtctcaaaaacaacaacaaaaagatccgtttgccattttcttccatggtgggggggagacagtcattttatattgttcccctagcctcccctcaacaaacacatatggtgggtcttgtttgaaaaagtatctcaatccctgttttccatctgcctggtgccatctggacattgaataaatgcccaatgattatgatacttggacacctggaaggtctggtcttcacagtggtctcttgttaggaccgtggtgaatttgggttaactttgtgtggggatctagttgcaggccactgatcattcattcktctgttcattcactctgcaggtgcttgttaaatgccttttatatgcgaggtactttttaggttcctggattacagcagcgaacaaaatggacacagtccctaagctgggagtcttatattttagtagggagagcagagaataggcaaatatgtatcagtggcaatgaatgctatgaagtaaagcaggaaagtgagggggtggaagtcgtgttttacagagggtggtcaaggaaggcaacttttgaatgaaaaccagaacggagatggtggggagggagccatccagagaggcagcagaggaagggcaagtcgagcacgaggcccccttggttgacatggagtgaggaggagagtgtgagataggtggaagcggaactgggctctgagagtaactgccctcttgacatctttacctcttcagtaaagtcttggagaaatcccatcgtgcgtgctgggaacattatagttttagagaatgttcatatagtccaagggctcagaattaattgccttaacacttttacatttataaaaagcaggcaattgaatgacagtaatgatgtgttctcaacactagaggaatagtagatttgaagtagattaaaaagcacgagaatcactgaagtgcttgcatcttggttgatggtcaaaattagtacagtattgattgtgcgttcacacagcaacattttaatttttttcattgcagaaggtaggtcctcataactctgctcagtttgtaggagaatctgaaaatatgtaggctaaaaatctgttgttaattacacggctttcctccagctgtgagaaacttgctggtgggcaggatttctcaaagtgctgcacccacataacactggggaacttggttaacatgcacagtcagcgtcctcacctggacctaccaccaggggggacattctggggatgaagtgtgggaatctgtatgctttgcagcctcttccagtggttgtttttttgttttgtttttttgttttctcctgatgctccagctaaggtccctcctggggcgtcaggcctggttcttagctgtttgtgggatttaccgacctggcagcccacaggcgtttgggactctgcaaggccaagctgaacttagtgtctccatggcattttctcctcttcatggcctctctctacagagggctcctctttcctccctgtgacctgagtcatcctctcccttgactctcgcctcatctgatccatcccaggtcctgtccgtgctgagcctgtggtgcccagagtgctgtggtagcccctcagtagcttccctcctcccttgtccccactgctgccccatgattttctccaagtttcatgtccccttcctgaataaaatcctccagggcccttcatcatccatgatctttttgacctttaccttaatctaccttgaccttgctaacccaacttgactcctgatttgctgagggagttcccaggatgaagagagtaggcctgggcagagctgagcaaagccatggtctcagcccagagctcgggaacttgaattgctctcacggtggtcccatctccaggcgagggggccagcctttaacatgtcagtcattcagtgtctggggatggaaggcagatgtgcagagaaggggacacccgtgttctagtagcagccaacattcagtggccacagcagggccacaacgctgctctcgtcctgcctgcaccccccagccccaccttggggcaggacttgcttggccccttcattctgtctgcccacagcacaccatgtcttgcctcctctcggccgccccatgccgctgctgtagttgtagctgttgcatgtggtcgctaggcggctttaacctgcatgcatcccaacactgtcttcttggctgaggtaaggcttcctgccttgtcttccgttctcctttgccaagtggaattcttcctctcaaacacaaaactccaacggtgacttgaatggctgttytctcccttccccacggatggtaggtccctgtctaggtgcacgggtaccaggtgcacagatggtaggtaccagtctaggtgcacgggagagggcagttcatttgttctgcacagtgggtggcttggggcctacttcagtcagacctgctgcagaagttccagccggccccgtgcacgttcccaagtacctcctggacatttttttttttttttgagatggagcttttctctctgttgcccaggctgcagtgcagtggcacaatctcggctcactgcaacctccacctcctgggttcaagcgattcttctgcctcagcctcccaagtagctgggattacaagcgtgcgccaccatgcccagctaatttttgtatttttagtagagatggggtttcaccatgttggccaggctgatctcgaactcctgacctcaggtgatccgcctgcctcgcctcgtggacagtttcatgtggtaatttatcatctcaaattcatcatctcccctcaaggacaacaattgacttccattcctatttctttctctgattgggaccgaggtttgtccctgttctgcttctgttcatcaccactcttgcttttgtttgtcttctgttcgtcatcagtcttgcctttgttctggctcagagacctctgtccccattccttccccgtccccctcaccagggtaggcctcgggctcccctcctgcctggacaccacagtagggagggcccaggatcctgccttgtcgcccacccagcatgcagcagactaggmttgtctcctgctgtgctgggaagtccttctgctcttggaatcctcccaccccacagagtgtgctctgctggccatattagcctataagctgcacctgcttgccttcccacacagtccactgcagctatgttggtttattctctgctttcccaacttcagatttttgtttataaccgtctgtgccctggtgtgacttcactattttagaaagcagccccctcccgacattacaaataccctcctcttgttccaggtcctccccattctgaccaccctgctgctggaaaagtatgggtgtggaggtgcatagatgtgggctggagttctcagctctgtgtctacccatgtgtgtcctctggcaggttaaatgcagacagcaatccagtgatataagtttttttaggttcactagatcatatgtcggcttatccctctcaataaatatcagtgccttactcatgcaccagtaattatctgtatagttaatttggcaattcatcatgtactgctttatggcatttattctactcttacattaaatggttaattcttaattttgaagaagttaaatgtcttacaaattgactgaaagcccaaatttgcccttatatttcttcattagggccttaagaattattgaaaatacagaaataagttctagtgtttgatagcatagtagggtgcctatagtaaacagtaatttgttgtgtaattcaaagtaactagaagagaagatttgaaatattcccaacacaaagaaatgataaatgagccttggcagcatagtgagacctcgtctctactaaaaattaaaaaaatcagctgggtatggtggtgcacacctatagttccagctacttggagggctaaggtgggaaaattgcttgagccgggaggtcaaggctgcggtgagccatgattgcaccactgcactctagcctgggcaaaagagtaagaccttgtctcaaaaaaaaaaaaaaaaagataaatggttgaggtgatggatatcctaattaccctgatttgatcattgtaaattgtatgcatgtatccaaatatcacatgtattccataaacatgtaggattccagcactttgggcggccaaggcgggcggatcacctgaggtcaggagyttgagaccatggtgaaaccctgtctctactgaaaatacaaaaattagctgggcatggtggcgggcacctgtaatcccagctacgtgggaggtttaggcaagagaatcacttgaacccaggaggcagaggttgtagtgagccaagatggtgccattgcacttcagcccgggcaacaagagcgaaactccgtctcaaaaaaaaaaaaaaagtgtacgattatttatcattttaaaaagcacacaaaaaagaattatttcttcatatgggctctttaagaagaatctgttacattttaatatgtgggtagaraaatataattttgaaagtcaggccttttctgcataaaggtggttgctgaagccatgatrcggaggctgttcctggcagcctgagtgagaagagtatcaaattgttaagccctggggatcctaactcttaggagatgaaaaaggagaacgaggagggagccacaggacagaagaagacaggccagccttgtgatggcctgccaacaaaagccttggaggaaggcctataaccaccatcgcctccgaaaccctcataagaaactgcgtatttattcagtaaacagatatggatgccctttatatgcctcttcccttcctaggcactgtgaagacagtggtgtgcaaagcagagacccctgcttgcatggaatctgcattctagtgggggagacaagacaaacgtgtaattcaaaagtaaaaaacttatgaagaatcacatgtctcatgattagtgttataaagaaaaaagaaagcatgcatacaggaatatccacataagcaattttggtaagtagggcatgtctgtagttttattattctaacacaagcattcacattatgtaagttaattgaattaaggagagggtctcgtttgcttaactgaacggaggctatgtgtgcgtgtgtgtgcgcgctcaccattggctgggtggcttcagtgtggggagctatttgtgacaccctgtgtctctagctgaagctgcagtgccagaacagatcaggtgagaaagtgtgagccttctgaagggaggggcctctgtcatcctttgtccgttgggattcactcaccatctctttggaagcccagtgaggcttccacagaaagggagcaacccagttcctgcccgctgaggcaaactggacttgctkagtgctgacatcctttattttkcacctccataaatctgtttttttccagttcagcaaacgtgtggtcctttcttagtgaagttcctcatgatttgtttctgctttttaagcctaaatgcttaattttggggatatttttgtcccatactaaagagatgatcaagggatcctaaaaatattttatttgggtgattttcaaatgtcttttcatagcttaaatttcaatcgtagcttaaggatttcctccctaagtgaaaatagtttcagtttttcaaaaatagaactggtaatgtatggaattcaggtagtaaaaaaaaaaaaaggaatgcaaaaagaaataaahtcacaattgcaccaccaggccatgcatggtggctcacgcccwtaaccccaacactttgggaggtgaggcgggaggatcgcttgaggccaggagtttgggaccagcctgggcaacagagagagaccccatctctacaaataaacagatagctgggtgcaatggcacatgcctatrgttccagctactgagaagaccaaagtgggagtatcgcttgagcccaggagtttgaaggtgcagtgagttatgatcacaccactgcactgttgccttggcaacagagcaagaccctatctctaaaaaaacaaagacaaaacaattgtactaactgttgatgacaggtgtactttcttccagatgcctctacgcctataattacctatggctacgtgaacactcttcccctgcagtctgatcgttttttgttggttaaaagtataattgcyggctgggtgcggtggctcacgcctgtaatcccagcacttcgggaggctgagacgggtggatcacctgaggtcaggagtttgagaccagcctggccaacatgatgaaaccttgtctgtactaaaaatacaaaaattagccaggtgtggtggcgcatgcctgtagtcccagctactcgggaggctgaggcaggasaattgcttgaacccgggaggcagaggttgcagtgagccaagatcacgccactgcactccagcctgggcgacagagtgagactccatctcaaaaaaaaaaaaaaagtttaattgccagctgggcatgatggctcacaactgtaatcccagcactttgggaggccaaggctsgtgggtggcttgagcccaggagttagagaccagcctgggcaacatggcaaaaccccgtctatacaaaaaaaaaaaaaaaatacaaaaattaactcggcatggtggtgtgtgcctgtagtcccagctactcaggaggctgaggtgggaagayggcctgagcctaggaggttgaggccgcagtgagctgtgatcacaccactgtactccagccagggtgacagagcaagatcccatctcaaaccaaaaaacaaaagtataattgctattgaaatttatgacacagttattctagcaattaacaaagcatgcccctgattcaatgttcatgtaatccaaccttcaactgccaccttttcaccgaacagaaaatcgcaaacaaaagaaatgagtgaaaacagtccagatggtgtcaaggtgatcatgactttcagctgataagccctggcttctccaagggatcatggagaggccactctgcygtttgtctgttgttcccagcttggcccttctcttgtgatgttgagggacgtggaatccacatggtcccttgcaaatcagaagaagtaatgcctgctgagctgaagtagagggatttgatgaaacttcttgggaagtcaaactcttatactgtggaggctaaagcaatgccatcttggatgctaatctgccatgttgacttctgactaaccccagtcccaggaaggcttctaaggtttctactttcatatacttactgtaaatcttgcccttaggtcaaaacagtcttgccgttataccataagtcctgcccttcggcaaattcttgcattttcctgagggttggatgtcaatgtcctatacattccttcagtatggtatttaagacctgggtgtatacaccctcagtctggggagtaatagcatgggcaaccattatcctgtctcgccgccacccaggacatggcttctgttcgtaagtccccatcacacgtttctttctgagaaactggattcrtcagcctcttccttggcctttgggggtgggtttgcatatgcctgcccaccacagagcacatacctttaatagatatatcccaggaggtaactacatgtgtagatgcatagatttttataaaactgcctttttcttatatttttcagtgtcaataaatgtgaagtactgagtactttaagctagtgcttctcaaactttaatatgcatatgaatgtcccaggatctcattaaaatgctgagtcagcaagactggggcgggcctgagactctgcatttctaacccacttccaggttacactgatgctgtcagtcagagaccctgctgtgtagcaagatcttaaggactgtagagtattcatgtagtttgtgctgtaatttaccaacaaatttcctgctgttggacatttttgatgtttcatttattattatttttttgtagaggcagggtctcactgtgttgcccaggctggtctcaaactcctggcctcaagtgatcatcccatcccagtctcccaaaggtgtgagctaccacacccagccattttagatgtttcaatagagtttatgctttattcttgccattataatttctgttaacattcagttttagttttactcttaatcagtattgagaaaatgcttttcttggaagtttatcttgtttgatgacaggctacaaacatgtaatgcacatttcattccattcgagatgtttcttaaggggctgctgtgtgccaatctctgtcctaggttttagggatacaaaggtgaacagagttctggctctgcagctcattcctccaggagtctgcaaaagaaaattcagttcattgtggtaaacagagatagggacgtgcccagggatggatgtggtggtgaaaaatgacctcagagataaggaaagagatgcttgagctgggtttaaggatgaaaagtagctcagcaggcagattattgggtgggattccagattgtgagcacatcctgtgcaaaggcactgaagtaacaatttggcacatccaggtttctaacagtacttctttgtgcagtgtgatagacaggtttgtcacatggagtcacagaatctgaaataagctgggaaccagtaggcagatatgtatttttgaaagacggctttgaggcgataaaattgagatcagggcattcgaggtaagtgacttctattaaaggcatgtagtgaacaggaaaaattcaggaggtattattggcaggccctggggattgactggggttgagaatgaaagtctggttgacctgcaggttttcatcttatggctgaacagatggttcagataccaaagaatgaaaggaatagaagaaaatgccaggttccatttaggaatgttgcttgaggtgaagatagcaaacaagacattaggtatacaggtctgggcttaggtgagaggtccacattagagagatggatttggtcttcagggagccattgtcacccctagtctgaagcttgtacttgtcacaaagttactggaagtgccacagcatctgctgcctaaaaacccaagaatccgaatgcacacgactgctgcaggagtcacatgtagacaccttcccttgcctgctactactgctatccaaagcttcaccaagtcaggggaaaagaaagattgcctcccagtctttcaccagcacatcctaggatcacaactttacgagaagccagctggtaagagagagttcggaaaatatttacaggcttatagtctgacgggcagagtagaacaagagccagagcactgtctggctcagcaacagagcacctggaggcggaagccctggagtctttctcatactcttaccacagtcatctttgttctctggaggtccactttggtgtgaactgagtatcattccagtcatctcagaagtttccattttaaatatgcacaggctacaggtagcctgctgattcccaccacttggctgactgtacatgaagtaaccacagaattgtggtatttgaaaaccttccaggatctcagttgttctaacttctcatttaataattcagcagattcttcagcaaaggtttattaataaggccctcaacacttattgaaactattttgatagaattatacataatgataaaaactcttgctacacagaattagaattaaggagttaaggaagagattgtttacagtagcagaaaaaaaaaacttgaatgcctgtttagtttaagataaacagatttttttcaaagaagatggtaaaaccctaacgggaaaaatgaagtgaataatgaatgagatataacttcttccatccaactaaaaactatagtgaagacattatttcttaaattaatatatgcatttattataatagtaactagtgcctatattagttaagatataattttgcctttaattaaccattccttaaacaagrcagaagcttattcctctatcatagaccagtccagaagtagagtggcagctctctgccctatgggattgtcccaggggccccagctccttctcttgttgttccaccatccttgagtaatgtcctctctgtgtggtccagagtggcagatcatggtccatatttcagtcaggaggcagaggggatacaggagaagccagagtatgccaagggaagcaccttgagaattgcacaggatgcttctgctcatatcccattggctaaaacttagtcttgagtcctagctccaagggagactgggaaatgtagtcttcattctgggaggtactatgccccactaaaaatccagagctgtattaagttgagttaggggaaagcgaatatgggggagacggaccaatccctactacagtactattggaatattatttagaacttgaaaattgctaataaaattatttcaaaagaataaataggcaggcacacaacatattttttaagaaaagtgtttttaaattgccatattctctctttttytytttttttttttgatgtaacacttctgcttttaatgtaactttctttttaaacttttttattatataaattttaaccatacacagaagtggggagaattgtgtagtgagccctagacccatctcccaggtttagtaagttatcagcttaaagttagttttatctattctccctggccctccacttatccccttcctgagttcttgaagcagatctcatttttgctatttgatctgtagatatttctgtatgtagctctaaaaggtaaaaggtcctttttwaaaaaaataaactttaaagtttaggataattgtattcacatgcggttgtaaaacataatctggagagattttgtgtatgctttactcattttcccccatgatagcatcctgcaaaactatagtaccatatcacagctggaatctgacatggatacagtcaagatgtagaacatctccatcctcacaagagtccttcgtgttgcccttttatagccatatctacctatctacctccccttccacaacccctgacactcactagtctgttctccctttctataattttgtcattttaagaatgttaaaaatcagccgggtgcagtggctcatgcatgtaatcccagcactttgggaggccgaggcaggtgaatcacgaggtcaggagttcgacaccagcctgactaacagggtgaaaccctgtctctactaaaaatacaaaaattagcctggcatggtggcatgcgcctgtaatcccagccactcaggaggctaaggcaggacagtcactcgaacccaggaggcagaggttgcagtgagctgagatcacgccactgcactccagcctgggcaacagagcaagactccgtctcagaaaaaaaaaaaaaagaatgttgagaatcatacagtatgtaacattttggtatcagctcagcatagttccctctagattcacccactttgttgcatgtaacaacagttcattcttctttattgccagttactattccatggtatggatgcaacatataaaggctctttgaaaaccataatccatcctcctaactctctcctctctttttccccactgccctcttcgcctctcttcacagcaatgccaagtgagtacacctatgtgaaactgagaagtgattgctcgaggccttccctgcaatggtacacccgagctcaaagcaagatgagaaggcccagcttgttattaaaagacatcctcaagtaagtaccgcccctgggactgtagatccccckgctttgggtcaactgtgtagaactaggagaaaaattcartgagagccctcaagatggctaatgttggagaggcatgcttggtcaaaggatgcctcagacattcaaaggcacgtctgagtaaagactgagtgcacagccggagtgagcctgtacagctggctgtatttggtaagtgcacagtgcccagtagctgctcaggctctctaccttggcctggatgcctgggagagcagctctcaccgtgcactgctcttcatgcccttatttaacaaaagagggcttttcccttagctattgtaagttaatctaaaatatggttaattaaatttccctgaaggcccttgaatactgttaaatatcgaatactaaaaatgatgacaggtgtttgagccaggtcacccttatatcctaataagtgatagaattaatcaaggaggaacttggcaggtgtctttttttacatatataccagtcaaacctagttgaaaattgcccttttttcatgtctaaacatagaaatccaaccttgcaatctagtcttctgtctcactttactgacttaggaagtgtaggggaaaaggaaatttataagaataaggcttatgttacattcagcctcccttgagtcaccaaccaatatttattgaggcccaccacgttcatgacgtcatgctgggcgccagccacaaggcagcaggggagatagacckgcgccctgtgctgcttaggctgtgggtgaggtggactcgctccaggaattaaggcacagtctgatatgwgctacagacactgggcttgccttcacacccttttcttttattttttttttaaatcaaaataagggaagtgtatgcactgaatgtaacaccttttctggggctgaagagaagaataggtaatattaggttttcaagattgaaaattcaaaaggtattaaagagtctcagtgaaacaccttctcatccctgctccccatttaccctccatatttaaagataaccagtgtcaccggtttcttgtgtatatgagaaatattttgtgtgtgtgtgctctgccatgccccstgcccaaacccacttttacacaaattgatagcatcctgttcacttatcattatacataatcccaacttgtccaagttgtcatgggaagcctgttttaaatgagaattttaaagtttttaaaacactcccagcaacacttcattgtattctcatcctcaaatattaagaaatattttgcatctattatgtataatatattatgctagatgcaatttttttgaaaaaaaaactgcccctttatttagaaaatggattactttctctttatttcttgcatttgttttttcaagaacagaattgtttaaagcagtggttcttaaattttggttgaaactttttagcttgcggtttgtgtcactggagaacttagtaaaaatgagatttctaaaactaagactagactcagctcttttctccaagtygtgtgtgtgtgtgtgtgtgtgtattaaactatataatagtgtgaatttatcagatctgtaaaaaatattttttaggtcatcttaagggtaactaatggtcctgtctcatttcccagtcggcctcacttccgggtagaattctttagacgtactgtgaataaactgtttcttttcttttcttttttttttttttttttttaaggactgacagaattttcaggtcacaaaagattgaagccgagattctgtagttcaagtctattacttgattttaagttcaataattgacattgtgattcagattttgttacagtgctcttgcaaaaaaagttttttctgtgtttgcttataacaaagacagtcataaatgactagtttatcttgtcaggaaaataggaaatggccccttcctttcaccccaatgtcaacttaaagattgtagttttatgctgcatagcaggcagactcatttaggattccgttttcagtttcacattgcatctcatgattctcacatgactacatcataatacctaattgatttttttccagatgtacattgcttgtgtttggagtgtggatcctttatatcctcaagttaaattatactactgaagaatgtgacatgaaaaaaatgcattatgtggaccctgaccrtgtaaaggttagatatcccattggtgtggtttaaatgaaaacattgccaagcatatgctcaaactataatatcattagtctactgtgtgacaaatatatgttaataaaagtttgaactcagaggggaaagcacttaatctcagcactccaaaaccaaagacaaccttcttctaaaaacccaccactaactactccacagtatccttctcccatttactgcagctggggtgtgggatgaggtgggctcaacccaacaggctctagggctcctctcctggaattaatttgccctgatgctataragtaaacaacaaagaaattctttcttttttcttttctccctttttttttttttgagtcagggtctcgctctgcacccagggttgagtgcagtggcaagaacacggccacctcagccttctgagtagctgggaccacaggtgtgcaccaccatgcctgactaatttttttattttttgtggagatggggtcttgccatgttgcccaggctgatcttgaactcctaggctcaagctatcctcccgccttggcctcccaaaggtcggggattacagacatgagccaccatgcctggccagaaattctcttagtatcatctgtccttcctgtgttttatttttaattttaatgaattcacattgcattgcaagatttttctttcagcttacatttatgtttccaaatcaagtgacatatcaaatgcttatgtcactgattattttagtggctggattatctgataacatttagcccaggatggaggaagagatgattttaaataaagtagcatgagagggatgataactgacatgtatggatgctttatatatattatctcctttagtcattgtgactgggagatatcccagtatcatctccatcttacagatgatggcttgaaaggttgagctgctcacccaagttcacgtctagtttagctagtttataatgtggtttagtgctcccgtgtgccaggaactgttctaaaagtgtattagtaatattagctcatttaactttcatcacattcctggggatgtaggtgctacaatcatccccatctcacaggcagggaaactgaggagcagggagatttagtaacctgcccagggtcaccwgcggcagtacgtrgtgaagcccggcttgaattcagtggtgtggtttcagagtctgagctcctgaccactctgctctctgcctggttagggagtgtccacagagaagcccaaagttaaaagcagcatggtgcagagaggaaagagcttaaatgttttacccaattcaaatctaactgccacttagtaatggtgaaaccctaggcaggtgacttgattgttttgagtcccagttttctcaactgtgaaatgtagaagttgagtaagagaatatatacaaaattcctttcttgatcctaatttttattcatacgtttctactttaatttgtacatcctttgaagtgcctccaattttttttgtggtacagacaggtataaacaaataaatgaagagctcagttagcaaaggcacagcttggctcctgcaaaactattgagtctcagggtcttgctggtcgcagggccagccttcccagcataggtgtcctcaggtgtctgctggctcatgtcatttcatcagcattaacacatctgctttggtcgagtaggatgtgtccagtaccctctgctcaggcttccctttcttcctggactgtctggccttgcagacatacctcccccagtcctttgcaattccacggcgcttcacagctctcttggataaaggttttagacatcctgtctctgtttttgtcttctgagaaagtctttaaatgatggcacttggtatggcttactgatggactgggaactcttccctttgtttctctgctgccsttctccactttctctttgcatcctctttttcctgtccattaccatctgaccaactgtaaagtgattgttctaaagtctgggtcagctgaggagagaggtgcgctctcctgtacaagggccaagaatactattccacaagcacagggtggagaaggtgtgttttagtaataccctgggggaaatcaacttagtagttttcctgtccagccaggcacatctgtgtcaacctgtgccccggctgcctgtgatcattttgaacttaagccacgtggtctgcttgtctctgcagtggtcagtcaagtgctctggttgttaggctgttacttgttaaggctcccctaaggaatcctagtgatttctaagaatgaccagaggagaaactcaagatcacctccctgaggaatcatggaagggataggaacatctgtgtagccttaaggagagaagacctggtacagggcacatggcagtcagtgtcaatgagccagaggttcagaccgcagaaggatgggcctgcccaggtggccttaatggcagagctctgtatagggatggcagccaatctcaaaggagaaaggtttgacrgtcccaggcatccaaagatgggataaacagaccacctttgtggtgactctctggggatctttaagaaagtcaggggtctgaccgggtgtgatggcgcacacctgtaatcccagcaccttgggaggctgaggtgggcggatcatgaggtcaggagttcgagaccagcctggccaacatggtgaaaccccgtctctactaaaaatacagaaattagctgggcgtggtggcaggcacctgtaatcccagctactcaggaggctgaggcaggagaatcacttgaacccaagacagggaggttgcagtgagccaagactgtgccattgcactccagcctgggcgacaagagtgaaactctgtctcaaaaaaaagccaggggtcctgtaggtagaattcagacattagacagggaggggctcaggggcctttctgatcccttccaggtctgagattctgtggttctcagcaatttgccagtgcctgactggaagatggaggctggtttcgtaacctggggctttcaaagttctgaattctgggtggagttgtctcaaacggtaggctctcaaagaacacctgcatgcagcctaaccagtccccaactcagtgactttcagactgaacctcactgctacttccaagctcctctgaagcttgccacattccatcggtattatcctaattcatacgagcctctcatcctgccatctaaagtataagttacttgagagtagggactatgtctgtaaaaatacatagtacgtggcattctaaggaaaggtgtagtgagcgagggctgccctttagagtcacctgctcttcctgtttccctggttgtgtgtcttctcacctgccttcctgcatccagccatgccccactgtggccggagtagtcgtgttctacaatttgaatctaatatattgcttccctccttaaaactctttggtgcctctcctttaccttcaggaaaatacccagactccttagtctggcccagaagaccgttcatgacttggttcctactgatctctccagtctttttgtgccacctccattgtcccaactctatgtattttaggcacactcaacccctcacaggtccttgggtaaacctcttctcttctttccttttctcttttttttttttttttttgagacggagtctcactctgtctcccaggctggtgtgcagtggcatgatctcagctcactgcaacctccacctcctgggttcaagtgattctcctgtctcagcctcccgagtagctgggattacaggcatgtgccaccacacccagctaatttttgtatttttaatggagatggggttttgtcatgttggccaagctggtcttaaacccctgacctcgggtgatccacccgcctcaaactcccaaagtgctaggatgacaggcatgagccactgagcccagcttcttttcttttcagcagggcctcacgctgtcacccaggctgaagtgcagtggcccgatcattgctcactgcagcctcaacttcccaggctcaagcaatcctcccacctcagcctcctgagtagctgggactatagcatgcaccaccatacgtgcctawtttttttttttttttggtagaggcagggtcttaccgtgtttcccaggctagtcgcaaactcctggactcaagtgactcaagtgatcctcctgcctcagcctcccaaagtgctgggattatagacatgagccaccatgccctgcccttaaaacatttttattgagatataattaacacaccacatagttcacccatttaaagcatacagtacagccaggcatggtggctcctgtctataatcccaagctttttgggaggccgaggcaggaaggatcatttgaggccaggagtttgagaccagcctgggcaacataccaagacatcatctctattaaaaataaaaacattagccttgtgtggtgtctcacaactgtagtcttagctactccagagactaaggcagaaggatcacttgcgcccaggagtttgagattacagtgagctataatcatgccactgcactccagcccataaaacagaacagaacaagacactgagaaaaaaaaaagggatacagtgcagtgattttgtgcaatacactatggttttagtgatttacagaactgtgcaaccatcaccatgatctaagtttagaaggtttttagtatcccaaaaagaaactccatatccattcrtagtcactccctatttccccctccccacaaatcctaggcaaccagtaatctactttctgtctgtatagatttgcctattatggacatttcatgttattcatttcatggtctcctgtgactggattctttcacttaggataatgttttgaaggtacacccatgttgtagcatgtatcggtacttcattattatttctggataatacctcattgtatggatatacctcattttgtttatccattcatcagttagtggacatttgggttgtgtccacttttggctattatgaataatgctgctgtgaacatgtgtatgtaagtatttgtgtacctgttttcagttcttttatgtatatactaggaatatagttgctgggtcatatggtaactatgttttgctttttgaggaactgccaagctgttttccaaaatggttgcattattttacattcttgtaagcaaggtaccagagtttcagtttctccgcatctttatcaacatttgttattatctttccttttttactactgtcatcctgatagatgttaagtgatatctcattgtggttttgatttgctgatagctaatgatgctgagcatctttcccatgtgctctcattgaccgtatgtgtgttttctttggaggaatgcccattcagatcctttgcccatttttaattgggctatttgactttttattcttaaattgtaagagttctttctgtgttctggataccagtaccctatatctggtatgtgatttccaagtattttctccactctctaagttgtcttttcactttctttagggtatcatttttagcacaaaagtctttaattctgatgaaacccaatttacctatttttcctttggtcatttatgcttttggtgtcatatctaagaaactattgtttagtcccaagttttcttctagtatgtttataacatactacctcttacatttaggtctttgattcrttttgcattaatttttgtatatggtatattagtccattttcactactgataaagacatacctaagactgggcaatttacagaagaggtttaattgtagttacaactccacatggcaggggaagcctcacaatcatggcagaaggcaaggaggagcaagtcacgtcttacatgaatggcagcaggcaaaagagagaaactgtgcagggaaactcccatttttaaaaccatcagatctcatgagacccattcactaccacaagaacggcacaggaaagacctgcccccatgattcagtcatctaccactgggtccttcccacaacacatgggaattatgggagctaccagatgagatttgggtggggacaaagagtcaaaccatatcagtgtgaggtcagggtccaaggtcatccttttgcatgttgttctccagttgtcccaggaccatttgttgaaaagaactttcctctatttgctgcattctttctttctttgctgcctagagcctttccctgcccttcgcccttctgttactcgtattttaagtcaagtctcagctcagcggttaccccttctaagaggctatccctgatcgtccctctgtgtgtgtgagagagccccctcatgccttaatcctgatgtttatcattgtaggatttcagctgttcatcttccccacttgttttccaggccaggtcttgggagacaggggctgtgtgcttaacatcttacattacttaatatgcacttacatatattcaacttcagggggaaggggagatagtacttgaatcacagtgtaatcttccattacctgtgaactctagattgtacagaaaatccggttataacttgtaattctttgagtacatcagtaatgcaccttaggtttaatgtgaggaacaggactgatagttctcttcaacctaaacatccactggtagacagggaaaagcccagcacccgctccctgccccttctccctgaaccatggaatgtaagtcctttcattaggctactgggccaatttttagacctaagctcatggctggaccaatagtagccttcatagatgccaatgcccttccttgatgggcttcagtgaggactcctgaccaatcactgacgaggggggttgggaggacttctgatgggggagttggcctccctggtcctacacctacctgcctggagaaggagccaaagccacttaagcaaaactgagcagcagcccacagtgtccatctaccatgtcaccccagtgctgagcgatttctaaaaggttacttttttcaattatttaaaaaaaacaccaaaaattcaagtaatacggaaataagtaaaggagaaagtcccctgtaatttttcatagagaaagaggaaggaatggggggcagctgtgtaagtcaaacatgtttgtaaaactccgtgagtttgaaactagtaaaatagaaagtgaaagcctgctataattatggtggaattgagggtgtcttattgtgttactagagaatttttttaagtaggtttttaacattttgaccttgttaaaatgctccayttttcaaaacggtcctgacaggatatcctgcttccttccacgcagaagaggtggtttgtgcagaagtgcaggcctcagaatgctttgcacatgagaggaatggcaagagttgcctatcactgaggatttggggaggagggatcacaggatatgggactgaaaatgagacagggccagatagcaaaaggccttgaatgctacactaagcacgaagcagctccttaatttgtgcatcactgaagcaagaatagagtggaggacatggcccgtgtggtcctcgtgttctgagtggctatgacatggagttctgtgtgagctctccatgaagaaaatcccgtctccaggcagtcagtggagatttgatccttaccacaagagcacgtggacaaatttgaattatcgtggatgtatatgggcagaagaaggtctcagagccataagggtggggccctgttagctctgttggttccactcagcagcccacagtgtgagtgggaccctgccagccctgctagacttgagcattgtctggtgacgctggtccccgccttcattactgcagcagaggaagtgtggctgtggcagttgtgggttttgtattttctatttaaatatgtcccttaatgtgccagttgttaaaaagactaccagtgggctctgaagggatgcctggacactttgaaagtgtggttcagatgtgaaattgcactcaaaagatgttttaagagagacgagggcacgttgatgtcagtttcggtttgggctgtgtagtagcagcattttgaacttggccctctctcctttctgagagctaaagaccttatctccctgcggatggcattgcgtgcagttaattatggccagatggactcagccgcttcttcatcgtcttctctcggactctgcagacctacaccgtgcctttaaaggaagcagggccctccctgctgaagcattcagtgagcccaggcaccagcatcttcaaaccgagtcttttctctccttagtgctgctccccgctttccaggccttcctgggatatcttagaggtaagaaaactgaagcctcgacctagggagaaatgctttaacaaagacgacgctgctagttaaatcaatctagaactgagtccagcctccagatctcctgattatttttttttctaasagttgatgggatgaaatctacataagatttaatcctttgaagcccattgtttgatgagtattaaaaacttatgcagccacgcctctgtcaccacaatcccgctttagcacattcccatggcccaagcgagttccccggagcccctctgcagtcagtccccaccctcaaccccaccccaggcttccaccaactggttgagtttatagtgtagtgttatttccatgacttggttatttaaatttttttctgcttctaactgggtaagagttataacttaaatgtgagtaaaatatgtcaataacgtgaccctcagttattgtccttgtgtgatatcatacaagtctccacacatgccaggtactgggcaaaatgcttagggcatcagagcaacctgcgaagaagcgaccagcaccagagtttacaggtgtgggaaatgaaagttccacaaggtcactgatgcccccagatcacgtgatccatggcagaattgagctccttcccacatctcattaatgccagacacragttttctttcaatctgaatgctctgccctgttccggatttttaaaaaataataagtgcaatagaacattgccttttactaagaattatgccacttacttgtatttctgagaagggttgtccttaaratttcagagtggaaatgaaagtggggattttgctgaggaaaattactttgattgtttttaatacctttctgtgaatttcacatgmtgtttttatggcacactgccacagcattaacaattggcactaccagatgtctactttgtcttaattgtgggcaacctgcaagcgcagcctggaagatgttaaaaactgaaacctttatttttgtccctggatataagacgaacgggagttcttgtattttacgagagagtcaccagctcctggcttccagtgagcctcatctggatgaatgccacccaggccccagctgacgcctctgaggccttcctgggagctctggagtcctcacagcctagtcacactgcttcctctcttcattgcagctcctgaaggtgcggcactcgccttgaggcactttcttctgagctgtgagctatgggcaagcagtggagggggaagagagcagctgaagcagatgccggttcaacttacttaaagatgtgggacaagctctgaggaagcccccaagacaatgatgtctggttgtgcaccattgaagcaagaacagaaaccatcccagagtggaggacatggcccatgtggtcctcctgttctgagtggctatgagatggagttctgtgtgagctctctacagaaaaagccctgtctccaggcaatcagtggagatctgttaaacgagttgaaacaaaagaggacaaggaattgctgtgrctttagacgttgccaggacatgtagaaactcaytcaggatttactactgcatccactgtcacttaggcgcaggaggggtcacagtcagaaggtgactactgagaaatgtgccctacccacagtctagaaaattaagtttgggctgggcgtggtggctcacatctataatcccagaactttggaaggtggaggcaggtggatcactaggtcaggagtttgagaccagcctgaccaacatggtgaaaccccgtctgtactgaaaatacaaaaagtagccgggtgtgtcagtgcacgcctgtaatcccagctactcaggaacctgaggcaggagaatggcttgaaactgggaggcagaggttgcagtgagctgaaattgcgccactgcactccagcctgggtgacagagcgagactctgtctcaaaaaaaaaaaaagaaaaaaaaagaagaaaattaagtttgaaacctgaaattaacctcttggtgagaatggaaatggaatgaaatttcactcctttccagatgcagcttctgaagaggagacctggcagcctggcgagcatccagctcgctcacgcacctctttctagtcccgtggccatcagtgagcttctccgggtccctcttgccacttctcagatgttcctttctgtcctaggagatttgtaaaaccagatacttaggatatgattctctagtggagggttaggcctttaggtctctaaaaattgccattcatgaccttcgggcctagggttttgagatgaatgtgcagtgtgtgtggccgctctgtgtgtcccgcttccaccagcttggcattaagcacccggagcatcacctgctgggcaggcctggccaggggtgagcccctccattcgggggctcagggtcaaggcagattccttgcttggctttcctgctgatttcctcatgaagatgccaattcgtatttaaacatttgttatcaatggtggtgtttgtgtgctgatttctataggtaraggctgttgttttaggagccaggtttgctgggccagctcagacctcttacaaagtgaagatactaatgatcgtcttgcaaggtgccatagtgtcgtgagggtgaactgaggcagtggctatgcatggtgtctgcagcagcgtttctgaggctccaagaatatcagttcctttttcagaaatggggccagattcttsggatgtagacagtgttctcttcacggatgctaacaacttatcaaagctataatatattaagtatctctgttataataggatagatgcattcctaaaaaaatgtgttaagcaaaaatcagaaaatgaaaataaaaataacaaggccttgaggaaaagcatagttgggatgaacatttaaacctataccccagtaataatcctcataatgatactgacaaagttgaaaagatatgttgaattcctaataaatatcccagtaaatataggattacacacacacacacacacacacacacacacacacttctgcctgtgagaaggtagtgaataggaggagtaatgcagggccaattccaaggctgctaaatatggagacaaggataaaaaagcacaaagataggaagaactacctgacaggggttctgagtcagcatttgtccagctgagccaagaggaagactggggtgaatggacacgcataccatattcctccaaggttgcgtttttgttttttggggggttttttgtttgtttttttgttttttgagacagagtctcgctctgttgcccaggctggagtatagtggcacgatctcggctcactgcaagctctgcctcccgggttcacaccattctcctgcctcagcctcccgagtagctgggactacaggtgcccaccaccacgtgcccggctaatttttgtatttttagtagagacgagtttcaccgtattagccaggatggtcatgtttttgttcttgtttttgttttagagacagggtctccctctgtcacccaggctggagtgcagtggcacaatcacagctcactacagtgtcaaccttccaggttgaggatcactcgatactcatgcctcagcctcccatgtagctggggccacaggggcacaccaccactcctgacccattttttaaaaaattttttgtataggtggggtctcaccatgttgcccaggctagcctcgaactcctgggctcaagcaaccctctcaccttggcctcccaaagtgctgagattataggtgtgacccgccatgcccgcctttcctctgagttttgttgcattcacgcagctcctggctgaggcaaaacattaaaatgcatatggaaatgcaggctgggaaaatgctttgaaaccaatgcaatttctgtgttaaggggacattccctgattctttcaggtaatttgcattctagactgtgacattctgtatctcaactgataaataagcctgtttgtcatcctgctagatgagaacctgatatatgaaaccttttttttaatcgtggttaaaaaaaacataaaatttaccatcataattatttttaaatgtaccatttggcagcattaagtatatttaaactcttgtgaaacaaatttctagaatgttttcatcttgcaaaaccgaaacgctgtacctattaaacaactccccttttctccctctcttcaaccctggtaaccatgtttttatgaatttgactactttagatacctcatataagtcaggtcatacagtatttgtctctttgtgactggcttcacttagcataatgtcctcaaagtttaactatgttgtagcatgtatcagaattttatgaaacatgaagtcttagacaccccgaagtacattttcaccccaaatgtatttgaacagtgttaggctgggggtgggaggcgggagtccttcttgctttgcctgtgcaatgaaatgaataccctgctgtgtttatctccttgtcatgtgattctcccaggttgtttcttcaagtttctgagccaaacttaactctaaaaagcaaatattctgtgttaaaagacagtaatcaacaygggagctacatcagacatcataggacaaattgtcatctagaagagtatatttttaatgcaggagagtttttaaaacccagattggtgtgatttcattccagagagctcagaaatatgctcagcaagtcttgcagaaggaatgtcgtcccaagtttgccaagacatcaatggcgctgttatttgagcacaggtatagcgtggacttactcccttttgtgcagaaggcccccaaagacagtgaagctgagtccaagtacgatcctccttttgggttccggaagttctccagtaaagtccagaccctcttggaactcttgccagagcacgacctccctgaacacttgaaagccaagacctgtcggcgctgtgtggttattggaagcggaggaatactgcacggattagaactgggccacaccctgaaccagttcgatgttgtgataaggtacattggttttttttgtttgtttgtttacttatttttattgtttttattttattttattttttgaggcagggtctcactcctgttgtccaggctggagtgcagtggtgtgatctcagctcactgcagcctcaacttcccaggctcaggagatcctcccaccacagcctccccagtagctgggaccccaggcacacaccacgcgtggctaattttttatatttttagtagagatggggtttctccgaattgcccagactggggtacatcgcttttaaaaccaacctttctcctctagaactcagtgcactgctcttggtcagtgtggctccaggaacagtgagggacacaggaagctcttcacagtccctgcccacaagggacttaacgtttgagaagttgaaacaaaaacacaaaatggttggatgctccaaactgtcatactgaccctaagttggaggagcatgctgctggctacagtaagtggcagaaccttgtcagaggaagtgagatttggaaggtgggtagattcaagtaaaacagcaaaggaccacaactcccagacaggggcaagaagaggacacagcaagagacttgagtcaatgaggggcctggcttctggagaaggggcttggggccagtgagtcctggaaggcagtgctggctgggacatggaaggcacacagagaagttcagactcaccatgatagccaataggcagtcatcctagattcttttttggtttcactgtttaaaaattgttttctggccaggcgcagtggctcatgcctataatcccagcactttgggaggccaaggcaggaggatcgcttgagctcaggagttcaagaccagcctgggcaacatagagacagcttgtctctacagaaaatcaaaaagtcagccaggcatggtggactagattttcccttctgattccttttttgaaattctggcaagaactaacatctgagcacaatggaaaatttctgaggatattttactggcacccagagaaagtcccaaatgtaatatgcttagattgagtaaaaatattagggctagatgaaattgcttgacattcagggattagatacaagtgttcgctcaagtactaaaggctgcattcctcgaaatcctagaaagacagagctgggaggggagatgaggctgcaaaccatgcactcattcttagtcataagaagacgtggaggacatgacatggatactgcctggtgtacagagatggttgatggcctgctttgtcagtgtgtctttgtcctttttatttaaataggttaaacagtgcaccagttgagggatattcagaacatgttggaaataaaactactataaggatgacttatccagagggcgcaccactgtctgaccttgaatattattccaatgacttatttgttgctgttttatttaagagtgttgatttcaactggcttcaagcaatggtaaaaaaggaaaccctggtaagcactaatacttctattaaatctgccttagtaaaaagtgaaggagtcttacttagttgtaattatagccttttatttttaaacacgcagagcggaatgcatacttatgtgttgtctttcaaatgatgatcactctctttgtagaaacccctcagcaattcttttttttggggatggagtctcattctgttgtccaggctagagggctggagtgcagtggtgcagtcttggctctctgcagcctccgcatcccaggttcaagcaattctcctgcctcagcctcccgagtagctaggattacaggcgcctgccaccacgcccagttaatttttgtatttttaatagagatggggtttcaccatgttggccaggctggtctcaaactcctgacctcagragatccacccgcctcagcctccaaaagtgctgggattacaaacatgagccactgcacctggccctcttccagtggttcttgcacatgggcaggttggagaattcctggtagagacagtggtgagggtgtttataatttaaactgaacaaatactaggagctagtgggagatttgttgggtgcggtctcagcaccggcacttcctcagtgcttttgatttcatgggtgaaatttcacactcctgagagacaaatgagaccctgccccccagttgaaatcggaaagtaccatacagtgggagtatttttccttttggtggcgggaatggagtgagatggttataaagaggccctgctgcagttgtgtcaatccaggagtgggtgctttcctcctatgtctgtgtacagctgtacactctgcatggatgggccagacctaattaagagtcgcatgaaaatggtgatcattgcttaatgggaatatccagattgtgaccaaaattgctgttactgaggttgttcacccaccttgttctccagacatgaacttgcatagcttttggctagttccagaaattagacttacttagatggatataagcctttttgagggtattcaaaagcatataaaaatcaaggaatactctaaagagctccaaaaatgctttggtcagtggttcccttgttggaataaattcatggcattccagaagggcagctatggaggagatggccctcacttggtcatattccttttgtctttattggtcacattactttatagtctcacccattatattcaaatacatttcagaggtcagctgtcgaggagtgtatgcacatgtatagacatatgcacaaactagctgtctgtgaaactaatgggacgtattcaacttttcacgtaaactccatgtgatgacaaatttgtatttccaaagctgattctatatcagtcatcatggtcttctggattttctattgggcagaagttctagttggaagatgaagcatatatgaaacgayttcatgggactaggaaatagagtaagtgagagaggatgcgaggtgagggcagtttcagcacttaatagccttaaattggacctattcacttgggcttccctagacaaaatgatggtgttagcaccattgaggaatgtctacctcaaacaaatacaagctggttctgcaattcatctctttgtccagtgccrcctgtgtgaagtggctatttyagagttactttwttgagttggagtgccggatttgcgtagcttttgcaatctataggagtagattgcttcagaaggcagtgcacagggccacatggggtcacacccacagccttggtctgatgagtgggaatgctttctcccctcccctagaaggatgactaacaactgcttgcttgctttccttagccattctgggtacgactcttcttttggaagcaggtggcagaaaaaatcccactgcagccaaaacatttcaggattttgaatccagttatcatcaaagagactgcctttgacatccttcagtactcagagcctcagtcaaggttctggggccgagataaggtatttttgttgctactcaaagttaatcattccctgtttgaggggcgatgtrtacaaatttcactttggctcaactgtatacccagaagcatctccagtggagaaacccagcctgtgattagatgstccatgtgtgtttaccactctgcacttggctgcagggctcctcattgtttaattggccttctctccagtgactcttctctttagtgtaggcagcacattaacacttgaatcactgagatactattttaaggtattcttactccaggactccatataactgcaggacactgaaaggcactttcatgatctgaaaagttatttacattttattttttaattttttaaaaatttaaaaaattttgtaccccagagaaaagtcatatttacattttcactctgtgggccattcaggtgagtattgatttttatcatcactttgtaggtgatagttataaaagttaatcctcaagaacagtgtttttcagttaatgcctgggtctcatctcagacattctaattgttttgtgttttaagattttctaaattccgtggacgatttttattttgcagcctaatttgggaactttgtgctctaggctgtttattgcagtagagattctttacctgcaattagcaagtgctgccaccaggggcgtgggggtgtgcatgcctttattacttgcggcttcttgatctgaataacttgactggtgtctttaaaacttaagacctgtgtggaaattatcacatgtacaatgagaataaacactctcagaatacaaagagctcttactaaatcaaagagaaaaagatgaaccaatagaaaatgggcaaaaaataggaatagacatttcacaaaagaagaattaaaatagccaaagaatacatgtaaaaatgttcaactttaccaataatcaaataaaagcaaattagagccacaatagtatttttgcccattttcttagcaaagacttaaaagtttgataatgtccttgtttggcaggaatgtaggtagaatgatcagctggcactttttctggaggatattttggcaatattaaaccattttaaatacgaatcatctctgacccaccaattttacactaaaaacattattacaaggaaattagagaaatttataaagatggatattctaggatgtacactatagcattaacagcagaggactaaaaacagcctaaatgttcattattatgggattgtttaaacaaattatgataaagtcaatgcagtattgtctgttaaggatgaagaatataggaaaacacctccatagtatattaagtgagaaaataaacatacaaaacactaggctgggcgcggttgcagacgcctgtaatcccagcactttgggaggctgaggcgggcagatcacctgaggtcaggagttcgagaccagcctgaccaacatggagaaaccctgtctctactaaaaataaaattagccaggcgtggtggcgcgtgcctgtaatttcagctacttgggaggctgaggcaggagaatcgcttgacctgggaggcggaggttgcaatgagccgagatcgccccattgcactccagcctgggcaacaagagtgaaactccatcttaaaaaaaaaaaaaaaagatacagaacactttaacaataaaagtatgtgtttagtataaaagcttggaaatagacaccagcctgtgaagaatgcccttcttcagaggggaagtctatagaagacttctactttctgctttataatctgtctgttagttgaactgaatattttcctatttttataattgataaaatggcatttttcttttggataaaaacagtaacttaaaagaggacttctgatctaaagttgcagtatcagaaacttcctcatgtatatgtccttccagcagatgaagaagcctgttgagcagtaggagatgtgatctcaaagggcatgctatagagatgacatgctttggggagtttttcatcggttttttagttctctccatatatcaccccaatggacagttgatttcacacactccttcgacaaacattgaatattccctgtgtgacaagatggtcactgggggtacatggttggagaagacagaacaacgcctagagccctggctaaacaggaggaaagtgtcctttgtgttaatttctcttggtttctatttccaagcatgcagaatggctgttgagttcctttttaacaggtgaggttggctttgagaggtagatgcatcaaggagcaggaagcagattttaacaaatgatggcttcagtagatgttccctaatcccacctgaatctgtgaactctggagggtccactgttgttccactttacaaaaaagaagagttatatttatggcagccacaagctcaactaagatgaatgaaaagagaggcacatttttccatgaaaaactatacaaaaggatgctaatagtaagagtagtagtagattggtggcagcctttgaggaggcctagtgagctgcagggccttctgtattcctccctgtcctgtgtactgtttttacccaaggctggcatggagatccagaaagcacgatgtcagatttgcacattccaggaagcaagacaagatgccagacatgaggagggagtggggacaccatcagaatctagaaaggtttagacaatggagattctaggccaaggtcagtaggatacatttttaaaggaacaaatgtggaaatatttaattcaggactaaaaatgtacttgaggctggacatggtggcccatggctgtaatcccaacactttgggaagccaagacgggaggattgcttgagcccaggagttcgagaccagcctgggcaacatggtgaaaccctatttctacaaaaaaatacaaaaagtagctgggcatggtggcacatgcctgtagtcccagctactcaggaagctgaggtgggaggatcacctgagcctgtgaaggtcaaggctgcagtgagccgtgatcgcgccactgtaccccaacctgggcaacagagtgagaccgatgctgtctcaaaaaaaaaaacaaaatttacttgcccaaacagacggtgggaagaaactggcttagcagctctacatagggaaatggcctggaagtgctatttgccagcaaagccaatggggcccttaagtgggatgtagctgctggtgtgtgaacacagtcttttgcagtgagaactgagaatcctctgttctcaggaagggatgggctccagaaactgtgccctgggaaggaccatggaaggtcctgtggccacctctcccagagcagacctcatagacatttgtcattgagagaggaagtaggcttttttttttattttttttttttaatgattctgggcatcacatataggaaggaccagtggggtagacattttagaaggaacgcctttttttttttttttttttttttttttttttttgagacagagnnnnnnnnnnnnnnnnnnnnccttttattttttttttttttttttttcccttaagagacagagtcttgctctgtcgccagggtggagtgcagtggctcgatctcggctcactgcagcctccgcctcctgggttcaagtgattctcctgcctcagcctcctgagtagctgggactacaggcgtgtgccaccacacctggctaaattttgtatttttagtagagacagggtttcaccatattggccaggctggtctcaaactcttgacctcgtgatccgcccacctcggcctcccagagtgctgggattacaggcgtgagccaccgcacctggcctagaaggggaataccttttaacttggtgtaagaattgtcaggctgccccttgaaagtgtgtgaacatcacagaccatgttttagagcctagattcctgacttaaatggagagttggactctaaagttcatgatgtataaaattatgtgatgtatgaaattgcagcccccaatgtagctttcatgactctgcgtagcatgtgtaataccagcaaaatggtgacttgtgccaaaatttttttttactttttggtcttcttttccctttctcagaacgtccccacaatcggtgtcattgccgttgtcttagccacacatctgtgcgatgaagtcagtttggcgggttttggatatgacctcaatcaacccagaacacctttgcactacttcgacagtcaatgcatggctgctatgaactttcagaccatgcataatgtgacaacggaaaccaagttcctcttaaagctggtcaaagagggagtggtgaaagatctcagtggaggcattgatcgtgaattttgaacacagaaaacctcagttgaaaatgcaactctaactctgagagctgtttttgacagccttcttgatgtatttctccatcctgcagatactttgaagtgcagctcatgtttttaacttttaatttaaaaacacaaaaaaaattttagctcttcccactttttttttcctatttatttgaggtcagtgtttgtttttgcacaccattttgtaaatgaaacttaagaattgaattggaaagacttctcaaagagaattgtatgtaacgatgttgtattgatttttaagaaagtaatttaatttgtaaaacttctgctcgtttacactgcacattgaatacaggtaactaattggaaggagaggggaggtcactcttttgatggtggccctgaacctcattctggttccctgctgcgctgcttggtgtgacccacggaggatccactcccaggatgacgtgctccgtagctctgctgctgatactgggtctgcgatgcagcggcgtgaggcctgggctggttggagaaggtcacaacccttctctgttggtctgccttctgctgaaagactcgagaaccaaccagggaagctgtcctggaggtccctggtcggagagggacatagaatctgtgacctctgacaactgtgaagccaccctgggctacagaaaccacagtcttcccagcaattattacaattcttgaattccttggggattttttactgccctttcaaagcacttaagtgttagatctaacgtgttccagtgtctgtctgaggtgacttaaaaaatcagaacaaaacttctattatccagagtcatgggagagtacaccctttccaggaataatgttttgggaaacactgaaatgaaatcttcccagtattataaattgtgtatttaaaaaaaagaaacttttctgaatgcctacctggcggtgtataccaggcagtgtgccagtttaaaaagatgaaaaagaataaaaacttttgaggaactctcgtagtctggttaatttgggtgcttatgtctatgaatctacccaaaacctccttcttggatgctgctgctaggcggagacctctctgtggatgccagtagtgagggacagagaattaaggcacctggtcctgcaagctgcttgagtccagacaactgtgaacccttctgaagagatgctgggtgtcggtggcttcctccccaaagacaggctgcccctagcttctgtctcttaatggctctagcctctgatatcagaagatctgctactctgttcccagcctgccccagactcggctgccgccatcgctgttctccactctgtggctgctcttgtcactaatgctacctgcctccactttcccttcctgcaactgcttgtgcagccccagtgcagccttggccccagcccattcgaacgtcttcccatctccctcctcctcaccatatgcagggccaggagtcaggtcatagcattcaaagcagagtcccttctgtctcctggggtctgggatccagctcagagtggccaggagagcaaaagtcatatttctctcgttttgtgtctttacagataattttgtatgaattttatttcctactctataagctactgcttgtttaagagaaaatgttttaagattatcacccatcaaatgagtttagaaaattgagactctggaagatggtccacagctcccttgtggctcaggtggtgctgggcttacaccacacagctccacccctacatccctcagggggttattggagaagccggaacttcctcagacaacgttcttaatgctacgagcgcctccttgctggtatgaggagacttgcctacctgcttctcaaggctgctgggatgtgtggtgctcaaagcttccacttggtcagcttgcagccattctcaggcctgctcccatccccatccctcctccctgtaaggcccttcttgcatccttaggttgctttgctcatgtctctcaacttttacttactcaggtggtaagtagataccctaaaaaggtatatttttgtagaccttttatagagtccaccagccaataggagttggctggagatcattctcaagaacttttcacactttggcattcatttgttggaagttgcatcttcacttcagagctgtgcccccattactcccccaccccacacacactcttctgaaaacagacctttgctaggtgcctctgggtgttctaaagttgatctccagtaactgagaattcactgccacactaacagctttgtattgcattctagacccgcacacacaccctccgacataaatgaaatcactggttctgaggcaacttaggaagacttacacatgttctgtattttaacatgcttctagaactttgagctgcagaaaatttcagttttagggttttttaattttaatttttgattgatacatagtgatgtgcatattttgagggtccatgtgataatgtaatacatttgtgtaattataaggagcaaatctgtgtaactgggatatctgtcacattaaatatttgtctttatggtagaaacatttgaattattctagtgattttgaaatacacagtaaattattgtaaactataggcattctactgacctatcaaacactaggtcttgtttcttttatcaaactgtatgtttgtacccattaatcaacctctcttcatttccccctacccttcttggcctctggtaactaccaatctactctctatcttcatgagatccacttttttagctcctacataggaatgagaacatgtgatatttgtctttctgtgtttggcttatttcacttaacatcacctccagttccatccatcttgctgcagataacatgatttcaacctttttatggcagaataatattccattgtgtatatataccacattttctttattcattcacccattgatggacacttaggttgatttcatgttttggctatgtgaatagcgctgcaataaatatgggagtatagatatatcttcaatatgtcttttgttttggatattgatatggtttggctctgtgtccccacccaaatttcatcttgaattttactcccataattcccatgtattgtgggagggaccctgtgggagatcatttgaatcatggaggtggtttccctcatactgttcccatggtagtgcataaatctcacaagatctgatggttttatcaggggtttccacttttgcatcctcctctcttgccactgccatgtaagaagtgccttttgcctcccaccttgattctgaggcctccccagccatgtggaaatgtaagtccaattaaatctctttttgttcacagtcatgggtatgtctttatcagcagcgtgaaaacagactattatggatatataatcagtagtggaatggctggatcagatggtaattctatttttagttttttgaggaacctccatgcaatactccatagtggctgtactaatttacattcccaccaacaatgcgcaagggtttcctttctctacgtccttgccagcatttacattccctgtctttttaataagatccattttaactggggtgagattatattgtggttttgatttgtatttcttgatgattagtaatattaagcatttttttcatatacctcttggccctctgtctttttttgagaaatgtctctttagatcttttgcccattttaaaatcagtttgttttttacttttgagttgtttgaactctttatatattttggttattaaccccttgtcagatggatagttcacaagtatcttctcccattccatggattgtctcttgacttgttgattgtttcctttactgcacagaatgtttttagcttgatgtaattctatttgtctgtttttgctttggttgcctgtgcttttgagctcttacacaaaatatttttgcccagaccaatgtcctggagtgtttcatagttttaggtcttagatttaaatctttaatccatttgctttggtttttgtatatggtgagagatagaggttcagttttattcttttgcatataactatccagttttcccagcatcatttattgaagagactctctcctttccccattgtatgttcttggtgcctttgtcaaaaatgagttggctataaacgcatggatttatatctgggtctgggttctctattctgttccattggtctgatgtctttgcatgccagtaccatgatgttttggttactatagctttgtagtatattttgaagtcaggtagtgtgattcctatagctttgttctttttgctcaggattgctttggctatttggggtcttttgtggctccatgtaaattttggaattattttttctatttctgtgaagaatgtcatcgggtccatgagcatgaaatatctttccattttggggtgccctcttcagtttctttcattagtgttttatagttgtctttggatagatctttcacatctttggttaaattgattcctaggtattttgtattctttgtagctaccataaatgaaattgatttcttgatttctttttcagattgttgttcttgggatatgtaaatgctattgatttttgtatgttgattttgaatgctgcaactttactgaattcacttatcagttccaacagttgtttggtggagtctttaggtttttctaagtataatatcatgtcatctgcaaacaagactaatttaaacttctttctttgatgccctttatttctttctcttgccttattgccctgaaacttcgagtagtaggtcaaataaaagtggtgaaagtgggcatctttgtctggttccggattttaaagaaaagggtttcagtttttccctatcagtattatattagctaggagtttttcatagctaatgacctttattattttgaagtatgtttcttctatacctagtttgttgaaggtttttttcttataaaggcatgtttaatttattgaatgctttttcagcatctattgaaataatcatatcgttcttgttcttggttctcttaatgcgatatattgtgtttattgatttgtatgttgaaccatccttgcatccctaggatgaatcctatttgatcatgatgaattatctttttaatgtgttgttgaattccatttgctagtatttttttgaggatttttgcatctatgttcatcagtgatattggcctatagttctcttttttggttgtgtctttgtctggtttggtatcagggtaatgcaagccttatagaatgagtttggaaatattcccttctcttcaatttttatgaagcatttgaatggaattggtcatcattcttctttaaatgtttggtagaattcagcaataatgcaatcaggtcctagacttttctttgatgggagacattttattatggcttcaatctcatgactcattagtggtttgttgaaattttctatttcttcatggtttcaatcttggtaggttgtatgtgtccaggaatttgcccatttgttctaggttttccaacttgttggcatgtagttgttcataacagcttctaatgattttttgtatgtctgtggcatcagttgttatgtctcctgtttcatttacaattttatttatttgagtcttctctcttagttaatctagctaaaggtttgtcaatttagtttttgccaaaaaaaaaaaaccttttcatttcattgattttctttattttttagtctccatttattgctgctctgaattttatatcttttcttctaattttgagtttagtttgttcttttctagttttttgaggtacatcattaggttgtttatttgaagtctttctacttttttgttacaggcatttattgctataaaattccctcttagtactatttttgttgtattctacacattttgatatgtcattttccattttcatttgtttccagaaatttttaaaattttcttaatttccttattggccctaggtcattcaggagtgtgttaatttccatgtgtttgtgtatttcccaaggccccccttgttatttctagttttattccattgtgatcagaaaatatacttgatatgatttctacttttttgcatttgttgagacttgttttgtggcctaatatacagtctgttttggagaatgttccatgtgctgatgaagaaaatgtgtattctgcagcagttgggtaaaatgttctgtaagtgtcaggcctaatttgatctggtgtgtagtttaactccagtgtttcttgattttctgtctggatgacctgtccatcacatatagtagcatgttgaagtcccctactattattgtattgcagtctatctctccctttagatttgttaatgttcgcattatatacttgagagctctgttgttcagtacatagatattgatacatatttcctcctgctgaattattccctttatcattagtgatcttctttgtctctttttacagtctttgatctgtagtctgttttatctgatgtaagtacttacttatatcagctacttactcctgctcttttttggtttccaattacatagaatatctttttccatcccttcacgttagaagtgaaatgatcttcttgtaggcagcatatagtcaggtcttatttctttatccatttagccattctatgtcttttaattggagaactgagtccatttacattcagtgtttttgttgataggtaaggacttactactgccattttgttgcttgttttctggttgttttgtaactcctctcttcctttcttactgtcttcctttgtggtaagtgattttctctgatagtatgttttaacgcattgctttttatttttagtgaatctattatagatttttgcattgtggttaccatcaggcttaccaaaaaaatcttacagatacaacaagttattttaaagagatggcagcatagatcacacagaaaatagaaacaaagaaaaatgtaaaaacaaaaaact
